United States Patent Application Publication US 2024/0374759 A1 - sequence listing, part 2

SEQ ID NO: 816 - protein, 2087 aa, synthetic construct
  source 1..2087: note = Description of Artificial Sequence: Synthetic polypeptide
MPAAKRVKLDGGDKKYSIGLDIGTNSVGWAVITDEYKVPSKKFKVLGNTDRHSIKKNLIGALLFDSGETAEATRLKRTARRRYTRRKNRICYLQEIFSNEMAKVDDSFFHRLEESFLVEEDKKHERHPIFGNIVDEVAYHEKYPTIYHLRKKLVDSTDKADLRLIYLALAHMIKFRGHFLIEGDLNPDNSDVDKLFIQLVQTYNQLFEENPINASGVDAKAILSARLSKSRRLENLIAQLPGEKKNGLFGNLIALSLGLTPNFKSNFDLAEDAKLQLSKDTYDDDLDNLLAQIGDQYADLFLAAKNLSDAILLSDILRVNTEITKAPLSASMIKRYDEHHQDLTLLKALVRQQLPEKYKEIFFDQSKNGYAGYIDGGASQEEFYKFIKPILEKMDGTEELLVKLNREDLLRKQRTFDNGSIPHQIHLGELHAILRRQEDFYPFLKDNREKIEKILTFRIPYYVGPLARGNSRFAWMTRKSEETITPWNFEEVVDKGASAQSFIERMTNFDKNLPNEKVLPKHSLLYEYFTVYNELTKVKYVTEGMRKPAFLSGEQKKAIVDLLFKTNRKVTVKQLKEDYFKKIECFDSVEISGVEDRFNASLGTYHDLLKIIKDKDFLDNEENEDILEDIVLTLTLFEDREMIEERLKTYAHLFDDKVMKQLKRRRYTGWGRLSRKLINGIRDKQSGKTILDFLKSDGFANRNFMQLIHDDSLTFKEDIQKAQVSGQGDSLHEHIANLAGSPAIKKGILQTVKVVDELVKVMGRHKPENIVIEMARENQTTQKGQKNSRERMKRIEEGIKELGSQILKEHPVENTQLQNEKLYLYYLQNGRDMYVDQELDINRLSDYDVDHIVPQSFLKDDSIDNKVLTRSDKARGKSDNVPSEEVVKKMKNYWRQLLNAKLITQRKFDNLTKAERGGLSELDKAGFIKRQLVETRQITKHVAQILDSRMNTKYDENDKLIREVKVITLKSKLVSDFRKDFQFYKVREINNYHHAHDAYLNAVVGTALIKKYPKLESEFVYGDYKVYDVRKMIAKSEQEIGKATAKYFFYSNIMNFFKTEITLANGEIRKRPLIETNGETGEIVWDKGRDFATVRKVLSMPQVNIVKKTEVQTGGFSKESILPKRNSDKLIARKKDWDPKKYGGFDSPTVAYSVLVVAKVEKGKSKKLKSVKELLGITIMERSSFEKNPIDFLEAKGYKEVKKDLIIKLPKYSLFELENGRKRMLASAGELQKGNELALPSKYVNFLYLASHYEKLKGSPEDNEQKQLFVEQHKHYLDEIIEQISEFSKRVILADANLDKVLSAYNKHRDKPIREQAENIIHLFTLTNLGAPAAFKYFDTTIDRKRYTSTKEVLDATLIHQSITGLYETRIDLSQLGGDGGGGGGGGVLNLEEEYRLHEKPVPSSIDPSWLQLFPTVWAERAGMGLANQVPPVVVELRSGASPVAVRQYPMSKEAREGIRPHIQRFLDLGVLVPCQSPWNTPLLPVKKPGTNDYRPVQDLREINKRVQDIHPTVPNPYNLLSSLPPSHTWYSVLDLKDAFFCLKLHPNSQPLFAFEWRDPEKGNTGQLTWTRLPQGFKNSPTLFNEALHRDLAPFRALNPQVVLLQYVDDLLVAAPTYRDCKEGTQKLLQELSKLGYRVSAKKAQLCQKEVTYLGYLLKEGKRWLTPARKATVMKIPPPTTPRQVREFLGTAGFCRLWIPGFASLAAPLYPLTKPSIPFIWTEEHQKAFDRIKEALLSAPALALPDLTKPFTLYVDERAGVARGVLTQTLGPWRRPVAYLSKKLDPVASGWPTCLKAVAAVALLLKDADKLTLGQNVTVIASHSLESIVRQPPDRWMTNARMTHYQSLLLNERVSFAPPAVLNPATLLPVESEATPVHRCSEILAEETGTRRDLKDQPLPGVPAWYTDGSSFIAEGKRRAGAAIVDGKRTVWASSLPEGTSAQKAELVALTQALRLAEGKDINIYTDSRYAFATAHIHGAIYKQRGWLTSAGKDIKNKEEILALLEAIHLPKRVAIIHCPGHQKGNDPVATGNRRADEAAKQAALSTRVLAETTKPAGKRTADGSEFEKRTADGSEFESPKKKAKVE

SEQ ID NO: 817 - protein, 2091 aa, synthetic construct
  source 1..2091: note = Description of Artificial Sequence: Synthetic polypeptide
MPAAKRVKLDGGDKKYSIGLDIGTNSVGWAVITDEYKVPSKKFKVLGNTDRHSIKKNLIGALLFDSGETAEATRLKRTARRRYTRRKNRICYLQEIFSNEMAKVDDSFFHRLEESFLVEEDKKHERHPIFGNIVDEVAYHEKYPTIYHLRKKLVDSTDKADLRLIYLALAHMIKFRGHFLIEGDLNPDNSDVDKLFIQLVQTYNQLFEENPINASGVDAKAILSARLSKSRRLENLIAQLPGEKKNGLFGNLIALSLGLTPNFKSNFDLAEDAKLQLSKDTYDDDLDNLLAQIGDQYADLFLAAKNLSDAILLSDILRVNTEITKAPLSASMIKRYDEHHQDLTLLKALVRQQLPEKYKEIFFDQSKNGYAGYIDGGASQEEFYKFIKPILEKMDGTEELLVKLNREDLLRKQRTFDNGSIPHQIHLGELHAILRRQEDFYPFLKDNREKIEKILTFRIPYYVGPLARGNSRFAWMTRKSEETITPWNFEEVVDKGASAQSFIERMTNFDKNLPNEKVLPKHSLLYEYFTVYNELTKVKYVTEGMRKPAFLSGEQKKAIVDLLFKTNRKVTVKQLKEDYFKKIECFDSVEISGVEDRFNASLGTYHDLLKIIKDKDFLDNEENEDILEDIVLTLTLFEDREMIEERLKTYAHLFDDKVMKQLKRRRYTGWGRLSRKLINGIRDKQSGKTILDFLKSDGFANRNFMQLIHDDSLTFKEDIQKAQVSGQGDSLHEHIANLAGSPAIKKGILQTVKVVDELVKVMGRHKPENIVIEMARENQTTQKGQKNSRERMKRIEEGIKELGSQILKEHPVENTQLQNEKLYLYYLQNGRDMYVDQELDINRLSDYDVDHIVPQSFLKDDSIDNKVLTRSDKARGKSDNVPSEEVVKKMKNYWRQLLNAKLITQRKFDNLTKAERGGLSELDKAGFIKRQLVETRQITKHVAQILDSRMNTKYDENDKLIREVKVITLKSKLVSDFRKDFQFYKVREINNYHHAHDAYLNAVVGTALIKKYPKLESEFVYGDYKVYDVRKMIAKSEQEIGKATAKYFFYSNIMNFFKTEITLANGEIRKRPLIETNGETGEIVWDKGRDFATVRKVLSMPQVNIVKKTEVQTGGFSKESILPKRNSDKLIARKKDWDPKKYGGFDSPTVAYSVLVVAKVEKGKSKKLKSVKELLGITIMERSSFEKNPIDFLEAKGYKEVKKDLIIKLPKYSLFELENGRKRMLASAGELQKGNELALPSKYVNFLYLASHYEKLKGSPEDNEQKQLFVEQHKHYLDEIIEQISEFSKRVILADANLDKVLSAYNKHRDKPIREQAENIIHLFTLTNLGAPAAFKYFDTTIDRKRYTSTKEVLDATLIHQSITGLYETRIDLSQLGGDGGEAAAKGGGGGVLNLEEEYRLHEKPVPSSIDPSWLQLFPTVWAERAGMGLANQVPPVVVELRSGASPVAVRQYPMSKEAREGIRPHIQRFLDLGVLVPCQSPWNTPLLPVKKPGTNDYRPVQDLREINKRVQDIHPTVPNPYNLLSSLPPSHTWYSVLDLKDAFFCLKLHPNSQPLFAFEWRDPEKGNTGQLTWTRLPQGFKNSPTLFNEALHRDLAPFRALNPQVVLLQYVDDLLVAAPTYRDCKEGTQKLLQELSKLGYRVSAKKAQLCQKEVTYLGYLLKEGKRWLTPARKATVMKIPPPTTPRQVREFLGTAGFCRLWIPGFASLAAPLYPLTKPSIPFIWTEEHQKAFDRIKEALLSAPALALPDLTKPFTLYVDERAGVARGVLTQTLGPWRRPVAYLSKKLDPVASGWPTCLKAVAAVALLLKDADKLTLGQNVTVIASHSLESIVRQPPDRWMTNARMTHYQSLLLNERVSFAPPAVLNPATLLPVESEATPVHRCSEILAEETGTRRDLKDQPLPGVPAWYTDGSSFIAEGKRRAGAAIVDGKRTVWASSLPEGTSAQKAELVALTQALRLAEGKDINIYTDSRYAFATAHIHGAIYKQRGWLTSAGKDIKNKEEILALLEAIHLPKRVAIIHCPGHQKGNDPVATGNRRADEAAKQAALSTRVLAETTKPAGKRTADGSEFEKRTADGSEFESPKKKAKVE

SEQ ID NO: 818 - protein, 2101 aa, synthetic construct
  source 1..2101: note = Description of Artificial Sequence: Synthetic polypeptide
MPAAKRVKLDGGDKKYSIGLDIGTNSVGWAVITDEYKVPSKKFKVLGNTDRHSIKKNLIGALLFDSGETAEATRLKRTARRRYTRRKNRICYLQEIFSNEMAKVDDSFFHRLEESFLVEEDKKHERHPIFGNIVDEVAYHEKYPTIYHLRKKLVDSTDKADLRLIYLALAHMIKFRGHFLIEGDLNPDNSDVDKLFIQLVQTYNQLFEENPINASGVDAKAILSARLSKSRRLENLIAQLPGEKKNGLFGNLIALSLGLTPNFKSNFDLAEDAKLQLSKDTYDDDLDNLLAQIGDQYADLFLAAKNLSDAILLSDILRVNTEITKAPLSASMIKRYDEHHQDLTLLKALVRQQLPEKYKEIFFDQSKNGYAGYIDGGASQEEFYKFIKPILEKMDGTEELLVKLNREDLLRKQRTFDNGSIPHQIHLGELHAILRRQEDFYPFLKDNREKIEKILTFRIPYYVGPLARGNSRFAWMTRKSEETITPWNFEEVVDKGASAQSFIERMTNFDKNLPNEKVLPKHSLLYEYFTVYNELTKVKYVTEGMRKPAFLSGEQKKAIVDLLFKTNRKVTVKQLKEDYFKKIECFDSVEISGVEDRFNASLGTYHDLLKIIKDKDFLDNEENEDILEDIVLTLTLFEDREMIEERLKTYAHLFDDKVMKQLKRRRYTGWGRLSRKLINGIRDKQSGKTILDFLKSDGFANRNFMQLIHDDSLTFKEDIQKAQVSGQGDSLHEHIANLAGSPAIKKGILQTVKVVDELVKVMGRHKPENIVIEMARENQTTQKGQKNSRERMKRIEEGIKELGSQILKEHPVENTQLQNEKLYLYYLQNGRDMYVDQELDINRLSDYDVDHIVPQSFLKDDSIDNKVLTRSDKARGKSDNVPSEEVVKKMKNYWRQLLNAKLITQRKFDNLTKAERGGLSELDKAGFIKRQLVETRQITKHVAQILDSRMNTKYDENDKLIREVKVITLKSKLVSDFRKDFQFYKVREINNYHHAHDAYLNAVVGTALIKKYPKLESEFVYGDYKVYDVRKMIAKSEQEIGKATAKYFFYSNIMNFFKTEITLANGEIRKRPLIETNGETGEIVWDKGRDFATVRKVLSMPQVNIVKKTEVQTGGFSKESILPKRNSDKLIARKKDWDPKKYGGFDSPTVAYSVLVVAKVEKGKSKKLKSVKELLGITIMERSSFEKNPIDFLEAKGYKEVKKDLIIKLPKYSLFELENGRKRMLASAGELQKGNELALPSKYVNFLYLASHYEKLKGSPEDNEQKQLFVEQHKHYLDEIIEQISEFSKRVILADANLDKVLSAYNKHRDKPIREQAENIIHLFTLTNLGAPAAFKYFDTTIDRKRYTSTKEVLDATLIHQSITGLYETRIDLSQLGGDGGGSSGSSGSSGSSGSSGSSGGVLNLEEEYRLHEKPVPSSIDPSWLQLFPTVWAERAGMGLANQVPPVVVELRSGASPVAVRQYPMSKEAREGIRPHIQRFLDLGVLVPCQSPWNTPLLPVKKPGTNDYRPVQDLREINKRVQDIHPTVPNPYNLLSSLPPSHTWYSVLDLKDAFFCLKLHPNSQPLFAFEWRDPEKGNTGQLTWTRLPQGFKNSPTLFNEALHRDLAPFRALNPQVVLLQYVDDLLVAAPTYRDCKEGTQKLLQELSKLGYRVSAKKAQLCQKEVTYLGYLLKEGKRWLTPARKATVMKIPPPTTPRQVREFLGTAGFCRLWIPGFASLAAPLYPLTKPSIPFIWTEEHQKAFDRIKEALLSAPALALPDLTKPFTLYVDERAGVARGVLTQTLGPWRRPVAYLSKKLDPVASGWPTCLKAVAAVALLLKDADKLTLGQNVTVIASHSLESIVRQPPDRWMTNARMTHYQSLLLNERVSFAPPAVLNPATLLPVESEATPVHRCSEILAEETGTRRDLKDQPLPGVPAWYTDGSSFIAEGKRRAGAAIVDGKRTVWASSLPEGTSAQKAELVALTQALRLAEGKDINIYTDSRYAFATAHIHGAIYKQRGWLTSAGKDIKNKEEILALLEAIHLPKRVAIIHCPGHQKGNDPVATGNRRADEAAKQAALSTRVLAETTKPAGKRTADGSEFEKRTADGSEFESPKKKAKVE

SEQ ID NO: 819 - protein, 2091 aa, synthetic construct
  source 1..2091: note = Description of Artificial Sequence: Synthetic polypeptide
MPAAKRVKLDGGDKKYSIGLDIGTNSVGWAVITDEYKVPSKKFKVLGNTDRHSIKKNLIGALLFDSGETAEATRLKRTARRRYTRRKNRICYLQEIFSNEMAKVDDSFFHRLEESFLVEEDKKHERHPIFGNIVDEVAYHEKYPTIYHLRKKLVDSTDKADLRLIYLALAHMIKFRGHFLIEGDLNPDNSDVDKLFIQLVQTYNQLFEENPINASGVDAKAILSARLSKSRRLENLIAQLPGEKKNGLFGNLIALSLGLTPNFKSNFDLAEDAKLQLSKDTYDDDLDNLLAQIGDQYADLFLAAKNLSDAILLSDILRVNTEITKAPLSASMIKRYDEHHQDLTLLKALVRQQLPEKYKEIFFDQSKNGYAGYIDGGASQEEFYKFIKPILEKMDGTEELLVKLNREDLLRKQRTFDNGSIPHQIHLGELHAILRRQEDFYPFLKDNREKIEKILTFRIPYYVGPLARGNSRFAWMTRKSEETITPWNFEEVVDKGASAQSFIERMTNFDKNLPNEKVLPKHSLLYEYFTVYNELTKVKYVTEGMRKPAFLSGEQKKAIVDLLFKTNRKVTVKQLKEDYFKKIECFDSVEISGVEDRFNASLGTYHDLLKIIKDKDFLDNEENEDILEDIVLTLTLFEDREMIEERLKTYAHLFDDKVMKQLKRRRYTGWGRLSRKLINGIRDKQSGKTILDFLKSDGFANRNFMQLIHDDSLTFKEDIQKAQVSGQGDSLHEHIANLAGSPAIKKGILQTVKVVDELVKVMGRHKPENIVIEMARENQTTQKGQKNSRERMKRIEEGIKELGSQILKEHPVENTQLQNEKLYLYYLQNGRDMYVDQELDINRLSDYDVDHIVPQSFLKDDSIDNKVLTRSDKARGKSDNVPSEEVVKKMKNYWRQLLNAKLITQRKFDNLTKAERGGLSELDKAGFIKRQLVETRQITKHVAQILDSRMNTKYDENDKLIREVKVITLKSKLVSDFRKDFQFYKVREINNYHHAHDAYLNAVVGTALIKKYPKLESEFVYGDYKVYDVRKMIAKSEQEIGKATAKYFFYSNIMNFFKTEITLANGEIRKRPLIETNGETGEIVWDKGRDFATVRKVLSMPQVNIVKKTEVQTGGFSKESILPKRNSDKLIARKKDWDPKKYGGFDSPTVAYSVLVVAKVEKGKSKKLKSVKELLGITIMERSSFEKNPIDFLEAKGYKEVKKDLIIKLPKYSLFELENGRKRMLASAGELQKGNELALPSKYVNFLYLASHYEKLKGSPEDNEQKQLFVEQHKHYLDEIIEQISEFSKRVILADANLDKVLSAYNKHRDKPIREQAENIIHLFTLTNLGAPAAFKYFDTTIDRKRYTSTKEVLDATLIHQSITGLYETRIDLSQLGGDGGPAPEAAAKGGVLNLEEEYRLHEKPVPSSIDPSWLQLFPTVWAERAGMGLANQVPPVVVELRSGASPVAVRQYPMSKEAREGIRPHIQRFLDLGVLVPCQSPWNTPLLPVKKPGTNDYRPVQDLREINKRVQDIHPTVPNPYNLLSSLPPSHTWYSVLDLKDAFFCLKLHPNSQPLFAFEWRDPEKGNTGQLTWTRLPQGFKNSPTLFNEALHRDLAPFRALNPQVVLLQYVDDLLVAAPTYRDCKEGTQKLLQELSKLGYRVSAKKAQLCQKEVTYLGYLLKEGKRWLTPARKATVMKIPPPTTPRQVREFLGTAGFCRLWIPGFASLAAPLYPLTKPSIPFIWTEEHQKAFDRIKEALLSAPALALPDLTKPFTLYVDERAGVARGVLTQTLGPWRRPVAYLSKKLDPVASGWPTCLKAVAAVALLLKDADKLTLGQNVTVIASHSLESIVRQPPDRWMTNARMTHYQSLLLNERVSFAPPAVLNPATLLPVESEATPVHRCSEILAEETGTRRDLKDQPLPGVPAWYTDGSSFIAEGKRRAGAAIVDGKRTVWASSLPEGTSAQKAELVALTQALRLAEGKDINIYTDSRYAFATAHIHGAIYKQRGWLTSAGKDIKNKEEILALLEAIHLPKRVAIIHCPGHQKGNDPVATGNRRADEAAKQAALSTRVLAETTKPAGKRTADGSEFEKRTADGSEFESPKKKAKVE

SEQ ID NO: 820 - protein, 2094 aa, synthetic construct
  source 1..2094: note = Description of Artificial Sequence: Synthetic polypeptide
MPAAKRVKLDGGDKKYSIGLDIGTNSVGWAVITDEYKVPSKKFKVLGNTDRHSIKKNLIGALLFDSGETAEATRLKRTARRRYTRRKNRICYLQEIFSNEMAKVDDSFFHRLEESFLVEEDKKHERHPIFGNIVDEVAYHEKYPTIYHLRKKLVDSTDKADLRLIYLALAHMIKFRGHFLIEGDLNPDNSDVDKLFIQLVQTYNQLFEENPINASGVDAKAILSARLSKSRRLENLIAQLPGEKKNGLFGNLIALSLGLTPNFKSNFDLAEDAKLQLSKDTYDDDLDNLLAQIGDQYADLFLAAKNLSDAILLSDILRVNTEITKAPLSASMIKRYDEHHQDLTLLKALVRQQLPEKYKEIFFDQSKNGYAGYIDGGASQEEFYKFIKPILEKMDGTEELLVKLNREDLLRKQRTFDNGSIPHQIHLGELHAILRRQEDFYPFLKDNREKIEKILTFRIPYYVGPLARGNSRFAWMTRKSEETITPWNFEEVVDKGASAQSFIERMTNFDKNLPNEKVLPKHSLLYEYFTVYNELTKVKYVTEGMRKPAFLSGEQKKAIVDLLFKTNRKVTVKQLKEDYFKKIECFDSVEISGVEDRFNASLGTYHDLLKIIKDKDFLDNEENEDILEDIVLTLTLFEDREMIEERLKTYAHLFDDKVMKQLKRRRYTGWGRLSRKLINGIRDKQSGKTILDFLKSDGFANRNFMQLIHDDSLTFKEDIQKAQVSGQGDSLHEHIANLAGSPAIKKGILQTVKVVDELVKVMGRHKPENIVIEMARENQTTQKGQKNSRERMKRIEEGIKELGSQILKEHPVENTQLQNEKLYLYYLQNGRDMYVDQELDINRLSDYDVDHIVPQSFLKDDSIDNKVLTRSDKARGKSDNVPSEEVVKKMKNYWRQLLNAKLITQRKFDNLTKAERGGLSELDKAGFIKRQLVETRQITKHVAQILDSRMNTKYDENDKLIREVKVITLKSKLVSDFRKDFQFYKVREINNYHHAHDAYLNAVVGTALIKKYPKLESEFVYGDYKVYDVRKMIAKSEQEIGKATAKYFFYSNIMNFFKTEITLANGEIRKRPLIETNGETGEIVWDKGRDFATVRKVLSMPQVNIVKKTEVQTGGFSKESILPKRNSDKLIARKKDWDPKKYGGFDSPTVAYSVLVVAKVEKGKSKKLKSVKELLGITIMERSSFEKNPIDFLEAKGYKEVKKDLIIKLPKYSLFELENGRKRMLASAGELQKGNELALPSKYVNFLYLASHYEKLKGSPEDNEQKQLFVEQHKHYLDEIIEQISEFSKRVILADANLDKVLSAYNKHRDKPIREQAENIIHLFTLTNLGAPAAFKYFDTTIDRKRYTSTKEVLDATLIHQSITGLYETRIDLSQLGGDGGEAAAKGGSGSSGGVLNLEEEYRLHEKPVPSSIDPSWLQLFPTVWAERAGMGLANQVPPVVVELRSGASPVAVRQYPMSKEAREGIRPHIQRFLDLGVLVPCQSPWNTPLLPVKKPGTNDYRPVQDLREINKRVQDIHPTVPNPYNLLSSLPPSHTWYSVLDLKDAFFCLKLHPNSQPLFAFEWRDPEKGNTGQLTWTRLPQGFKNSPTLFNEALHRDLAPFRALNPQVVLLQYVDDLLVAAPTYRDCKEGTQKLLQELSKLGYRVSAKKAQLCQKEVTYLGYLLKEGKRWLTPARKATVMKIPPPTTPRQVREFLGTAGFCRLWIPGFASLAAPLYPLTKPSIPFIWTEEHQKAFDRIKEALLSAPALALPDLTKPFTLYVDERAGVARGVLTQTLGPWRRPVAYLSKKLDPVASGWPTCLKAVAAVALLLKDADKLTLGQNVTVIASHSLESIVRQPPDRWMTNARMTHYQSLLLNERVSFAPPAVLNPATLLPVESEATPVHRCSEILAEETGTRRDLKDQPLPGVPAWYTDGSSFIAEGKRRAGAAIVDGKRTVWASSLPEGTSAQKAELVALTQALRLAEGKDINIYTDSRYAFATAHIHGAIYKQRGWLTSAGKDIKNKEEILALLEAIHLPKRVAIIHCPGHQKGNDPVATGNRRADEAAKQAALSTRVLAETTKPAGKRTADGSEFEKRTADGSEFESPKKKAKVE

SEQ ID NO: 821 - protein, 2092 aa, synthetic construct
  source 1..2092: note = Description of Artificial Sequence: Synthetic polypeptide
MPAAKRVKLDGGDKKYSIGLDIGTNSVGWAVITDEYKVPSKKFKVLGNTDRHSIKKNLIGALLFDSGETAEATRLKRTARRRYTRRKNRICYLQEIFSNEMAKVDDSFFHRLEESFLVEEDKKHERHPIFGNIVDEVAYHEKYPTIYHLRKKLVDSTDKADLRLIYLALAHMIKFRGHFLIEGDLNPDNSDVDKLFIQLVQTYNQLFEENPINASGVDAKAILSARLSKSRRLENLIAQLPGEKKNGLFGNLIALSLGLTPNFKSNFDLAEDAKLQLSKDTYDDDLDNLLAQIGDQYADLFLAAKNLSDAILLSDILRVNTEITKAPLSASMIKRYDEHHQDLTLLKALVRQQLPEKYKEIFFDQSKNGYAGYIDGGASQEEFYKFIKPILEKMDGTEELLVKLNREDLLRKQRTFDNGSIPHQIHLGELHAILRRQEDFYPFLKDNREKIEKILTFRIPYYVGPLARGNSRFAWMTRKSEETITPWNFEEVVDKGASAQSFIERMTNFDKNLPNEKVLPKHSLLYEYFTVYNELTKVKYVTEGMRKPAFLSGEQKKAIVDLLFKTNRKVTVKQLKEDYFKKIECFDSVEISGVEDRFNASLGTYHDLLKIIKDKDFLDNEENEDILEDIVLTLTLFEDREMIEERLKTYAHLFDDKVMKQLKRRRYTGWGRLSRKLINGIRDKQSGKTILDFLKSDGFANRNFMQLIHDDSLTFKEDIQKAQVSGQGDSLHEHIANLAGSPAIKKGILQTVKVVDELVKVMGRHKPENIVIEMARENQTTQKGQKNSRERMKRIEEGIKELGSQILKEHPVENTQLQNEKLYLYYLQNGRDMYVDQELDINRLSDYDVDHIVPQSFLKDDSIDNKVLTRSDKARGKSDNVPSEEVVKKMKNYWRQLLNAKLITQRKFDNLTKAERGGLSELDKAGFIKRQLVETRQITKHVAQILDSRMNTKYDENDKLIREVKVITLKSKLVSDFRKDFQFYKVREINNYHHAHDAYLNAVVGTALIKKYPKLESEFVYGDYKVYDVRKMIAKSEQEIGKATAKYFFYSNIMNFFKTEITLANGEIRKRPLIETNGETGEIVWDKGRDFATVRKVLSMPQVNIVKKTEVQTGGFSKESILPKRNSDKLIARKKDWDPKKYGGFDSPTVAYSVLVVAKVEKGKSKKLKSVKELLGITIMERSSFEKNPIDFLEAKGYKEVKKDLIIKLPKYSLFELENGRKRMLASAGELQKGNELALPSKYVNFLYLASHYEKLKGSPEDNEQKQLFVEQHKHYLDEIIEQISEFSKRVILADANLDKVLSAYNKHRDKPIREQAENIIHLFTLTNLGAPAAFKYFDTTIDRKRYTSTKEVLDATLIHQSITGLYETRIDLSQLGGDGGPAPAPAPAPGGVLNLEEEYRLHEKPVPSSIDPSWLQLFPTVWAERAGMGLANQVPPVVVELRSGASPVAVRQYPMSKEAREGIRPHIQRFLDLGVLVPCQSPWNTPLLPVKKPGTNDYRPVQDLREINKRVQDIHPTVPNPYNLLSSLPPSHTWYSVLDLKDAFFCLKLHPNSQPLFAFEWRDPEKGNTGQLTWTRLPQGFKNSPTLFNEALHRDLAPFRALNPQVVLLQYVDDLLVAAPTYRDCKEGTQKLLQELSKLGYRVSAKKAQLCQKEVTYLGYLLKEGKRWLTPARKATVMKIPPPTTPRQVREFLGTAGFCRLWIPGFASLAAPLYPLTKPSIPFIWTEEHQKAFDRIKEALLSAPALALPDLTKPFTLYVDERAGVARGVLTQTLGPWRRPVAYLSKKLDPVASGWPTCLKAVAAVALLLKDADKLTLGQNVTVIASHSLESIVRQPPDRWMTNARMTHYQSLLLNERVSFAPPAVLNPATLLPVESEATPVHRCSEILAEETGTRRDLKDQPLPGVPAWYTDGSSFIAEGKRRAGAAIVDGKRTVWASSLPEGTSAQKAELVALTQALRLAEGKDINIYTDSRYAFATAHIHGAIYKQRGWLTSAGKDIKNKEEILALLEAIHLPKRVAIIHCPGHQKGNDPVATGNRRADEAAKQAALSTRVLAETTKPAGKRTADGSEFEKRTADGSEFESPKKKAKVE

SEQ ID NO: 822 - protein, 2094 aa, synthetic construct
  source 1..2094: note = Description of Artificial Sequence: Synthetic polypeptide
MPAAKRVKLDGGDKKYSIGLDIGTNSVGWAVITDEYKVPSKKFKVLGNTDRHSIKKNLIGALLFDSGETAEATRLKRTARRRYTRRKNRICYLQEIFSNEMAKVDDSFFHRLEESFLVEEDKKHERHPIFGNIVDEVAYHEKYPTIYHLRKKLVDSTDKADLRLIYLALAHMIKFRGHFLIEGDLNPDNSDVDKLFIQLVQTYNQLFEENPINASGVDAKAILSARLSKSRRLENLIAQLPGEKKNGLFGNLIALSLGLTPNFKSNFDLAEDAKLQLSKDTYDDDLDNLLAQIGDQYADLFLAAKNLSDAILLSDILRVNTEITKAPLSASMIKRYDEHHQDLTLLKALVRQQLPEKYKEIFFDQSKNGYAGYIDGGASQEEFYKFIKPILEKMDGTEELLVKLNREDLLRKQRTFDNGSIPHQIHLGELHAILRRQEDFYPFLKDNREKIEKILTFRIPYYVGPLARGNSRFAWMTRKSEETITPWNFEEVVDKGASAQSFIERMTNFDKNLPNEKVLPKHSLLYEYFTVYNELTKVKYVTEGMRKPAFLSGEQKKAIVDLLFKTNRKVTVKQLKEDYFKKIECFDSVEISGVEDRFNASLGTYHDLLKIIKDKDFLDNEENEDILEDIVLTLTLFEDREMIEERLKTYAHLFDDKVMKQLKRRRYTGWGRLSRKLINGIRDKQSGKTILDFLKSDGFANRNFMQLIHDDSLTFKEDIQKAQVSGQGDSLHEHIANLAGSPAIKKGILQTVKVVDELVKVMGRHKPENIVIEMARENQTTQKGQKNSRERMKRIEEGIKELGSQILKEHPVENTQLQNEKLYLYYLQNGRDMYVDQELDINRLSDYDVDHIVPQSFLKDDSIDNKVLTRSDKARGKSDNVPSEEVVKKMKNYWRQLLNAKLITQRKFDNLTKAERGGLSELDKAGFIKRQLVETRQITKHVAQILDSRMNTKYDENDKLIREVKVITLKSKLVSDFRKDFQFYKVREINNYHHAHDAYLNAVVGTALIKKYPKLESEFVYGDYKVYDVRKMIAKSEQEIGKATAKYFFYSNIMNFFKTEITLANGEIRKRPLIETNGETGEIVWDKGRDFATVRKVLSMPQVNIVKKTEVQTGGFSKESILPKRNSDKLIARKKDWDPKKYGGFDSPTVAYSVLVVAKVEKGKSKKLKSVKELLGITIMERSSFEKNPIDFLEAKGYKEVKKDLIIKLPKYSLFELENGRKRMLASAGELQKGNELALPSKYVNFLYLASHYEKLKGSPEDNEQKQLFVEQHKHYLDEIIEQISEFSKRVILADANLDKVLSAYNKHRDKPIREQAENIIHLFTLTNLGAPAAFKYFDTTIDRKRYTSTKEVLDATLIHQSITGLYETRIDLSQLGGDGGEAAAKGGGPAPGGVLNLEEEYRLHEKPVPSSIDPSWLQLFPTVWAERAGMGLANQVPPVVVELRSGASPVAVRQYPMSKEAREGIRPHIQRFLDLGVLVPCQSPWNTPLLPVKKPGTNDYRPVQDLREINKRVQDIHPTVPNPYNLLSSLPPSHTWYSVLDLKDAFFCLKLHPNSQPLFAFEWRDPEKGNTGQLTWTRLPQGFKNSPTLFNEALHRDLAPFRALNPQVVLLQYVDDLLVAAPTYRDCKEGTQKLLQELSKLGYRVSAKKAQLCQKEVTYLGYLLKEGKRWLTPARKATVMKIPPPTTPRQVREFLGTAGFCRLWIPGFASLAAPLYPLTKPSIPFIWTEEHQKAFDRIKEALLSAPALALPDLTKPFTLYVDERAGVARGVLTQTLGPWRRPVAYLSKKLDPVASGWPTCLKAVAAVALLLKDADKLTLGQNVTVIASHSLESIVRQPPDRWMTNARMTHYQSLLLNERVSFAPPAVLNPATLLPVESEATPVHRCSEILAEETGTRRDLKDQPLPGVPAWYTDGSSFIAEGKRRAGAAIVDGKRTVWASSLPEGTSAQKAELVALTQALRLAEGKDINIYTDSRYAFATAHIHGAIYKQRGWLTSAGKDIKNKEEILALLEAIHLPKRVAIIHCPGHQKGNDPVATGNRRADEAAKQAALSTRVLAETTKPAGKRTADGSEFEKRTADGSEFESPKKKAKVE

SEQ ID NO: 823 - protein, 2088 aa, synthetic construct
  source 1..2088: note = Description of Artificial Sequence: Synthetic polypeptide
MPAAKRVKLDGGDKKYSIGLDIGTNSVGWAVITDEYKVPSKKFKVLGNTDRHSIKKNLIGALLFDSGETAEATRLKRTARRRYTRRKNRICYLQEIFSNEMAKVDDSFFHRLEESFLVEEDKKHERHPIFGNIVDEVAYHEKYPTIYHLRKKLVDSTDKADLRLIYLALAHMIKFRGHFLIEGDLNPDNSDVDKLFIQLVQTYNQLFEENPINASGVDAKAILSARLSKSRRLENLIAQLPGEKKNGLFGNLIALSLGLTPNFKSNFDLAEDAKLQLSKDTYDDDLDNLLAQIGDQYADLFLAAKNLSDAILLSDILRVNTEITKAPLSASMIKRYDEHHQDLTLLKALVRQQLPEKYKEIFFDQSKNGYAGYIDGGASQEEFYKFIKPILEKMDGTEELLVKLNREDLLRKQRTFDNGSIPHQIHLGELHAILRRQEDFYPFLKDNREKIEKILTFRIPYYVGPLARGNSRFAWMTRKSEETITPWNFEEVVDKGASAQSFIERMTNFDKNLPNEKVLPKHSLLYEYFTVYNELTKVKYVTEGMRKPAFLSGEQKKAIVDLLFKTNRKVTVKQLKEDYFKKIECFDSVEISGVEDRFNASLGTYHDLLKIIKDKDFLDNEENEDILEDIVLTLTLFEDREMIEERLKTYAHLFDDKVMKQLKRRRYTGWGRLSRKLINGIRDKQSGKTILDFLKSDGFANRNFMQLIHDDSLTFKEDIQKAQVSGQGDSLHEHIANLAGSPAIKKGILQTVKVVDELVKVMGRHKPENIVIEMARENQTTQKGQKNSRERMKRIEEGIKELGSQILKEHPVENTQLQNEKLYLYYLQNGRDMYVDQELDINRLSDYDVDHIVPQSFLKDDSIDNKVLTRSDKARGKSDNVPSEEVVKKMKNYWRQLLNAKLITQRKFDNLTKAERGGLSELDKAGFIKRQLVETRQITKHVAQILDSRMNTKYDENDKLIREVKVITLKSKLVSDFRKDFQFYKVREINNYHHAHDAYLNAVVGTALIKKYPKLESEFVYGDYKVYDVRKMIAKSEQEIGKATAKYFFYSNIMNFFKTEITLANGEIRKRPLIETNGETGEIVWDKGRDFATVRKVLSMPQVNIVKKTEVQTGGFSKESILPKRNSDKLIARKKDWDPKKYGGFDSPTVAYSVLVVAKVEKGKSKKLKSVKELLGITIMERSSFEKNPIDFLEAKGYKEVKKDLIIKLPKYSLFELENGRKRMLASAGELQKGNELALPSKYVNFLYLASHYEKLKGSPEDNEQKQLFVEQHKHYLDEIIEQISEFSKRVILADANLDKVLSAYNKHRDKPIREQAENIIHLFTLTNLGAPAAFKYFDTTIDRKRYTSTKEVLDATLIHQSITGLYETRIDLSQLGGDGGEAAAKGGVLNLEEEYRLHEKPVPSSIDPSWLQLFPTVWAERAGMGLANQVPPVVVELRSGASPVAVRQYPMSKEAREGIRPHIQRFLDLGVLVPCQSPWNTPLLPVKKPGTNDYRPVQDLREINKRVQDIHPTVPNPYNLLSSLPPSHTWYSVLDLKDAFFCLKLHPNSQPLFAFEWRDPEKGNTGQLTWTRLPQGFKNSPTLFNEALHRDLAPFRALNPQVVLLQYVDDLLVAAPTYRDCKEGTQKLLQELSKLGYRVSAKKAQLCQKEVTYLGYLLKEGKRWLTPARKATVMKIPPPTTPRQVREFLGTAGFCRLWIPGFASLAAPLYPLTKPSIPFIWTEEHQKAFDRIKEALLSAPALALPDLTKPFTLYVDERAGVARGVLTQTLGPWRRPVAYLSKKLDPVASGWPTCLKAVAAVALLLKDADKLTLGQNVTVIASHSLESIVRQPPDRWMTNARMTHYQSLLLNERVSFAPPAVLNPATLLPVESEATPVHRCSEILAEETGTRRDLKDQPLPGVPAWYTDGSSFIAEGKRRAGAAIVDGKRTVWASSLPEGTSAQKAELVALTQALRLAEGKDINIYTDSRYAFATAHIHGAIYKQRGWLTSAGKDIKNKEEILALLEAIHLPKRVAIIHCPGHQKGNDPVATGNRRADEAAKQAALSTRVLAETTKPAGKRTADGSEFEKRTADGSEFESPKKKAKVE

SEQ ID NO: 824 - protein, 2095 aa, synthetic construct
  source 1..2095: note = Description of Artificial Sequence: Synthetic polypeptide
MPAAKRVKLDGGDKKYSIGLDIGTNSVGWAVITDEYKVPSKKFKVLGNTDRHSIKKNLIGALLFDSGETAEATRLKRTARRRYTRRKNRICYLQEIFSNEMAKVDDSFFHRLEESFLVEEDKKHERHPIFGNIVDEVAYHEKYPTIYHLRKKLVDSTDKADLRLIYLALAHMIKFRGHFLIEGDLNPDNSDVDKLFIQLVQTYNQLFEENPINASGVDAKAILSARLSKSRRLENLIAQLPGEKKNGLFGNLIALSLGLTPNFKSNFDLAEDAKLQLSKDTYDDDLDNLLAQIGDQYADLFLAAKNLSDAILLSDILRVNTEITKAPLSASMIKRYDEHHQDLTLLKALVRQQLPEKYKEIFFDQSKNGYAGYIDGGASQEEFYKFIKPILEKMDGTEELLVKLNREDLLRKQRTFDNGSIPHQIHLGELHAILRRQEDFYPFLKDNREKIEKILTFRIPYYVGPLARGNSRFAWMTRKSEETITPWNFEEVVDKGASAQSFIERMTNFDKNLPNEKVLPKHSLLYEYFTVYNELTKVKYVTEGMRKPAFLSGEQKKAIVDLLFKTNRKVTVKQLKEDYFKKIECFDSVEISGVEDRFNASLGTYHDLLKIIKDKDFLDNEENEDILEDIVLTLTLFEDREMIEERLKTYAHLFDDKVMKQLKRRRYTGWGRLSRKLINGIRDKQSGKTILDFLKSDGFANRNFMQLIHDDSLTFKEDIQKAQVSGQGDSLHEHIANLAGSPAIKKGILQTVKVVDELVKVMGRHKPENIVIEMARENQTTQKGQKNSRERMKRIEEGIKELGSQILKEHPVENTQLQNEKLYLYYLQNGRDMYVDQELDINRLSDYDVDHIVPQSFLKDDSIDNKVLTRSDKARGKSDNVPSEEVVKKMKNYWRQLLNAKLITQRKFDNLTKAERGGLSELDKAGFIKRQLVETRQITKHVAQILDSRMNTKYDENDKLIREVKVITLKSKLVSDFRKDFQFYKVREINNYHHAHDAYLNAVVGTALIKKYPKLESEFVYGDYKVYDVRKMIAKSEQEIGKATAKYFFYSNIMNFFKTEITLANGEIRKRPLIETNGETGEIVWDKGRDFATVRKVLSMPQVNIVKKTEVQTGGFSKESILPKRNSDKLIARKKDWDPKKYGGFDSPTVAYSVLVVAKVEKGKSKKLKSVKELLGITIMERSSFEKNPIDFLEAKGYKEVKKDLIIKLPKYSLFELENGRKRMLASAGELQKGNELALPSKYVNFLYLASHYEKLKGSPEDNEQKQLFVEQHKHYLDEIIEQISEFSKRVILADANLDKVLSAYNKHRDKPIREQAENIIHLFTLTNLGAPAAFKYFDTTIDRKRYTSTKEVLDATLIHQSITGLYETRIDLSQLGGDGGGGSGGSGGSGGSGGVLNLEEEYRLHEKPVPSSIDPSWLQLFPTVWAERAGMGLANQVPPVVVELRSGASPVAVRQYPMSKEAREGIRPHIQRFLDLGVLVPCQSPWNTPLLPVKKPGTNDYRPVQDLREINKRVQDIHPTVPNPYNLLSSLPPSHTWYSVLDLKDAFFCLKLHPNSQPLFAFEWRDPEKGNTGQLTWTRLPQGFKNSPTLFNEALHRDLAPFRALNPQVVLLQYVDDLLVAAPTYRDCKEGTQKLLQELSKLGYRVSAKKAQLCQKEVTYLGYLLKEGKRWLTPARKATVMKIPPPTTPRQVREFLGTAGFCRLWIPGFASLAAPLYPLTKPSIPFIWTEEHQKAFDRIKEALLSAPALALPDLTKPFTLYVDERAGVARGVLTQTLGPWRRPVAYLSKKLDPVASGWPTCLKAVAAVALLLKDADKLTLGQNVTVIASHSLESIVRQPPDRWMTNARMTHYQSLLLNERVSFAPPAVLNPATLLPVESEATPVHRCSEILAEETGTRRDLKDQPLPGVPAWYTDGSSFIAEGKRRAGAAIVDGKRTVWASSLPEGTSAQKAELVALTQALRLAEGKDINIYTDSRYAFATAHIHGAIYKQRGWLTSAGKDIKNKEEILALLEAIHLPKRVAIIHCPGHQKGNDPVATGNRRADEAAKQAALSTRVLAETTKPAGKRTADGSEFEKRTADGSEFESPKKKAKVE

SEQ ID NO: 825 - protein, 2094 aa, synthetic construct
  source 1..2094: note = Description of Artificial Sequence: Synthetic polypeptide
MPAAKRVKLDGGDKKYSIGLDIGTNSVGWAVITDEYKVPSKKFKVLGNTDRHSIKKNLIGALLFDSGETAEATRLKRTARRRYTRRKNRICYLQEIFSNEMAKVDDSFFHRLEESFLVEEDKKHERHPIFGNIVDEVAYHEKYPTIYHLRKKLVDSTDKADLRLIYLALAHMIKFRGHFLIEGDLNPDNSDVDKLFIQLVQTYNQLFEENPINASGVDAKAILSARLSKSRRLENLIAQLPGEKKNGLFGNLIALSLGLTPNFKSNFDLAEDAKLQLSKDTYDDDLDNLLAQIGDQYADLFLAAKNLSDAILLSDILRVNTEITKAPLSASMIKRYDEHHQDLTLLKALVRQQLPEKYKEIFFDQSKNGYAGYIDGGASQEEFYKFIKPILEKMDGTEELLVKLNREDLLRKQRTFDNGSIPHQIHLGELHAILRRQEDFYPFLKDNREKIEKILTFRIPYYVGPLARGNSRFAWMTRKSEETITPWNFEEVVDKGASAQSFIERMTNFDKNLPNEKVLPKHSLLYEYFTVYNELTKVKYVTEGMRKPAFLSGEQKKAIVDLLFKTNRKVTVKQLKEDYFKKIECFDSVEISGVEDRFNASLGTYHDLLKIIKDKDFLDNEENEDILEDIVLTLTLFEDREMIEERLKTYAHLFDDKVMKQLKRRRYTGWGRLSRKLINGIRDKQSGKTILDFLKSDGFANRNFMQLIHDDSLTFKEDIQKAQVSGQGDSLHEHIANLAGSPAIKKGILQTVKVVDELVKVMGRHKPENIVIEMARENQTTQKGQKNSRERMKRIEEGIKELGSQILKEHPVENTQLQNEKLYLYYLQNGRDMYVDQELDINRLSDYDVDHIVPQSFLKDDSIDNKVLTRSDKARGKSDNVPSEEVVKKMKNYWRQLLNAKLITQRKFDNLTKAERGGLSELDKAGFIKRQLVETRQITKHVAQILDSRMNTKYDENDKLIREVKVITLKSKLVSDFRKDFQFYKVREINNYHHAHDAYLNAVVGTALIKKYPKLESEFVYGDYKVYDVRKMIAKSEQEIGKATAKYFFYSNIMNFFKTEITLANGEIRKRPLIETNGETGEIVWDKGRDFATVRKVLSMPQVNIVKKTEVQTGGFSKESILPKRNSDKLIARKKDWDPKKYGGFDSPTVAYSVLVVAKVEKGKSKKLKSVKELLGITIMERSSFEKNPIDFLEAKGYKEVKKDLIIKLPKYSLFELENGRKRMLASAGELQKGNELALPSKYVNFLYLASHYEKLKGSPEDNEQKQLFVEQHKHYLDEIIEQISEFSKRVILADANLDKVLSAYNKHRDKPIREQAENIIHLFTLTNLGAPAAFKYFDTTIDRKRYTSTKEVLDATLIHQSITGLYETRIDLSQLGGDGGGGSGSSEAAAKGGVLNLEEEYRLHEKPVPSSIDPSWLQLFPTVWAERAGMGLANQVPPVVVELRSGASPVAVRQYPMSKEAREGIRPHIQRFLDLGVLVPCQSPWNTPLLPVKKPGTNDYRPVQDLREINKRVQDIHPTVPNPYNLLSSLPPSHTWYSVLDLKDAFFCLKLHPNSQPLFAFEWRDPEKGNTGQLTWTRLPQGFKNSPTLFNEALHRDLAPFRALNPQVVLLQYVDDLLVAAPTYRDCKEGTQKLLQELSKLGYRVSAKKAQLCQKEVTYLGYLLKEGKRWLTPARKATVMKIPPPTTPRQVREFLGTAGFCRLWIPGFASLAAPLYPLTKPSIPFIWTEEHQKAFDRIKEALLSAPALALPDLTKPFTLYVDERAGVARGVLTQTLGPWRRPVAYLSKKLDPVASGWPTCLKAVAAVALLLKDADKLTLGQNVTVIASHSLESIVRQPPDRWMTNARMTHYQSLLLNERVSFAPPAVLNPATLLPVESEATPVHRCSEILAEETGTRRDLKDQPLPGVPAWYTDGSSFIAEGKRRAGAAIVDGKRTVWASSLPEGTSAQKAELVALTQALRLAEGKDINIYTDSRYAFATAHIHGAIYKQRGWLTSAGKDIKNKEEILALLEAIHLPKRVAIIHCPGHQKGNDPVATGNRRADEAAKQAALSTRVLAETTKPAGKRTADGSEFEKRTADGSEFESPKKKAKVE

SEQ ID NO: 826 - protein, 2094 aa, synthetic construct
  source 1..2094: note = Description of Artificial Sequence: Synthetic polypeptide
MPAAKRVKLDGGDKKYSIGLDIGTNSVGWAVITDEYKVPSKKFKVLGNTDRHSIKKNLIGALLFDSGETAEATRLKRTARRRYTRRKNRICYLQEIFSNEMAKVDDSFFHRLEESFLVEEDKKHERHPIFGNIVDEVAYHEKYPTIYHLRKKLVDSTDKADLRLIYLALAHMIKFRGHFLIEGDLNPDNSDVDKLFIQLVQTYNQLFEENPINASGVDAKAILSARLSKSRRLENLIAQLPGEKKNGLFGNLIALSLGLTPNFKSNFDLAEDAKLQLSKDTYDDDLDNLLAQIGDQYADLFLAAKNLSDAILLSDILRVNTEITKAPLSASMIKRYDEHHQDLTLLKALVRQQLPEKYKEIFFDQSKNGYAGYIDGGASQEEFYKFIKPILEKMDGTEELLVKLNREDLLRKQRTFDNGSIPHQIHLGELHAILRRQEDFYPFLKDNREKIEKILTFRIPYYVGPLARGNSRFAWMTRKSEETITPWNFEEVVDKGASAQSFIERMTNFDKNLPNEKVLPKHSLLYEYFTVYNELTKVKYVTEGMRKPAFLSGEQKKAIVDLLFKTNRKVTVKQLKEDYFKKIECFDSVEISGVEDRFNASLGTYHDLLKIIKDKDFLDNEENEDILEDIVLTLTLFEDREMIEERLKTYAHLFDDKVMKQLKRRRYTGWGRLSRKLINGIRDKQSGKTILDFLKSDGFANRNFMQLIHDDSLTFKEDIQKAQVSGQGDSLHEHIANLAGSPAIKKGILQTVKVVDELVKVMGRHKPENIVIEMARENQTTQKGQKNSRERMKRIEEGIKELGSQILKEHPVENTQLQNEKLYLYYLQNGRDMYVDQELDINRLSDYDVDHIVPQSFLKDDSIDNKVLTRSDKARGKSDNVPSEEVVKKMKNYWRQLLNAKLITQRKFDNLTKAERGGLSELDKAGFIKRQLVETRQITKHVAQILDSRMNTKYDENDKLIREVKVITLKSKLVSDFRKDFQFYKVREINNYHHAHDAYLNAVVGTALIKKYPKLESEFVYGDYKVYDVRKMIAKSEQEIGKATAKYFFYSNIMNFFKTEITLANGEIRKRPLIETNGETGEIVWDKGRDFATVRKVLSMPQVNIVKKTEVQTGGFSKESILPKRNSDKLIARKKDWDPKKYGGFDSPTVAYSVLVVAKVEKGKSKKLKSVKELLGITIMERSSFEKNPIDFLEAKGYKEVKKDLIIKLPKYSLFELENGRKRMLASAGELQKGNELALPSKYVNFLYLASHYEKLKGSPEDNEQKQLFVEQHKHYLDEIIEQISEFSKRVILADANLDKVLSAYNKHRDKPIREQAENIIHLFTLTNLGAPAAFKYFDTTIDRKRYTSTKEVLDATLIHQSITGLYETRIDLSQLGGDGGEAAAKGGGGSSGGVLNLEEEYRLHEKPVPSSIDPSWLQLFPTVWAERAGMGLANQVPPVVVELRSGASPVAVRQYPMSKEAREGIRPHIQRFLDLGVLVPCQSPWNTPLLPVKKPGTNDYRPVQDLREINKRVQDIHPTVPNPYNLLSSLPPSHTWYSVLDLKDAFFCLKLHPNSQPLFAFEWRDPEKGNTGQLTWTRLPQGFKNSPTLFNEALHRDLAPFRALNPQVVLLQYVDDLLVAAPTYRDCKEGTQKLLQELSKLGYRVSAKKAQLCQKEVTYLGYLLKEGKRWLTPARKATVMKIPPPTTPRQVREFLGTAGFCRLWIPGFASLAAPLYPLTKPSIPFIWTEEHQKAFDRIKEALLSAPALALPDLTKPFTLYVDERAGVARGVLTQTLGPWRRPVAYLSKKLDPVASGWPTCLKAVAAVALLLKDADKLTLGQNVTVIASHSLESIVRQPPDRWMTNARMTHYQSLLLNERVSFAPPAVLNPATLLPVESEATPVHRCSEILAEETGTRRDLKDQPLPGVPAWYTDGSSFIAEGKRRAGAAIVDGKRTVWASSLPEGTSAQKAELVALTQALRLAEGKDINIYTDSRYAFATAHIHGAIYKQRGWLTSAGKDIKNKEEILALLEAIHLPKRVAIIHCPGHQKGNDPVATGNRRADEAAKQAALSTRVLAETTKPAGKRTADGSEFEKRTADGSEFESPKKKAKVE

SEQ ID NO: 827 - protein, 2103 aa, synthetic construct
  source 1..2103: note = Description of Artificial Sequence: Synthetic polypeptide
MPAAKRVKLDGGDKKYSIGLDIGTNSVGWAVITDEYKVPSKKFKVLGNTDRHSIKKNLIGALLFDSGETAEATRLKRTARRRYTRRKNRICYLQEIFSNEMAKVDDSFFHRLEESFLVEEDKKHERHPIFGNIVDEVAYHEKYPTIYHLRKKLVDSTDKADLRLIYLALAHMIKFRGHFLIEGDLNPDNSDVDKLFIQLVQTYNQLFEENPINASGVDAKAILSARLSKSRRLENLIAQLPGEKKNGLFGNLIALSLGLTPNFKSNFDLAEDAKLQLSKDTYDDDLDNLLAQIGDQYADLFLAAKNLSDAILLSDILRVNTEITKAPLSASMIKRYDEHHQDLTLLKALVRQQLPEKYKEIFFDQSKNGYAGYIDGGASQEEFYKFIKPILEKMDGTEELLVKLNREDLLRKQRTFDNGSIPHQIHLGELHAILRRQEDFYPFLKDNREKIEKILTFRIPYYVGPLARGNSRFAWMTRKSEETITPWNFEEVVDKGASAQSFIERMTNFDKNLPNEKVLPKHSLLYEYFTVYNELTKVKYVTEGMRKPAFLSGEQKKAIVDLLFKTNRKVTVKQLKEDYFKKIECFDSVEISGVEDRFNASLGTYHDLLKIIKDKDFLDNEENEDILEDIVLTLTLFEDREMIEERLKTYAHLFDDKVMKQLKRRRYTGWGRLSRKLINGIRDKQSGKTILDFLKSDGFANRNFMQLIHDDSLTFKEDIQKAQVSGQGDSLHEHIANLAGSPAIKKGILQTVKVVDELVKVMGRHKPENIVIEMARENQTTQKGQKNSRERMKRIEEGIKELGSQILKEHPVENTQLQNEKLYLYYLQNGRDMYVDQELDINRLSDYDVDHIVPQSFLKDDSIDNKVLTRSDKARGKSDNVPSEEVVKKMKNYWRQLLNAKLITQRKFDNLTKAERGGLSELDKAGFIKRQLVETRQITKHVAQILDSRMNTKYDENDKLIREVKVITLKSKLVSDFRKDFQFYKVREINNYHHAHDAYLNAVVGTALIKKYPKLESEFVYGDYKVYDVRKMIAKSEQEIGKATAKYFFYSNIMNFFKTEITLANGEIRKRPLIETNGETGEIVWDKGRDFATVRKVLSMPQVNIVKKTEVQTGGFSKESILPKRNSDKLIARKKDWDPKKYGGFDSPTVAYSVLVVAKVEKGKSKKLKSVKELLGITIMERSSFEKNPIDFLEAKGYKEVKKDLIIKLPKYSLFELENGRKRMLASAGELQKGNELALPSKYVNFLYLASHYEKLKGSPEDNEQKQLFVEQHKHYLDEIIEQISEFSKRVILADANLDKVLSAYNKHRDKPIREQAENIIHLFTLTNLGAPAAFKYFDTTIDRKRYTSTKEVLDATLIHQSITGLYETRIDLSQLGGDGGEAAAKEAAAKEAAAKEAAAKGGVLNLEEEYRLHEKPVPSSIDPSWLQLFPTVWAERAGMGLANQVPPVVVELRSGASPVAVRQYPMSKEAREGIRPHIQRFLDLGVLVPCQSPWNTPLLPVKKPGTNDYRPVQDLREINKRVQDIHPTVPNPYNLLSSLPPSHTWYSVLDLKDAFFCLKLHPNSQPLFAFEWRDPEKGNTGQLTWTRLPQGFKNSPTLFNEALHRDLAPFRALNPQVVLLQYVDDLLVAAPTYRDCKEGTQKLLQELSKLGYRVSAKKAQLCQKEVTYLGYLLKEGKRWLTPARKATVMKIPPPTTPRQVREFLGTAGFCRLWIPGFASLAAPLYPLTKPSIPFIWTEEHQKAFDRIKEALLSAPALALPDLTKPFTLYVDERAGVARGVLTQTLGPWRRPVAYLSKKLDPVASGWPTCLKAVAAVALLLKDADKLTLGQNVTVIASHSLESIVRQPPDRWMTNARMTHYQSLLLNERVSFAPPAVLNPATLLPVESEATPVHRCSEILAEETGTRRDLKDQPLPGVPAWYTDGSSFIAEGKRRAGAAIVDGKRTVWASSLPEGTSAQKAELVALTQALRLAEGKDINIYTDSRYAFATAHIHGAIYKQRGWLTSAGKDIKNKEEILALLEAIHLPKRVAIIHCPGHQKGNDPVATGNRRADEAAKQAALSTRVLAETTKPAGKRTADGSEFEKRTADGSEFESPKKKAKVE

SEQ ID NO: 828 - protein, 2092 aa, synthetic construct
  source 1..2092: note = Description of Artificial Sequence: Synthetic polypeptide
MPAAKRVKLDGGDKKYSIGLDIGTNSVGWAVITDEYKVPSKKFKVLGNTDRHSIKKNLIGALLFDSGETAEATRLKRTARRRYTRRKNRICYLQEIFSNEMAKVDDSFFHRLEESFLVEEDKKHERHPIFGNIVDEVAYHEKYPTIYHLRKKLVDSTDKADLRLIYLALAHMIKFRGHFLIEGDLNPDNSDVDKLFIQLVQTYNQLFEENPINASGVDAKAILSARLSKSRRLENLIAQLPGEKKNGLFGNLIALSLGLTPNFKSNFDLAEDAKLQLSKDTYDDDLDNLLAQIGDQYADLFLAAKNLSDAILLSDILRVNTEITKAPLSASMIKRYDEHHQDLTLLKALVRQQLPEKYKEIFFDQSKNGYAGYIDGGASQEEFYKFIKPILEKMDGTEELLVKLNREDLLRKQRTFDNGSIPHQIHLGELHAILRRQEDFYPFLKDNREKIEKILTFRIPYYVGPLARGNSRFAWMTRKSEETITPWNFEEVVDKGASAQSFIERMTNFDKNLPNEKVLPKHSLLYEYFTVYNELTKVKYVTEGMRKPAFLSGEQKKAIVDLLFKTNRKVTVKQLKEDYFKKIECFDSVEISGVEDRFNASLGTYHDLLKIIKDKDFLDNEENEDILEDIVLTLTLFEDREMIEERLKTYAHLFDDKVMKQLKRRRYTGWGRLSRKLINGIRDKQSGKTILDFLKSDGFANRNFMQLIHDDSLTFKEDIQKAQVSGQGDSLHEHIANLAGSPAIKKGILQTVKVVDELVKVMGRHKPENIVIEMARENQTTQKGQKNSRERMKRIEEGIKELGSQILKEHPVENTQLQNEKLYLYYLQNGRDMYVDQELDINRLSDYDVDHIVPQSFLKDDSIDNKVLTRSDKARGKSDNVPSEEVVKKMKNYWRQLLNAKLITQRKFDNLTKAERGGLSELDKAGFIKRQLVETRQITKHVAQILDSRMNTKYDENDKLIREVKVITLKSKLVSDFRKDFQFYKVREINNYHHAHDAYLNAVVGTALIKKYPKLESEFVYGDYKVYDVRKMIAKSEQEIGKATAKYFFYSNIMNFFKTEITLANGEIRKRPLIETNGETGEIVWDKGRDFATVRKVLSMPQVNIVKKTEVQTGGFSKESILPKRNSDKLIARKKDWDPKKYGGFDSPTVAYSVLVVAKVEKGKSKKLKSVKELLGITIMERSSFEKNPIDFLEAKGYKEVKKDLIIKLPKYSLFELENGRKRMLASAGELQKGNELALPSKYVNFLYLASHYEKLKGSPEDNEQKQLFVEQHKHYLDEIIEQISEFSKRVILADANLDKVLSAYNKHRDKPIREQAENIIHLFTLTNLGAPAAFKYFDTTIDRKRYTSTKEVLDATLIHQSITGLYETRIDLSQLGGDGGGGSGGGGSSGGVLNLEEEYRLHEKPVPSSIDPSWLQLFPTVWAERAGMGLANQVPPVVVELRSGASPVAVRQYPMSKEAREGIRPHIQRFLDLGVLVPCQSPWNTPLLPVKKPGTNDYRPVQDLREINKRVQDIHPTVPNPYNLLSSLPPSHTWYSVLDLKDAFFCLKLHPNSQPLFAFEWRDPEKGNTGQLTWTRLPQGFKNSPTLFNEALHRDLAPFRALNPQVVLLQYVDDLLVAAPTYRDCKEGTQKLLQELSKLGYRVSAKKAQLCQKEVTYLGYLLKEGKRWLTPARKATVMKIPPPTTPRQVREFLGTAGFCRLWIPGFASLAAPLYPLTKPSIPFIWTEEHQKAFDRIKEALLSAPALALPDLTKPFTLYVDERAGVARGVLTQTLGPWRRPVAYLSKKLDPVASGWPTCLKAVAAVALLLKDADKLTLGQNVTVIASHSLESIVRQPPDRWMTNARMTHYQSLLLNERVSFAPPAVLNPATLLPVESEATPVHRCSEILAEETGTRRDLKDQPLPGVPAWYTDGSSFIAEGKRRAGAAIVDGKRTVWASSLPEGTSAQKAELVALTQALRLAEGKDINIYTDSRYAFATAHIHGAIYKQRGWLTSAGKDIKNKEEILALLEAIHLPKRVAIIHCPGHQKGNDPVATGNRRADEAAKQAALSTRVLAETTKPAGKRTADGSEFEKRTADGSEFESPKKKAKVE

SEQ ID NO: 829 - protein, 2094 aa, synthetic construct
  source 1..2094: note = Description of Artificial Sequence: Synthetic polypeptide
MPAAKRVKLDGGDKKYSIGLDIGTNSVGWAVITDEYKVPSKKFKVLGNTDRHSIKKNLIGALLFDSGETAEATRLKRTARRRYTRRKNRICYLQEIFSNEMAKVDDSFFHRLEESFLVEEDKKHERHPIFGNIVDEVAYHEKYPTIYHLRKKLVDSTDKADLRLIYLALAHMIKFRGHFLIEGDLNPDNSDVDKLFIQLVQTYNQLFEENPINASGVDAKAILSARLSKSRRLENLIAQLPGEKKNGLFGNLIALSLGLTPNFKSNFDLAEDAKLQLSKDTYDDDLDNLLAQIGDQYADLFLAAKNLSDAILLSDILRVNTEITKAPLSASMIKRYDEHHQDLTLLKALVRQQLPEKYKEIFFDQSKNGYAGYIDGGASQEEFYKFIKPILEKMDGTEELLVKLNREDLLRKQRTFDNGSIPHQIHLGELHAILRRQEDFYPFLKDNREKIEKILTFRIPYYVGPLARGNSRFAWMTRKSEETITPWNFEEVVDKGASAQSFIERMTNFDKNLPNEKVLPKHSLLYEYFTVYNELTKVKYVTEGMRKPAFLSGEQKKAIVDLLFKTNRKVTVKQLKEDYFKKIECFDSVEISGVEDRFNASLGTYHDLLKIIKDKDFLDNEENEDILEDIVLTLTLFEDREMIEERLKTYAHLFDDKVMKQLKRRRYTGWGRLSRKLINGIRDKQSGKTILDFLKSDGFANRNFMQLIHDDSLTFKEDIQKAQVSGQGDSLHEHIANLAGSPAIKKGILQTVKVVDELVKVMGRHKPENIVIEMARENQTTQKGQKNSRERMKRIEEGIKELGSQILKEHPVENTQLQNEKLYLYYLQNGRDMYVDQELDINRLSDYDVDHIVPQSFLKDDSIDNKVLTRSDKARGKSDNVPSEEVVKKMKNYWRQLLNAKLITQRKFDNLTKAERGGLSELDKAGFIKRQLVETRQITKHVAQILDSRMNTKYDENDKLIREVKVITLKSKLVSDFRKDFQFYKVREINNYHHAHDAYLNAVVGTALIKKYPKLESEFVYGDYKVYDVRKMIAKSEQEIGKATAKYFFYSNIMNFFKTEITLANGEIRKRPLIETNGETGEIVWDKGRDFATVRKVLSMPQVNIVKKTEVQTGGFSKESILPKRNSDKLIARKKDWDPKKYGGFDSPTVAYSVLVVAKVEKGKSKKLKSVKELLGITIMERSSFEKNPIDFLEAKGYKEVKKDLIIKLPKYSLFELENGRKRMLASAGELQKGNELALPSKYVNFLYLASHYEKLKGSPEDNEQKQLFVEQHKHYLDEIIEQISEFSKRVILADANLDKVLSAYNKHRDKPIREQAENIIHLFTLTNLGAPAAFKYFDTTIDRKRYTSTKEVLDATLIHQSITGLYETRIDLSQLGGDGGEAAAKGGSPAPGGVLNLEEEYRLHEKPVPSSIDPSWLQLFPTVWAERAGMGLANQVPPVVVELRSGASPVAVRQYPMSKEAREGIRPHIQRFLDLGVLVPCQSPWNTPLLPVKKPGTNDYRPVQDLREINKRVQDIHPTVPNPYNLLSSLPPSHTWYSVLDLKDAFFCLKLHPNSQPLFAFEWRDPEKGNTGQLTWTRLPQGFKNSPTLFNEALHRDLAPFRALNPQVVLLQYVDDLLVAAPTYRDCKEGTQKLLQELSKLGYRVSAKKAQLCQKEVTYLGYLLKEGKRWLTPARKATVMKIPPPTTPRQVREFLGTAGFCRLWIPGFASLAAPLYPLTKPSIPFIWTEEHQKAFDRIKEALLSAPALALPDLTKPFTLYVDERAGVARGVLTQTLGPWRRPVAYLSKKLDPVASGWPTCLKAVAAVALLLKDADKLTLGQNVTVIASHSLESIVRQPPDRWMTNARMTHYQSLLLNERVSFAPPAVLNPATLLPVESEATPVHRCSEILAEETGTRRDLKDQPLPGVPAWYTDGSSFIAEGKRRAGAAIVDGKRTVWASSLPEGTSAQKAELVALTQALRLAEGKDINIYTDSRYAFATAHIHGAIYKQRGWLTSAGKDIKNKEEILALLEAIHLPKRVAIIHCPGHQKGNDPVATGNRRADEAAKQAALSTRVLAETTKPAGKRTADGSEFEKRTADGSEFESPKKKAKVE

SEQ ID NO: 830 - protein, 2094 aa, synthetic construct
  source 1..2094: note = Description of Artificial Sequence: Synthetic polypeptide
MPAAKRVKLDGGDKKYSIGLDIGTNSVGWAVITDEYKVPSKKFKVLGNTDRHSIKKNLIGALLFDSGETAEATRLKRTARRRYTRRKNRICYLQEIFSNEMAKVDDSFFHRLEESFLVEEDKKHERHPIFGNIVDEVAYHEKYPTIYHLRKKLVDSTDKADLRLIYLALAHMIKFRGHFLIEGDLNPDNSDVDKLFIQLVQTYNQLFEENPINASGVDAKAILSARLSKSRRLENLIAQLPGEKKNGLFGNLIALSLGLTPNFKSNFDLAEDAKLQLSKDTYDDDLDNLLAQIGDQYADLFLAAKNLSDAILLSDILRVNTEITKAPLSASMIKRYDEHHQDLTLLKALVRQQLPEKYKEIFFDQSKNGYAGYIDGGASQEEFYKFIKPILEKMDGTEELLVKLNREDLLRKQRTFDNGSIPHQIHLGELHAILRRQEDFYPFLKDNREKIEKILTFRIPYYVGPLARGNSRFAWMTRKSEETITPWNFEEVVDKGASAQSFIERMTNFDKNLPNEKVLPKHSLLYEYFTVYNELTKVKYVTEGMRKPAFLSGEQKKAIVDLLFKTNRKVTVKQLKEDYFKKIECFDSVEISGVEDRFNASLGTYHDLLKIIKDKDFLDNEENEDILEDIVLTLTLFEDREMIEERLKTYAHLFDDKVMKQLKRRRYTGWGRLSRKLINGIRDKQSGKTILDFLKSDGFANRNFMQLIHDDSLTFKEDIQKAQVSGQGDSLHEHIANLAGSPAIKKGILQTVKVVDELVKVMGRHKPENIVIEMARENQTTQKGQKNSRERMKRIEEGIKELGSQILKEHPVENTQLQNEKLYLYYLQNGRDMYVDQELDINRLSDYDVDHIVPQSFLKDDSIDNKVLTRSDKARGKSDNVPSEEVVKKMKNYWRQLLNAKLITQRKFDNLTKAERGGLSELDKAGFIKRQLVETRQITKHVAQILDSRMNTKYDENDKLIREVKVITLKSKLVSDFRKDFQFYKVREINNYHHAHDAYLNAVVGTALIKKYPKLESEFVYGDYKVYDVRKMIAKSEQEIGKATAKYFFYSNIMNFFKTEITLANGEIRKRPLIETNGETGEIVWDKGRDFATVRKVLSMPQVNIVKKTEVQTGGFSKESILPKRNSDKLIARKKDWDPKKYGGFDSPTVAYSVLVVAKVEKGKSKKLKSVKELLGITIMERSSFEKNPIDFLEAKGYKEVKKDLIIKLPKYSLFELENGRKRMLASAGELQKGNELALPSKYVNFLYLASHYEKLKGSPEDNEQKQLFVEQHKHYLDEIIEQISEFSKRVILADANLDKVLSAYNKHRDKPIREQAENIIHLFTLTNLGAPAAFKYFDTTIDRKRYTSTKEVLDATLIHQSITGLYETRIDLSQLGGDGGEAAAKGGGGGSGGVLNLEEEYRLHEKPVPSSIDPSWLQLFPTVWAERAGMGLANQVPPVVVELRSGASPVAVRQYPMSKEAREGIRPHIQRFLDLGVLVPCQSPWNTPLLPVKKPGTNDYRPVQDLREINKRVQDIHPTVPNPYNLLSSLPPSHTWYSVLDLKDAFFCLKLHPNSQPLFAFEWRDPEKGNTGQLTWTRLPQGFKNSPTLFNEALHRDLAPFRALNPQVVLLQYVDDLLVAAPTYRDCKEGTQKLLQELSKLGYRVSAKKAQLCQKEVTYLGYLLKEGKRWLTPARKATVMKIPPPTTPRQVREFLGTAGFCRLWIPGFASLAAPLYPLTKPSIPFIWTEEHQKAFDRIKEALLSAPALALPDLTKPFTLYVDERAGVARGVLTQTLGPWRRPVAYLSKKLDPVASGWPTCLKAVAAVALLLKDADKLTLGQNVTVIASHSLESIVRQPPDRWMTNARMTHYQSLLLNERVSFAPPAVLNPATLLPVESEATPVHRCSEILAEETGTRRDLKDQPLPGVPAWYTDGSSFIAEGKRRAGAAIVDGKRTVWASSLPEGTSAQKAELVALTQALRLAEGKDINIYTDSRYAFATAHIHGAIYKQRGWLTSAGKDIKNKEEILALLEAIHLPKRVAIIHCPGHQKGNDPVATGNRRADEAAKQAALSTRVLAETTKPAGKRTADGSEFEKRTADGSEFESPKKKAKVE

SEQ ID NO: 831 - protein, 2094 aa, synthetic construct
  source 1..2094: note = Description of Artificial Sequence: Synthetic polypeptide
MPAAKRVKLDGGDKKYSIGLDIGTNSVGWAVITDEYKVPSKKFKVLGNTDRHSIKKNLIGALLFDSGETAEATRLKRTARRRYTRRKNRICYLQEIFSNEMAKVDDSFFHRLEESFLVEEDKKHERHPIFGNIVDEVAYHEKYPTIYHLRKKLVDSTDKADLRLIYLALAHMIKFRGHFLIEGDLNPDNSDVDKLFIQLVQTYNQLFEENPINASGVDAKAILSARLSKSRRLENLIAQLPGEKKNGLFGNLIALSLGLTPNFKSNFDLAEDAKLQLSKDTYDDDLDNLLAQIGDQYADLFLAAKNLSDAILLSDILRVNTEITKAPLSASMIKRYDEHHQDLTLLKALVRQQLPEKYKEIFFDQSKNGYAGYIDGGASQEEFYKFIKPILEKMDGTEELLVKLNREDLLRKQRTFDNGSIPHQIHLGELHAILRRQEDFYPFLKDNREKIEKILTFRIPYYVGPLARGNSRFAWMTRKSEETITPWNFEEVVDKGASAQSFIERMTNFDKNLPNEKVLPKHSLLYEYFTVYNELTKVKYVTEGMRKPAFLSGEQKKAIVDLLFKTNRKVTVKQLKEDYFKKIECFDSVEISGVEDRFNASLGTYHDLLKIIKDKDFLDNEENEDILEDIVLTLTLFEDREMIEERLKTYAHLFDDKVMKQLKRRRYTGWGRLSRKLINGIRDKQSGKTILDFLKSDGFANRNFMQLIHDDSLTFKEDIQKAQVSGQGDSLHEHIANLAGSPAIKKGILQTVKVVDELVKVMGRHKPENIVIEMARENQTTQKGQKNSRERMKRIEEGIKELGSQILKEHPVENTQLQNEKLYLYYLQNGRDMYVDQELDINRLSDYDVDHIVPQSFLKDDSIDNKVLTRSDKARGKSDNVPSEEVVKKMKNYWRQLLNAKLITQRKFDNLTKAERGGLSELDKAGFIKRQLVETRQITKHVAQILDSRMNTKYDENDKLIREVKVITLKSKLVSDFRKDFQFYKVREINNYHHAHDAYLNAVVGTALIKKYPKLESEFVYGDYKVYDVRKMIAKSEQEIGKATAKYFFYSNIMNFFKTEITLANGEIRKRPLIETNGETGEIVWDKGRDFATVRKVLSMPQVNIVKKTEVQTGGFSKESILPKRNSDKLIARKKDWDPKKYGGFDSPTVAYSVLVVAKVEKGKSKKLKSVKELLGITIMERSSFEKNPIDFLEAKGYKEVKKDLIIKLPKYSLFELENGRKRMLASAGELQKGNELALPSKYVNFLYLASHYEKLKGSPEDNEQKQLFVEQHKHYLDEIIEQISEFSKRVILADANLDKVLSAYNKHRDKPIREQAENIIHLFTLTNLGAPAAFKYFDTTIDRKRYTSTKEVLDATLIHQSITGLYETRIDLSQLGGDGGPAPGSSEAAAKGGVLNLEEEYRLHEKPVPSSIDPSWLQLFPTVWAERAGMGLANQVPPVVVELRSGASPVAVRQYPMSKEAREGIRPHIQRFLDLGVLVPCQSPWNTPLLPVKKPGTNDYRPVQDLREINKRVQDIHPTVPNPYNLLSSLPPSHTWYSVLDLKDAFFCLKLHPNSQPLFAFEWRDPEKGNTGQLTWTRLPQGFKNSPTLFNEALHRDLAPFRALNPQVVLLQYVDDLLVAAPTYRDCKEGTQKLLQELSKLGYRVSAKKAQLCQKEVTYLGYLLKEGKRWLTPARKATVMKIPPPTTPRQVREFLGTAGFCRLWIPGFASLAAPLYPLTKPSIPFIWTEEHQKAFDRIKEALLSAPALALPDLTKPFTLYVDERAGVARGVLTQTLGPWRRPVAYLSKKLDPVASGWPTCLKAVAAVALLLKDADKLTLGQNVTVIASHSLESIVRQPPDRWMTNARMTHYQSLLLNERVSFAPPAVLNPATLLPVESEATPVHRCSEILAEETGTRRDLKDQPLPGVPAWYTDGSSFIAEGKRRAGAAIVDGKRTVWASSLPEGTSAQKAELVALTQALRLAEGKDINIYTDSRYAFATAHIHGAIYKQRGWLTSAGKDIKNKEEILALLEAIHLPKRVAIIHCPGHQKGNDPVATGNRRADEAAKQAALSTRVLAETTKPAGKRTADGSEFEKRTADGSEFESPKKKAKVE

SEQ ID NO: 832 - protein, 2091 aa, synthetic construct
  source 1..2091: note = Description of Artificial Sequence: Synthetic polypeptide
MPAAKRVKLDGGDKKYSIGLDIGTNSVGWAVITDEYKVPSKKFKVLGNTDRHSIKKNLIGALLFDSGETAEATRLKRTARRRYTRRKNRICYLQEIFSNEMAKVDDSFFHRLEESFLVEEDKKHERHPIFGNIVDEVAYHEKYPTIYHLRKKLVDSTDKADLRLIYLALAHMIKFRGHFLIEGDLNPDNSDVDKLFIQLVQTYNQLFEENPINASGVDAKAILSARLSKSRRLENLIAQLPGEKKNGLFGNLIALSLGLTPNFKSNFDLAEDAKLQLSKDTYDDDLDNLLAQIGDQYADLFLAAKNLSDAILLSDILRVNTEITKAPLSASMIKRYDEHHQDLTLLKALVRQQLPEKYKEIFFDQSKNGYAGYIDGGASQEEFYKFIKPILEKMDGTEELLVKLNREDLLRKQRTFDNGSIPHQIHLGELHAILRRQEDFYPFLKDNREKIEKILTFRIPYYVGPLARGNSRFAWMTRKSEETITPWNFEEVVDKGASAQSFIERMTNFDKNLPNEKVLPKHSLLYEYFTVYNELTKVKYVTEGMRKPAFLSGEQKKAIVDLLFKTNRKVTVKQLKEDYFKKIECFDSVEISGVEDRFNASLGTYHDLLKIIKDKDFLDNEENEDILEDIVLTLTLFEDREMIEERLKTYAHLFDDKVMKQLKRRRYTGWGRLSRKLINGIRDKQSGKTILDFLKSDGFANRNFMQLIHDDSLTFKEDIQKAQVSGQGDSLHEHIANLAGSPAIKKGILQTVKVVDELVKVMGRHKPENIVIEMARENQTTQKGQKNSRERMKRIEEGIKELGSQILKEHPVENTQLQNEKLYLYYLQNGRDMYVDQELDINRLSDYDVDHIVPQSFLKDDSIDNKVLTRSDKARGKSDNVPSEEVVKKMKNYWRQLLNAKLITQRKFDNLTKAERGGLSELDKAGFIKRQLVETRQITKHVAQILDSRMNTKYDENDKLIREVKVITLKSKLVSDFRKDFQFYKVREINNYHHAHDAYLNAVVGTALIKKYPKLESEFVYGDYKVYDVRKMIAKSEQEIGKATAKYFFYSNIMNFFKTEITLANGEIRKRPLIETNGETGEIVWDKGRDFATVRKVLSMPQVNIVKKTEVQTGGFSKESILPKRNSDKLIARKKDWDPKKYGGFDSPTVAYSVLVVAKVEKGKSKKLKSVKELLGITIMERSSFEKNPIDFLEAKGYKEVKKDLIIKLPKYSLFELENGRKRMLASAGELQKGNELALPSKYVNFLYLASHYEKLKGSPEDNEQKQLFVEQHKHYLDEIIEQISEFSKRVILADANLDKVLSAYNKHRDKPIREQAENIIHLFTLTNLGAPAAFKYFDTTIDRKRYTSTKEVLDATLIHQSITGLYETRIDLSQLGGDGGEAAAKGGSGGVLNLEEEYRLHEKPVPSSIDPSWLQLFPTVWAERAGMGLANQVPPVVVELRSGASPVAVRQYPMSKEAREGIRPHIQRFLDLGVLVPCQSPWNTPLLPVKKPGTNDYRPVQDLREINKRVQDIHPTVPNPYNLLSSLPPSHTWYSVLDLKDAFFCLKLHPNSQPLFAFEWRDPEKGNTGQLTWTRLPQGFKNSPTLFNEALHRDLAPFRALNPQVVLLQYVDDLLVAAPTYRDCKEGTQKLLQELSKLGYRVSAKKAQLCQKEVTYLGYLLKEGKRWLTPARKATVMKIPPPTTPRQVREFLGTAGFCRLWIPGFASLAAPLYPLTKPSIPFIWTEEHQKAFDRIKEALLSAPALALPDLTKPFTLYVDERAGVARGVLTQTLGPWRRPVAYLSKKLDPVASGWPTCLKAVAAVALLLKDADKLTLGQNVTVIASHSLESIVRQPPDRWMTNARMTHYQSLLLNERVSFAPPAVLNPATLLPVESEATPVHRCSEILAEETGTRRDLKDQPLPGVPAWYTDGSSFIAEGKRRAGAAIVDGKRTVWASSLPEGTSAQKAELVALTQALRLAEGKDINIYTDSRYAFATAHIHGAIYKQRGWLTSAGKDIKNKEEILALLEAIHLPKRVAIIHCPGHQKGNDPVATGNRRADEAAKQAALSTRVLAETTKPAGKRTADGSEFEKRTADGSEFESPKKKAKVE

SEQ ID NO: 833 - protein, 2093 aa, synthetic construct
  source 1..2093: note = Description of Artificial Sequence: Synthetic polypeptide
MPAAKRVKLDGGDKKYSIGLDIGTNSVGWAVITDEYKVPSKKFKVLGNTDRHSIKKNLIGALLFDSGETAEATRLKRTARRRYTRRKNRICYLQEIFSNEMAKVDDSFFHRLEESFLVEEDKKHERHPIFGNIVDEVAYHEKYPTIYHLRKKLVDSTDKADLRLIYLALAHMIKFRGHFLIEGDLNPDNSDVDKLFIQLVQTYNQLFEENPINASGVDAKAILSARLSKSRRLENLIAQLPGEKKNGLFGNLIALSLGLTPNFKSNFDLAEDAKLQLSKDTYDDDLDNLLAQIGDQYADLFLAAKNLSDAILLSDILRVNTEITKAPLSASMIKRYDEHHQDLTLLKALVRQQLPEKYKEIFFDQSKNGYAGYIDGGASQEEFYKFIKPILEKMDGTEELLVKLNREDLLRKQRTFDNGSIPHQIHLGELHAILRRQEDFYPFLKDNREKIEKILTFRIPYYVGPLARGNSRFAWMTRKSEETITPWNFEEVVDKGASAQSFIERMTNFDKNLPNEKVLPKHSLLYEYFTVYNELTKVKYVTEGMRKPAFLSGEQKKAIVDLLFKTNRKVTVKQLKEDYFKKIECFDSVEISGVEDRFNASLGTYHDLLKIIKDKDFLDNEENEDILEDIVLTLTLFEDREMIEERLKTYAHLFDDKVMKQLKRRRYTGWGRLSRKLINGIRDKQSGKTILDFLKSDGFANRNFMQLIHDDSLTFKEDIQKAQVSGQGDSLHEHIANLAGSPAIKKGILQTVKVVDELVKVMGRHKPENIVIEMARENQTTQKGQKNSRERMKRIEEGIKELGSQILKEHPVENTQLQNEKLYLYYLQNGRDMYVDQELDINRLSDYDVDHIVPQSFLKDDSIDNKVLTRSDKARGKSDNVPSEEVVKKMKNYWRQLLNAKLITQRKFDNLTKAERGGLSELDKAGFIKRQLVETRQITKHVAQILDSRMNTKYDENDKLIREVKVITLKSKLVSDFRKDFQFYKVREINNYHHAHDAYLNAVVGTALIKKYPKLESEFVYGDYKVYDVRKMIAKSEQEIGKATAKYFFYSNIMNFFKTEITLANGEIRKRPLIETNGETGEIVWDKGRDFATVRKVLSMPQVNIVKKTEVQTGGFSKESILPKRNSDKLIARKKDWDPKKYGGFDSPTVAYSVLVVAKVEKGKSKKLKSVKELLGITIMERSSFEKNPIDFLEAKGYKEVKKDLIIKLPKYSLFELENGRKRMLASAGELQKGNELALPSKYVNFLYLASHYEKLKGSPEDNEQKQLFVEQHKHYLDEIIEQISEFSKRVILADANLDKVLSAYNKHRDKPIREQAENIIHLFTLTNLGAPAAFKYFDTTIDRKRYTSTKEVLDATLIHQSITGLYETRIDLSQLGGDGGEAAAKEAAAKGGVLNLEEEYRLHEKPVPSSIDPSWLQLFPTVWAERAGMGLANQVPPVVVELRSGASPVAVRQYPMSKEAREGIRPHIQRFLDLGVLVPCQSPWNTPLLPVKKPGTNDYRPVQDLREINKRVQDIHPTVPNPYNLLSSLPPSHTWYSVLDLKDAFFCLKLHPNSQPLFAFEWRDPEKGNTGQLTWTRLPQGFKNSPTLFNEALHRDLAPFRALNPQVVLLQYVDDLLVAAPTYRDCKEGTQKLLQELSKLGYRVSAKKAQLCQKEVTYLGYLLKEGKRWLTPARKATVMKIPPPTTPRQVREFLGTAGFCRLWIPGFASLAAPLYPLTKPSIPFIWTEEHQKAFDRIKEALLSAPALALPDLTKPFTLYVDERAGVARGVLTQTLGPWRRPVAYLSKKLDPVASGWPTCLKAVAAVALLLKDADKLTLGQNVTVIASHSLESIVRQPPDRWMTNARMTHYQSLLLNERVSFAPPAVLNPATLLPVESEATPVHRCSEILAEETGTRRDLKDQPLPGVPAWYTDGSSFIAEGKRRAGAAIVDGKRTVWASSLPEGTSAQKAELVALTQALRLAEGKDINIYTDSRYAFATAHIHGAIYKQRGWLTSAGKDIKNKEEILALLEAIHLPKRVAIIHCPGHQKGNDPVATGNRRADEAAKQAALSTRVLAETTKPAGKRTADGSEFEKRTADGSEFESPKKKAKVE

SEQ ID NO: 834 - protein, 2094 aa, synthetic construct
  source 1..2094: note = Description of Artificial Sequence: Synthetic polypeptide
MPAAKRVKLDGGDKKYSIGLDIGTNSVGWAVITDEYKVPSKKFKVLGNTDRHSIKKNLIGALLFDSGETAEATRLKRTARRRYTRRKNRICYLQEIFSNEMAKVDDSFFHRLEESFLVEEDKKHERHPIFGNIVDEVAYHEKYPTIYHLRKKLVDSTDKADLRLIYLALAHMIKFRGHFLIEGDLNPDNSDVDKLFIQLVQTYNQLFEENPINASGVDAKAILSARLSKSRRLENLIAQLPGEKKNGLFGNLIALSLGLTPNFKSNFDLAEDAKLQLSKDTYDDDLDNLLAQIGDQYADLFLAAKNLSDAILLSDILRVNTEITKAPLSASMIKRYDEHHQDLTLLKALVRQQLPEKYKEIFFDQSKNGYAGYIDGGASQEEFYKFIKPILEKMDGTEELLVKLNREDLLRKQRTFDNGSIPHQIHLGELHAILRRQEDFYPFLKDNREKIEKILTFRIPYYVGPLARGNSRFAWMTRKSEETITPWNFEEVVDKGASAQSFIERMTNFDKNLPNEKVLPKHSLLYEYFTVYNELTKVKYVTEGMRKPAFLSGEQKKAIVDLLFKTNRKVTVKQLKEDYFKKIECFDSVEISGVEDRFNASLGTYHDLLKIIKDKDFLDNEENEDILEDIVLTLTLFEDREMIEERLKTYAHLFDDKVMKQLKRRRYTGWGRLSRKLINGIRDKQSGKTILDFLKSDGFANRNFMQLIHDDSLTFKEDIQKAQVSGQGDSLHEHIANLAGSPAIKKGILQTVKVVDELVKVMGRHKPENIVIEMARENQTTQKGQKNSRERMKRIEEGIKELGSQILKEHPVENTQLQNEKLYLYYLQNGRDMYVDQELDINRLSDYDVDHIVPQSFLKDDSIDNKVLTRSDKARGKSDNVPSEEVVKKMKNYWRQLLNAKLITQRKFDNLTKAERGGLSELDKAGFIKRQLVETRQITKHVAQILDSRMNTKYDENDKLIREVKVITLKSKLVSDFRKDFQFYKVREINNYHHAHDAYLNAVVGTALIKKYPKLESEFVYGDYKVYDVRKMIAKSEQEIGKATAKYFFYSNIMNFFKTEITLANGEIRKRPLIETNGETGEIVWDKGRDFATVRKVLSMPQVNIVKKTEVQTGGFSKESILPKRNSDKLIARKKDWDPKKYGGFDSPTVAYSVLVVAKVEKGKSKKLKSVKELLGITIMERSSFEKNPIDFLEAKGYKEVKKDLIIKLPKYSLFELENGRKRMLASAGELQKGNELALPSKYVNFLYLASHYEKLKGSPEDNEQKQLFVEQHKHYLDEIIEQISEFSKRVILADANLDKVLSAYNKHRDKPIREQAENIIHLFTLTNLGAPAAFKYFDTTIDRKRYTSTKEVLDATLIHQSITGLYETRIDLSQLGGDGGEAAAKPAPGSSGGVLNLEEEYRLHEKPVPSSIDPSWLQLFPTVWAERAGMGLANQVPPVVVELRSGASPVAVRQYPMSKEAREGIRPHIQRFLDLGVLVPCQSPWNTPLLPVKKPGTNDYRPVQDLREINKRVQDIHPTVPNPYNLLSSLPPSHTWYSVLDLKDAFFCLKLHPNSQPLFAFEWRDPEKGNTGQLTWTRLPQGFKNSPTLFNEALHRDLAPFRALNPQVVLLQYVDDLLVAAPTYRDCKEGTQKLLQELSKLGYRVSAKKAQLCQKEVTYLGYLLKEGKRWLTPARKATVMKIPPPTTPRQVREFLGTAGFCRLWIPGFASLAAPLYPLTKPSIPFIWTEEHQKAFDRIKEALLSAPALALPDLTKPFTLYVDERAGVARGVLTQTLGPWRRPVAYLSKKLDPVASGWPTCLKAVAAVALLLKDADKLTLGQNVTVIASHSLESIVRQPPDRWMTNARMTHYQSLLLNERVSFAPPAVLNPATLLPVESEATPVHRCSEILAEETGTRRDLKDQPLPGVPAWYTDGSSFIAEGKRRAGAAIVDGKRTVWASSLPEGTSAQKAELVALTQALRLAEGKDINIYTDSRYAFATAHIHGAIYKQRGWLTSAGKDIKNKEEILALLEAIHLPKRVAIIHCPGHQKGNDPVATGNRRADEAAKQAALSTRVLAETTKPAGKRTADGSEFEKRTADGSEFESPKKKAKVE

SEQ ID NO: 835 - protein, 2092 aa, synthetic construct
  source 1..2092: note = Description of Artificial Sequence: Synthetic polypeptide
MPAAKRVKLDGGDKKYSIGLDIGTNSVGWAVITDEYKVPSKKFKVLGNTDRHSIKKNLIGALLFDSGETAEATRLKRTARRRYTRRKNRICYLQEIFSNEMAKVDDSFFHRLEESFLVEEDKKHERHPIFGNIVDEVAYHEKYPTIYHLRKKLVDSTDKADLRLIYLALAHMIKFRGHFLIEGDLNPDNSDVDKLFIQLVQTYNQLFEENPINASGVDAKAILSARLSKSRRLENLIAQLPGEKKNGLFGNLIALSLGLTPNFKSNFDLAEDAKLQLSKDTYDDDLDNLLAQIGDQYADLFLAAKNLSDAILLSDILRVNTEITKAPLSASMIKRYDEHHQDLTLLKALVRQQLPEKYKEIFFDQSKNGYAGYIDGGASQEEFYKFIKPILEKMDGTEELLVKLNREDLLRKQRTFDNGSIPHQIHLGELHAILRRQEDFYPFLKDNREKIEKILTFRIPYYVGPLARGNSRFAWMTRKSEETITPWNFEEVVDKGASAQSFIERMTNFDKNLPNEKVLPKHSLLYEYFTVYNELTKVKYVTEGMRKPAFLSGEQKKAIVDLLFKTNRKVTVKQLKEDYFKKIECFDSVEISGVEDRFNASLGTYHDLLKIIKDKDFLDNEENEDILEDIVLTLTLFEDREMIEERLKTYAHLFDDKVMKQLKRRRYTGWGRLSRKLINGIRDKQSGKTILDFLKSDGFANRNFMQLIHDDSLTFKEDIQKAQVSGQGDSLHEHIANLAGSPAIKKGILQTVKVVDELVKVMGRHKPENIVIEMARENQTTQKGQKNSRERMKRIEEGIKELGSQILKEHPVENTQLQNEKLYLYYLQNGRDMYVDQELDINRLSDYDVDHIVPQSFLKDDSIDNKVLTRSDKARGKSDNVPSEEVVKKMKNYWRQLLNAKLITQRKFDNLTKAERGGLSELDKAGFIKRQLVETRQITKHVAQILDSRMNTKYDENDKLIREVKVITLKSKLVSDFRKDFQFYKVREINNYHHAHDAYLNAVVGTALIKKYPKLESEFVYGDYKVYDVRKMIAKSEQEIGKATAKYFFYSNIMNFFKTEITLANGEIRKRPLIETNGETGEIVWDKGRDFATVRKVLSMPQVNIVKKTEVQTGGFSKESILPKRNSDKLIARKKDWDPKKYGGFDSPTVAYSVLVVAKVEKGKSKKLKSVKELLGITIMERSSFEKNPIDFLEAKGYKEVKKDLIIKLPKYSLFELENGRKRMLASAGELQKGNELALPSKYVNFLYLASHYEKLKGSPEDNEQKQLFVEQHKHYLDEIIEQISEFSKRVILADANLDKVLSAYNKHRDKPIREQAENIIHLFTLTNLGAPAAFKYFDTTIDRKRYTSTKEVLDATLIHQSITGLYETRIDLSQLGGDGGGSSGSSGSSGGVLNLEEEYRLHEKPVPSSIDPSWLQLFPTVWAERAGMGLANQVPPVVVELRSGASPVAVRQYPMSKEAREGIRPHIQRFLDLGVLVPCQSPWNTPLLPVKKPGTNDYRPVQDLREINKRVQDIHPTVPNPYNLLSSLPPSHTWYSVLDLKDAFFCLKLHPNSQPLFAFEWRDPEKGNTGQLTWTRLPQGFKNSPTLFNEALHRDLAPFRALNPQVVLLQYVDDLLVAAPTYRDCKEGTQKLLQELSKLGYRVSAKKAQLCQKEVTYLGYLLKEGKRWLTPARKATVMKIPPPTTPRQVREFLGTAGFCRLWIPGFASLAAPLYPLTKPSIPFIWTEEHQKAFDRIKEALLSAPALALPDLTKPFTLYVDERAGVARGVLTQTLGPWRRPVAYLSKKLDPVASGWPTCLKAVAAVALLLKDADKLTLGQNVTVIASHSLESIVRQPPDRWMTNARMTHYQSLLLNERVSFAPPAVLNPATLLPVESEATPVHRCSEILAEETGTRRDLKDQPLPGVPAWYTDGSSFIAEGKRRAGAAIVDGKRTVWASSLPEGTSAQKAELVALTQALRLAEGKDINIYTDSRYAFATAHIHGAIYKQRGWLTSAGKDIKNKEEILALLEAIHLPKRVAIIHCPGHQKGNDPVATGNRRADEAAKQAALSTRVLAETTKPAGKRTADGSEFEKRTADGSEFESPKKKAKVE

SEQ ID NO: 836 - protein, 2091 aa, synthetic construct
  source 1..2091: note = Description of Artificial Sequence: Synthetic polypeptide
MPAAKRVKLDGGDKKYSIGLDIGTNSVGWAVITDEYKVPSKKFKVLGNTDRHSIKKNLIGALLFDSGETAEATRLKRTARRRYTRRKNRICYLQEIFSNEMAKVDDSFFHRLEESFLVEEDKKHERHPIFGNIVDEVAYHEKYPTIYHLRKKLVDSTDKADLRLIYLALAHMIKFRGHFLIEGDLNPDNSDVDKLFIQLVQTYNQLFEENPINASGVDAKAILSARLSKSRRLENLIAQLPGEKKNGLFGNLIALSLGLTPNFKSNFDLAEDAKLQLSKDTYDDDLDNLLAQIGDQYADLFLAAKNLSDAILLSDILRVNTEITKAPLSASMIKRYDEHHQDLTLLKALVRQQLPEKYKEIFFDQSKNGYAGYIDGGASQEEFYKFIKPILEKMDGTEELLVKLNREDLLRKQRTFDNGSIPHQIHLGELHAILRRQEDFYPFLKDNREKIEKILTFRIPYYVGPLARGNSRFAWMTRKSEETITPWNFEEVVDKGASAQSFIERMTNFDKNLPNEKVLPKHSLLYEYFTVYNELTKVKYVTEGMRKPAFLSGEQKKAIVDLLFKTNRKVTVKQLKEDYFKKIECFDSVEISGVEDRFNASLGTYHDLLKIIKDKDFLDNEENEDILEDIVLTLTLFEDREMIEERLKTYAHLFDDKVMKQLKRRRYTGWGRLSRKLINGIRDKQSGKTILDFLKSDGFANRNFMQLIHDDSLTFKEDIQKAQVSGQGDSLHEHIANLAGSPAIKKGILQTVKVVDELVKVMGRHKPENIVIEMARENQTTQKGQKNSRERMKRIEEGIKELGSQILKEHPVENTQLQNEKLYLYYLQNGRDMYVDQELDINRLSDYDVDHIVPQSFLKDDSIDNKVLTRSDKARGKSDNVPSEEVVKKMKNYWRQLLNAKLITQRKFDNLTKAERGGLSELDKAGFIKRQLVETRQITKHVAQILDSRMNTKYDENDKLIREVKVITLKSKLVSDFRKDFQFYKVREINNYHHAHDAYLNAVVGTALIKKYPKLESEFVYGDYKVYDVRKMIAKSEQEIGKATAKYFFYSNIMNFFKTEITLANGEIRKRPLIETNGETGEIVWDKGRDFATVRKVLSMPQVNIVKKTEVQTGGFSKESILPKRNSDKLIARKKDWDPKKYGGFDSPTVAYSVLVVAKVEKGKSKKLKSVKELLGITIMERSSFEKNPIDFLEAKGYKEVKKDLIIKLPKYSLFELENGRKRMLASAGELQKGNELALPSKYVNFLYLASHYEKLKGSPEDNEQKQLFVEQHKHYLDEIIEQISEFSKRVILADANLDKVLSAYNKHRDKPIREQAENIIHLFTLTNLGAPAAFKYFDTTIDRKRYTSTKEVLDATLIHQSITGLYETRIDLSQLGGDGGEAAAKGSSGGVLNLEEEYRLHEKPVPSSIDPSWLQLFPTVWAERAGMGLANQVPPVVVELRSGASPVAVRQYPMSKEAREGIRPHIQRFLDLGVLVPCQSPWNTPLLPVKKPGTNDYRPVQDLREINKRVQDIHPTVPNPYNLLSSLPPSHTWYSVLDLKDAFFCLKLHPNSQPLFAFEWRDPEKGNTGQLTWTRLPQGFKNSPTLFNEALHRDLAPFRALNPQVVLLQYVDDLLVAAPTYRDCKEGTQKLLQELSKLGYRVSAKKAQLCQKEVTYLGYLLKEGKRWLTPARKATVMKIPPPTTPRQVREFLGTAGFCRLWIPGFASLAAPLYPLTKPSIPFIWTEEHQKAFDRIKEALLSAPALALPDLTKPFTLYVDERAGVARGVLTQTLGPWRRPVAYLSKKLDPVASGWPTCLKAVAAVALLLKDADKLTLGQNVTVIASHSLESIVRQPPDRWMTNARMTHYQSLLLNERVSFAPPAVLNPATLLPVESEATPVHRCSEILAEETGTRRDLKDQPLPGVPAWYTDGSSFIAEGKRRAGAAIVDGKRTVWASSLPEGTSAQKAELVALTQALRLAEGKDINIYTDSRYAFATAHIHGAIYKQRGWLTSAGKDIKNKEEILALLEAIHLPKRVAIIHCPGHQKGNDPVATGNRRADEAAKQAALSTRVLAETTKPAGKRTADGSEFEKRTADGSEFESPKKKAKVE

SEQ ID NO: 837 - protein, 2091 aa, synthetic construct
  source 1..2091: note = Description of Artificial Sequence: Synthetic polypeptide
MPAAKRVKLDGGDKKYSIGLDIGTNSVGWAVITDEYKVPSKKFKVLGNTDRHSIKKNLIGALLFDSGETAEATRLKRTARRRYTRRKNRICYLQEIFSNEMAKVDDSFFHRLEESFLVEEDKKHERHPIFGNIVDEVAYHEKYPTIYHLRKKLVDSTDKADLRLIYLALAHMIKFRGHFLIEGDLNPDNSDVDKLFIQLVQTYNQLFEENPINASGVDAKAILSARLSKSRRLENLIAQLPGEKKNGLFGNLIALSLGLTPNFKSNFDLAEDAKLQLSKDTYDDDLDNLLAQIGDQYADLFLAAKNLSDAILLSDILRVNTEITKAPLSASMIKRYDEHHQDLTLLKALVRQQLPEKYKEIFFDQSKNGYAGYIDGGASQEEFYKFIKPILEKMDGTEELLVKLNREDLLRKQRTFDNGSIPHQIHLGELHAILRRQEDFYPFLKDNREKIEKILTFRIPYYVGPLARGNSRFAWMTRKSEETITPWNFEEVVDKGASAQSFIERMTNFDKNLPNEKVLPKHSLLYEYFTVYNELTKVKYVTEGMRKPAFLSGEQKKAIVDLLFKTNRKVTVKQLKEDYFKKIECFDSVEISGVEDRFNASLGTYHDLLKIIKDKDFLDNEENEDILEDIVLTLTLFEDREMIEERLKTYAHLFDDKVMKQLKRRRYTGWGRLSRKLINGIRDKQSGKTILDFLKSDGFANRNFMQLIHDDSLTFKEDIQKAQVSGQGDSLHEHIANLAGSPAIKKGILQTVKVVDELVKVMGRHKPENIVIEMARENQTTQKGQKNSRERMKRIEEGIKELGSQILKEHPVENTQLQNEKLYLYYLQNGRDMYVDQELDINRLSDYDVDHIVPQSFLKDDSIDNKVLTRSDKARGKSDNVPSEEVVKKMKNYWRQLLNAKLITQRKFDNLTKAERGGLSELDKAGFIKRQLVETRQITKHVAQILDSRMNTKYDENDKLIREVKVITLKSKLVSDFRKDFQFYKVREINNYHHAHDAYLNAVVGTALIKKYPKLESEFVYGDYKVYDVRKMIAKSEQEIGKATAKYFFYSNIMNFFKTEITLANGEIRKRPLIETNGETGEIVWDKGRDFATVRKVLSMPQVNIVKKTEVQTGGFSKESILPKRNSDKLIARKKDWDPKKYGGFDSPTVAYSVLVVAKVEKGKSKKLKSVKELLGITIMERSSFEKNPIDFLEAKGYKEVKKDLIIKLPKYSLFELENGRKRMLASAGELQKGNELALPSKYVNFLYLASHYEKLKGSPEDNEQKQLFVEQHKHYLDEIIEQISEFSKRVILADANLDKVLSAYNKHRDKPIREQAENIIHLFTLTNLGAPAAFKYFDTTIDRKRYTSTKEVLDATLIHQSITGLYETRIDLSQLGGDGGGGGEAAAKGGVLNLEEEYRLHEKPVPSSIDPSWLQLFPTVWAERAGMGLANQVPPVVVELRSGASPVAVRQYPMSKEAREGIRPHIQRFLDLGVLVPCQSPWNTPLLPVKKPGTNDYRPVQDLREINKRVQDIHPTVPNPYNLLSSLPPSHTWYSVLDLKDAFFCLKLHPNSQPLFAFEWRDPEKGNTGQLTWTRLPQGFKNSPTLFNEALHRDLAPFRALNPQVVLLQYVDDLLVAAPTYRDCKEGTQKLLQELSKLGYRVSAKKAQLCQKEVTYLGYLLKEGKRWLTPARKATVMKIPPPTTPRQVREFLGTAGFCRLWIPGFASLAAPLYPLTKPSIPFIWTEEHQKAFDRIKEALLSAPALALPDLTKPFTLYVDERAGVARGVLTQTLGPWRRPVAYLSKKLDPVASGWPTCLKAVAAVALLLKDADKLTLGQNVTVIASHSLESIVRQPPDRWMTNARMTHYQSLLLNERVSFAPPAVLNPATLLPVESEATPVHRCSEILAEETGTRRDLKDQPLPGVPAWYTDGSSFIAEGKRRAGAAIVDGKRTVWASSLPEGTSAQKAELVALTQALRLAEGKDINIYTDSRYAFATAHIHGAIYKQRGWLTSAGKDIKNKEEILALLEAIHLPKRVAIIHCPGHQKGNDPVATGNRRADEAAKQAALSTRVLAETTKPAGKRTADGSEFEKRTADGSEFESPKKKAKVE

SEQ ID NO: 838 - protein, 2091 aa, synthetic construct
  source 1..2091: note = Description of Artificial Sequence: Synthetic polypeptide
MPAAKRVKLDGGDKKYSIGLDIGTNSVGWAVITDEYKVPSKKFKVLGNTDRHSIKKNLIGALLFDSGETAEATRLKRTARRRYTRRKNRICYLQEIFSNEMAKVDDSFFHRLEESFLVEEDKKHERHPIFGNIVDEVAYHEKYPTIYHLRKKLVDSTDKADLRLIYLALAHMIKFRGHFLIEGDLNPDNSDVDKLFIQLVQTYNQLFEENPINASGVDAKAILSARLSKSRRLENLIAQLPGEKKNGLFGNLIALSLGLTPNFKSNFDLAEDAKLQLSKDTYDDDLDNLLAQIGDQYADLFLAAKNLSDAILLSDILRVNTEITKAPLSASMIKRYDEHHQDLTLLKALVRQQLPEKYKEIFFDQSKNGYAGYIDGGASQEEFYKFIKPILEKMDGTEELLVKLNREDLLRKQRTFDNGSIPHQIHLGELHAILRRQEDFYPFLKDNREKIEKILTFRIPYYVGPLARGNSRFAWMTRKSEETITPWNFEEVVDKGASAQSFIERMTNFDKNLPNEKVLPKHSLLYEYFTVYNELTKVKYVTEGMRKPAFLSGEQKKAIVDLLFKTNRKVTVKQLKEDYFKKIECFDSVEISGVEDRFNASLGTYHDLLKIIKDKDFLDNEENEDILEDIVLTLTLFEDREMIEERLKTYAHLFDDKVMKQLKRRRYTGWGRLSRKLINGIRDKQSGKTILDFLKSDGFANRNFMQLIHDDSLTFKEDIQKAQVSGQGDSLHEHIANLAGSPAIKKGILQTVKVVDELVKVMGRHKPENIVIEMARENQTTQKGQKNSRERMKRIEEGIKELGSQILKEHPVENTQLQNEKLYLYYLQNGRDMYVDQELDINRLSDYDVDHIVPQSFLKDDSIDNKVLTRSDKARGKSDNVPSEEVVKKMKNYWRQLLNAKLITQRKFDNLTKAERGGLSELDKAGFIKRQLVETRQITKHVAQILDSRMNTKYDENDKLIREVKVITLKSKLVSDFRKDFQFYKVREINNYHHAHDAYLNAVVGTALIKKYPKLESEFVYGDYKVYDVRKMIAKSEQEIGKATAKYFFYSNIMNFFKTEITLANGEIRKRPLIETNGETGEIVWDKGRDFATVRKVLSMPQVNIVKKTEVQTGGFSKESILPKRNSDKLIARKKDWDPKKYGGFDSPTVAYSVLVVAKVEKGKSKKLKSVKELLGITIMERSSFEKNPIDFLEAKGYKEVKKDLIIKLPKYSLFELENGRKRMLASAGELQKGNELALPSKYVNFLYLASHYEKLKGSPEDNEQKQLFVEQHKHYLDEIIEQISEFSKRVILADANLDKVLSAYNKHRDKPIREQAENIIHLFTLTNLGAPAAFKYFDTTIDRKRYTSTKEVLDATLIHQSITGLYETRIDLSQLGGDGGGSSEAAAKGGVLNLEEEYRLHEKPVPSSIDPSWLQLFPTVWAERAGMGLANQVPPVVVELRSGASPVAVRQYPMSKEAREGIRPHIQRFLDLGVLVPCQSPWNTPLLPVKKPGTNDYRPVQDLREINKRVQDIHPTVPNPYNLLSSLPPSHTWYSVLDLKDAFFCLKLHPNSQPLFAFEWRDPEKGNTGQLTWTRLPQGFKNSPTLFNEALHRDLAPFRALNPQVVLLQYVDDLLVAAPTYRDCKEGTQKLLQELSKLGYRVSAKKAQLCQKEVTYLGYLLKEGKRWLTPARKATVMKIPPPTTPRQVREFLGTAGFCRLWIPGFASLAAPLYPLTKPSIPFIWTEEHQKAFDRIKEALLSAPALALPDLTKPFTLYVDERAGVARGVLTQTLGPWRRPVAYLSKKLDPVASGWPTCLKAVAAVALLLKDADKLTLGQNVTVIASHSLESIVRQPPDRWMTNARMTHYQSLLLNERVSFAPPAVLNPATLLPVESEATPVHRCSEILAEETGTRRDLKDQPLPGVPAWYTDGSSFIAEGKRRAGAAIVDGKRTVWASSLPEGTSAQKAELVALTQALRLAEGKDINIYTDSRYAFATAHIHGAIYKQRGWLTSAGKDIKNKEEILALLEAIHLPKRVAIIHCPGHQKGNDPVATGNRRADEAAKQAALSTRVLAETTKPAGKRTADGSEFEKRTADGSEFESPKKKAKVE

SEQ ID NO: 839 - protein, 2094 aa, synthetic construct
  source 1..2094: note = Description of Artificial Sequence: Synthetic polypeptide
MPAAKRVKLDGGDKKYSIGLDIGTNSVGWAVITDEYKVPSKKFKVLGNTDRHSIKKNLIGALLFDSGETAEATRLKRTARRRYTRRKNRICYLQEIFSNEMAKVDDSFFHRLEESFLVEEDKKHERHPIFGNIVDEVAYHEKYPTIYHLRKKLVDSTDKADLRLIYLALAHMIKFRGHFLIEGDLNPDNSDVDKLFIQLVQTYNQLFEENPINASGVDAKAILSARLSKSRRLENLIAQLPGEKKNGLFGNLIALSLGLTPNFKSNFDLAEDAKLQLSKDTYDDDLDNLLAQIGDQYADLFLAAKNLSDAILLSDILRVNTEITKAPLSASMIKRYDEHHQDLTLLKALVRQQLPEKYKEIFFDQSKNGYAGYIDGGASQEEFYKFIKPILEKMDGTEELLVKLNREDLLRKQRTFDNGSIPHQIHLGELHAILRRQEDFYPFLKDNREKIEKILTFRIPYYVGPLARGNSRFAWMTRKSEETITPWNFEEVVDKGASAQSFIERMTNFDKNLPNEKVLPKHSLLYEYFTVYNELTKVKYVTEGMRKPAFLSGEQKKAIVDLLFKTNRKVTVKQLKEDYFKKIECFDSVEISGVEDRFNASLGTYHDLLKIIKDKDFLDNEENEDILEDIVLTLTLFEDREMIEERLKTYAHLFDDKVMKQLKRRRYTGWGRLSRKLINGIRDKQSGKTILDFLKSDGFANRNFMQLIHDDSLTFKEDIQKAQVSGQGDSLHEHIANLAGSPAIKKGILQTVKVVDELVKVMGRHKPENIVIEMARENQTTQKGQKNSRERMKRIEEGIKELGSQILKEHPVENTQLQNEKLYLYYLQNGRDMYVDQELDINRLSDYDVDHIVPQSFLKDDSIDNKVLTRSDKARGKSDNVPSEEVVKKMKNYWRQLLNAKLITQRKFDNLTKAERGGLSELDKAGFIKRQLVETRQITKHVAQILDSRMNTKYDENDKLIREVKVITLKSKLVSDFRKDFQFYKVREINNYHHAHDAYLNAVVGTALIKKYPKLESEFVYGDYKVYDVRKMIAKSEQEIGKATAKYFFYSNIMNFFKTEITLANGEIRKRPLIETNGETGEIVWDKGRDFATVRKVLSMPQVNIVKKTEVQTGGFSKESILPKRNSDKLIARKKDWDPKKYGGFDSPTVAYSVLVVAKVEKGKSKKLKSVKELLGITIMERSSFEKNPIDFLEAKGYKEVKKDLIIKLPKYSLFELENGRKRMLASAGELQKGNELALPSKYVNFLYLASHYEKLKGSPEDNEQKQLFVEQHKHYLDEIIEQISEFSKRVILADANLDKVLSAYNKHRDKPIREQAENIIHLFTLTNLGAPAAFKYFDTTIDRKRYTSTKEVLDATLIHQSITGLYETRIDLSQLGGDGGGSSPAPEAAAKGGVLNLEEEYRLHEKPVPSSIDPSWLQLFPTVWAERAGMGLANQVPPVVVELRSGASPVAVRQYPMSKEAREGIRPHIQRFLDLGVLVPCQSPWNTPLLPVKKPGTNDYRPVQDLREINKRVQDIHPTVPNPYNLLSSLPPSHTWYSVLDLKDAFFCLKLHPNSQPLFAFEWRDPEKGNTGQLTWTRLPQGFKNSPTLFNEALHRDLAPFRALNPQVVLLQYVDDLLVAAPTYRDCKEGTQKLLQELSKLGYRVSAKKAQLCQKEVTYLGYLLKEGKRWLTPARKATVMKIPPPTTPRQVREFLGTAGFCRLWIPGFASLAAPLYPLTKPSIPFIWTEEHQKAFDRIKEALLSAPALALPDLTKPFTLYVDERAGVARGVLTQTLGPWRRPVAYLSKKLDPVASGWPTCLKAVAAVALLLKDADKLTLGQNVTVIASHSLESIVRQPPDRWMTNARMTHYQSLLLNERVSFAPPAVLNPATLLPVESEATPVHRCSEILAEETGTRRDLKDQPLPGVPAWYTDGSSFIAEGKRRAGAAIVDGKRTVWASSLPEGTSAQKAELVALTQALRLAEGKDINIYTDSRYAFATAHIHGAIYKQRGWLTSAGKDIKNKEEILALLEAIHLPKRVAIIHCPGHQKGNDPVATGNRRADEAAKQAALSTRVLAETTKPAGKRTADGSEFEKRTADGSEFESPKKKAKVE

SEQ ID NO: 840 - protein, 2092 aa, synthetic construct
  source 1..2092: note = Description of Artificial Sequence: Synthetic polypeptide
MPAAKRVKLDGGDKKYSIGLDIGTNSVGWAVITDEYKVPSKKFKVLGNTDRHSIKKNLIGALLFDSGETAEATRLKRTARRRYTRRKNRICYLQEIFSNEMAKVDDSFFHRLEESFLVEEDKKHERHPIFGNIVDEVAYHEKYPTIYHLRKKLVDSTDKADLRLIYLALAHMIKFRGHFLIEGDLNPDNSDVDKLFIQLVQTYNQLFEENPINASGVDAKAILSARLSKSRRLENLIAQLPGEKKNGLFGNLIALSLGLTPNFKSNFDLAEDAKLQLSKDTYDDDLDNLLAQIGDQYADLFLAAKNLSDAILLSDILRVNTEITKAPLSASMIKRYDEHHQDLTLLKALVRQQLPEKYKEIFFDQSKNGYAGYIDGGASQEEFYKFIKPILEKMDGTEELLVKLNREDLLRKQRTFDNGSIPHQIHLGELHAILRRQEDFYPFLKDNREKIEKILTFRIPYYVGPLARGNSRFAWMTRKSEETITPWNFEEVVDKGASAQSFIERMTNFDKNLPNEKVLPKHSLLYEYFTVYNELTKVKYVTEGMRKPAFLSGEQKKAIVDLLFKTNRKVTVKQLKEDYFKKIECFDSVEISGVEDRFNASLGTYHDLLKIIKDKDFLDNEENEDILEDIVLTLTLFEDREMIEERLKTYAHLFDDKVMKQLKRRRYTGWGRLSRKLINGIRDKQSGKTILDFLKSDGFANRNFMQLIHDDSLTFKEDIQKAQVSGQGDSLHEHIANLAGSPAIKKGILQTVKVVDELVKVMGRHKPENIVIEMARENQTTQKGQKNSRERMKRIEEGIKELGSQILKEHPVENTQLQNEKLYLYYLQNGRDMYVDQELDINRLSDYDVDHIVPQSFLKDDSIDNKVLTRSDKARGKSDNVPSEEVVKKMKNYWRQLLNAKLITQRKFDNLTKAERGGLSELDKAGFIKRQLVETRQITKHVAQILDSRMNTKYDENDKLIREVKVITLKSKLVSDFRKDFQFYKVREINNYHHAHDAYLNAVVGTALIKKYPKLESEFVYGDYKVYDVRKMIAKSEQEIGKATAKYFFYSNIMNFFKTEITLANGEIRKRPLIETNGETGEIVWDKGRDFATVRKVLSMPQVNIVKKTEVQTGGFSKESILPKRNSDKLIARKKDWDPKKYGGFDSPTVAYSVLVVAKVEKGKSKKLKSVKELLGITIMERSSFEKNPIDFLEAKGYKEVKKDLIIKLPKYSLFELENGRKRMLASAGELQKGNELALPSKYVNFLYLASHYEKLKGSPEDNEQKQLFVEQHKHYLDEIIEQISEFSKRVILADANLDKVLSAYNKHRDKPIREQAENIIHLFTLTNLGAPAAFKYFDTTIDRKRYTSTKEVLDATLIHQSITGLYETRIDLSQLGGDGGGSSPAPGGSGGVLNLEEEYRLHEKPVPSSIDPSWLQLFPTVWAERAGMGLANQVPPVVVELRSGASPVAVRQYPMSKEAREGIRPHIQRFLDLGVLVPCQSPWNTPLLPVKKPGTNDYRPVQDLREINKRVQDIHPTVPNPYNLLSSLPPSHTWYSVLDLKDAFFCLKLHPNSQPLFAFEWRDPEKGNTGQLTWTRLPQGFKNSPTLFNEALHRDLAPFRALNPQVVLLQYVDDLLVAAPTYRDCKEGTQKLLQELSKLGYRVSAKKAQLCQKEVTYLGYLLKEGKRWLTPARKATVMKIPPPTTPRQVREFLGTAGFCRLWIPGFASLAAPLYPLTKPSIPFIWTEEHQKAFDRIKEALLSAPALALPDLTKPFTLYVDERAGVARGVLTQTLGPWRRPVAYLSKKLDPVASGWPTCLKAVAAVALLLKDADKLTLGQNVTVIASHSLESIVRQPPDRWMTNARMTHYQSLLLNERVSFAPPAVLNPATLLPVESEATPVHRCSEILAEETGTRRDLKDQPLPGVPAWYTDGSSFIAEGKRRAGAAIVDGKRTVWASSLPEGTSAQKAELVALTQALRLAEGKDINIYTDSRYAFATAHIHGAIYKQRGWLTSAGKDIKNKEEILALLEAIHLPKRVAIIHCPGHQKGNDPVATGNRRADEAAKQAALSTRVLAETTKPAGKRTADGSEFEKRTADGSEFESPKKKAKVE

SEQ ID NO: 841 - protein, 2094 aa, synthetic construct
  source 1..2094: note = Description of Artificial Sequence: Synthetic polypeptide
MPAAKRVKLDGGDKKYSIGLDIGTNSVGWAVITDEYKVPSKKFKVLGNTDRHSIKKNLIGALLFDSGETAEATRLKRTARRRYTRRKNRICYLQEIFSNEMAKVDDSFFHRLEESFLVEEDKKHERHPIFGNIVDEVAYHEKYPTIYHLRKKLVDSTDKADLRLIYLALAHMIKFRGHFLIEGDLNPDNSDVDKLFIQLVQTYNQLFEENPINASGVDAKAILSARLSKSRRLENLIAQLPGEKKNGLFGNLIALSLGLTPNFKSNFDLAEDAKLQLSKDTYDDDLDNLLAQIGDQYADLFLAAKNLSDAILLSDILRVNTEITKAPLSASMIKRYDEHHQDLTLLKALVRQQLPEKYKEIFFDQSKNGYAGYIDGGASQEEFYKFIKPILEKMDGTEELLVKLNREDLLRKQRTFDNGSIPHQIHLGELHAILRRQEDFYPFLKDNREKIEKILTFRIPYYVGPLARGNSRFAWMTRKSEETITPWNFEEVVDKGASAQSFIERMTNFDKNLPNEKVLPKHSLLYEYFTVYNELTKVKYVTEGMRKPAFLSGEQKKAIVDLLFKTNRKVTVKQLKEDYFKKIECFDSVEISGVEDRFNASLGTYHDLLKIIKDKDFLDNEENEDILEDIVLTLTLFEDREMIEERLKTYAHLFDDKVMKQLKRRRYTGWGRLSRKLINGIRDKQSGKTILDFLKSDGFANRNFMQLIHDDSLTFKEDIQKAQVSGQGDSLHEHIANLAGSPAIKKGILQTVKVVDELVKVMGRHKPENIVIEMARENQTTQKGQKNSRERMKRIEEGIKELGSQILKEHPVENTQLQNEKLYLYYLQNGRDMYVDQELDINRLSDYDVDHIVPQSFLKDDSIDNKVLTRSDKARGKSDNVPSEEVVKKMKNYWRQLLNAKLITQRKFDNLTKAERGGLSELDKAGFIKRQLVETRQITKHVAQILDSRMNTKYDENDKLIREVKVITLKSKLVSDFRKDFQFYKVREINNYHHAHDAYLNAVVGTALIKKYPKLESEFVYGDYKVYDVRKMIAKSEQEIGKATAKYFFYSNIMNFFKTEITLANGEIRKRPLIETNGETGEIVWDKGRDFATVRKVLSMPQVNIVKKTEVQTGGFSKESILPKRNSDKLIARKKDWDPKKYGGFDSPTVAYSVLVVAKVEKGKSKKLKSVKELLGITIMERSSFEKNPIDFLEAKGYKEVKKDLIIKLPKYSLFELENGRKRMLASAGELQKGNELALPSKYVNFLYLASHYEKLKGSPEDNEQKQLFVEQHKHYLDEIIEQISEFSKRVILADANLDKVLSAYNKHRDKPIREQAENIIHLFTLTNLGAPAAFKYFDTTIDRKRYTSTKEVLDATLIHQSITGLYETRIDLSQLGGDGGGGGEAAAKGGSGGVLNLEEEYRLHEKPVPSSIDPSWLQLFPTVWAERAGMGLANQVPPVVVELRSGASPVAVRQYPMSKEAREGIRPHIQRFLDLGVLVPCQSPWNTPLLPVKKPGTNDYRPVQDLREINKRVQDIHPTVPNPYNLLSSLPPSHTWYSVLDLKDAFFCLKLHPNSQPLFAFEWRDPEKGNTGQLTWTRLPQGFKNSPTLFNEALHRDLAPFRALNPQVVLLQYVDDLLVAAPTYRDCKEGTQKLLQELSKLGYRVSAKKAQLCQKEVTYLGYLLKEGKRWLTPARKATVMKIPPPTTPRQVREFLGTAGFCRLWIPGFASLAAPLYPLTKPSIPFIWTEEHQKAFDRIKEALLSAPALALPDLTKPFTLYVDERAGVARGVLTQTLGPWRRPVAYLSKKLDPVASGWPTCLKAVAAVALLLKDADKLTLGQNVTVIASHSLESIVRQPPDRWMTNARMTHYQSLLLNERVSFAPPAVLNPATLLPVESEATPVHRCSEILAEETGTRRDLKDQPLPGVPAWYTDGSSFIAEGKRRAGAAIVDGKRTVWASSLPEGTSAQKAELVALTQALRLAEGKDINIYTDSRYAFATAHIHGAIYKQRGWLTSAGKDIKNKEEILALLEAIHLPKRVAIIHCPGHQKGNDPVATGNRRADEAAKQAALSTRVLAETTKPAGKRTADGSEFEKRTADGSEFESPKKKAKVE

SEQ ID NO: 842 - protein, 2091 aa, synthetic construct
  source 1..2091: note = Description of Artificial Sequence: Synthetic polypeptide
MPAAKRVKLDGGDKKYSIGLDIGTNSVGWAVITDEYKVPSKKFKVLGNTDRHSIKKNLIGALLFDSGETAEATRLKRTARRRYTRRKNRICYLQEIFSNEMAKVDDSFFHRLEESFLVEEDKKHERHPIFGNIVDEVAYHEKYPTIYHLRKKLVDSTDKADLRLIYLALAHMIKFRGHFLIEGDLNPDNSDVDKLFIQLVQTYNQLFEENPINASGVDAKAILSARLSKSRRLENLIAQLPGEKKNGLFGNLIALSLGLTPNFKSNFDLAEDAKLQLSKDTYDDDLDNLLAQIGDQYADLFLAAKNLSDAILLSDILRVNTEITKAPLSASMIKRYDEHHQDLTLLKALVRQQLPEKYKEIFFDQSKNGYAGYIDGGASQEEFYKFIKPILEKMDGTEELLVKLNREDLLRKQRTFDNGSIPHQIHLGELHAILRRQEDFYPFLKDNREKIEKILTFRIPYYVGPLARGNSRFAWMTRKSEETITPWNFEEVVDKGASAQSFIERMTNFDKNLPNEKVLPKHSLLYEYFTVYNELTKVKYVTEGMRKPAFLSGEQKKAIVDLLFKTNRKVTVKQLKEDYFKKIECFDSVEISGVEDRFNASLGTYHDLLKIIKDKDFLDNEENEDILEDIVLTLTLFEDREMIEERLKTYAHLFDDKVMKQLKRRRYTGWGRLSRKLINGIRDKQSGKTILDFLKSDGFANRNFMQLIHDDSLTFKEDIQKAQVSGQGDSLHEHIANLAGSPAIKKGILQTVKVVDELVKVMGRHKPENIVIEMARENQTTQKGQKNSRERMKRIEEGIKELGSQILKEHPVENTQLQNEKLYLYYLQNGRDMYVDQELDINRLSDYDVDHIVPQSFLKDDSIDNKVLTRSDKARGKSDNVPSEEVVKKMKNYWRQLLNAKLITQRKFDNLTKAERGGLSELDKAGFIKRQLVETRQITKHVAQILDSRMNTKYDENDKLIREVKVITLKSKLVSDFRKDFQFYKVREINNYHHAHDAYLNAVVGTALIKKYPKLESEFVYGDYKVYDVRKMIAKSEQEIGKATAKYFFYSNIMNFFKTEITLANGEIRKRPLIETNGETGEIVWDKGRDFATVRKVLSMPQVNIVKKTEVQTGGFSKESILPKRNSDKLIARKKDWDPKKYGGFDSPTVAYSVLVVAKVEKGKSKKLKSVKELLGITIMERSSFEKNPIDFLEAKGYKEVKKDLIIKLPKYSLFELENGRKRMLASAGELQKGNELALPSKYVNFLYLASHYEKLKGSPEDNEQKQLFVEQHKHYLDEIIEQISEFSKRVILADANLDKVLSAYNKHRDKPIREQAENIIHLFTLTNLGAPAAFKYFDTTIDRKRYTSTKEVLDATLIHQSITGLYETRIDLSQLGGDGGGGGGGGGGGGVLNLEEEYRLHEKPVPSSIDPSWLQLFPTVWAERAGMGLANQVPPVVVELRSGASPVAVRQYPMSKEAREGIRPHIQRFLDLGVLVPCQSPWNTPLLPVKKPGTNDYRPVQDLREINKRVQDIHPTVPNPYNLLSSLPPSHTWYSVLDLKDAFFCLKLHPNSQPLFAFEWRDPEKGNTGQLTWTRLPQGFKNSPTLFNEALHRDLAPFRALNPQVVLLQYVDDLLVAAPTYRDCKEGTQKLLQELSKLGYRVSAKKAQLCQKEVTYLGYLLKEGKRWLTPARKATVMKIPPPTTPRQVREFLGTAGFCRLWIPGFASLAAPLYPLTKPSIPFIWTEEHQKAFDRIKEALLSAPALALPDLTKPFTLYVDERAGVARGVLTQTLGPWRRPVAYLSKKLDPVASGWPTCLKAVAAVALLLKDADKLTLGQNVTVIASHSLESIVRQPPDRWMTNARMTHYQSLLLNERVSFAPPAVLNPATLLPVESEATPVHRCSEILAEETGTRRDLKDQPLPGVPAWYTDGSSFIAEGKRRAGAAIVDGKRTVWASSLPEGTSAQKAELVALTQALRLAEGKDINIYTDSRYAFATAHIHGAIYKQRGWLTSAGKDIKNKEEILALLEAIHLPKRVAIIHCPGHQKGNDPVATGNRRADEAAKQAALSTRVLAETTKPAGKRTADGSEFEKRTADGSEFESPKKKAKVE

SEQ ID NO: 843 - protein, 2103 aa, synthetic construct
  source 1..2103: note = Description of Artificial Sequence: Synthetic polypeptide
MPAAKRVKLDGGDKKYSIGLDIGTNSVGWAVITDEYKVPSKKFKVLGNTDRHSIKKNLIGALLFDSGETAEATRLKRTARRRYTRRKNRICYLQEIFSNEMAKVDDSFFHRLEESFLVEEDKKHERHPIFGNIVDEVAYHEKYPTIYHLRKKLVDSTDKADLRLIYLALAHMIKFRGHFLIEGDLNPDNSDVDKLFIQLVQTYNQLFEENPINASGVDAKAILSARLSKSRRLENLIAQLPGEKKNGLFGNLIALSLGLTPNFKSNFDLAEDAKLQLSKDTYDDDLDNLLAQIGDQYADLFLAAKNLSDAILLSDILRVNTEITKAPLSASMIKRYDEHHQDLTLLKALVRQQLPEKYKEIFFDQSKNGYAGYIDGGASQEEFYKFIKPILEKMDGTEELLVKLNREDLLRKQRTFDNGSIPHQIHLGELHAILRRQEDFYPFLKDNREKIEKILTFRIPYYVGPLARGNSRFAWMTRKSEETITPWNFEEVVDKGASAQSFIERMTNFDKNLPNEKVLPKHSLLYEYFTVYNELTKVKYVTEGMRKPAFLSGEQKKAIVDLLFKTNRKVTVKQLKEDYFKKIECFDSVEISGVEDRFNASLGTYHDLLKIIKDKDFLDNEENEDILEDIVLTLTLFEDREMIEERLKTYAHLFDDKVMKQLKRRRYTGWGRLSRKLINGIRDKQSGKTILDFLKSDGFANRNFMQLIHDDSLTFKEDIQKAQVSGQGDSLHEHIANLAGSPAIKKGILQTVKVVDELVKVMGRHKPENIVIEMARENQTTQKGQKNSRERMKRIEEGIKELGSQILKEHPVENTQLQNEKLYLYYLQNGRDMYVDQELDINRLSDYDVDHIVPQSFLKDDSIDNKVLTRSDKARGKSDNVPSEEVVKKMKNYWRQLLNAKLITQRKFDNLTKAERGGLSELDKAGFIKRQLVETRQITKHVAQILDSRMNTKYDENDKLIREVKVITLKSKLVSDFRKDFQFYKVREINNYHHAHDAYLNAVVGTALIKKYPKLESEFVYGDYKVYDVRKMIAKSEQEIGKATAKYFFYSNIMNFFKTEITLANGEIRKRPLIETNGETGEIVWDKGRDFATVRKVLSMPQVNIVKKTEVQTGGFSKESILPKRNSDKLIARKKDWDPKKYGGFDSPTVAYSVLVVAKVEKGKSKKLKSVKELLGITIMERSSFEKNPIDFLEAKGYKEVKKDLIIKLPKYSLFELENGRKRMLASAGELQKGNELALPSKYVNFLYLASHYEKLKGSPEDNEQKQLFVEQHKHYLDEIIEQISEFSKRVILADANLDKVLSAYNKHRDKPIREQAENIIHLFTLTNLGAPAAFKYFDTTIDRKRYTSTKEVLDATLIHQSITGLYETRIDLSQLGGDGGGGGGSGGGGSGGGGSGGGGSGGVLNLEEEYRLHEKPVPSSIDPSWLQLFPTVWAERAGMGLANQVPPVVVELRSGASPVAVRQYPMSKEAREGIRPHIQRFLDLGVLVPCQSPWNTPLLPVKKPGTNDYRPVQDLREINKRVQDIHPTVPNPYNLLSSLPPSHTWYSVLDLKDAFFCLKLHPNSQPLFAFEWRDPEKGNTGQLTWTRLPQGFKNSPTLFNEALHRDLAPFRALNPQVVLLQYVDDLLVAAPTYRDCKEGTQKLLQELSKLGYRVSAKKAQLCQKEVTYLGYLLKEGKRWLTPARKATVMKIPPPTTPRQVREFLGTAGFCRLWIPGFASLAAPLYPLTKPSIPFIWTEEHQKAFDRIKEALLSAPALALPDLTKPFTLYVDERAGVARGVLTQTLGPWRRPVAYLSKKLDPVASGWPTCLKAVAAVALLLKDADKLTLGQNVTVIASHSLESIVRQPPDRWMTNARMTHYQSLLLNERVSFAPPAVLNPATLLPVESEATPVHRCSEILAEETGTRRDLKDQPLPGVPAWYTDGSSFIAEGKRRAGAAIVDGKRTVWASSLPEGTSAQKAELVALTQALRLAEGKDINIYTDSRYAFATAHIHGAIYKQRGWLTSAGKDIKNKEEILALLEAIHLPKRVAIIHCPGHQKGNDPVATGNRRADEAAKQAALSTRVLAETTKPAGKRTADGSEFEKRTADGSEFESPKKKAKVE

SEQ ID NO: 844 - protein, 2094 aa, synthetic construct
  source 1..2094: note = Description of Artificial Sequence: Synthetic polypeptide
MPAAKRVKLDGGDKKYSIGLDIGTNSVGWAVITDEYKVPSKKFKVLGNTDRHSIKKNLIGALLFDSGETAEATRLKRTARRRYTRRKNRICYLQEIFSNEMAKVDDSFFHRLEESFLVEEDKKHERHPIFGNIVDEVAYHEKYPTIYHLRKKLVDSTDKADLRLIYLALAHMIKFRGHFLIEGDLNPDNSDVDKLFIQLVQTYNQLFEENPINASGVDAKAILSARLSKSRRLENLIAQLPGEKKNGLFGNLIALSLGLTPNFKSNFDLAEDAKLQLSKDTYDDDLDNLLAQIGDQYADLFLAAKNLSDAILLSDILRVNTEITKAPLSASMIKRYDEHHQDLTLLKALVRQQLPEKYKEIFFDQSKNGYAGYIDGGASQEEFYKFIKPILEKMDGTEELLVKLNREDLLRKQRTFDNGSIPHQIHLGELHAILRRQEDFYPFLKDNREKIEKILTFRIPYYVGPLARGNSRFAWMTRKSEETITPWNFEEVVDKGASAQSFIERMTNFDKNLPNEKVLPKHSLLYEYFTVYNELTKVKYVTEGMRKPAFLSGEQKKAIVDLLFKTNRKVTVKQLKEDYFKKIECFDSVEISGVEDRFNASLGTYHDLLKIIKDKDFLDNEENEDILEDIVLTLTLFEDREMIEERLKTYAHLFDDKVMKQLKRRRYTGWGRLSRKLINGIRDKQSGKTILDFLKSDGFANRNFMQLIHDDSLTFKEDIQKAQVSGQGDSLHEHIANLAGSPAIKKGILQTVKVVDELVKVMGRHKPENIVIEMARENQTTQKGQKNSRERMKRIEEGIKELGSQILKEHPVENTQLQNEKLYLYYLQNGRDMYVDQELDINRLSDYDVDHIVPQSFLKDDSIDNKVLTRSDKARGKSDNVPSEEVVKKMKNYWRQLLNAKLITQRKFDNLTKAERGGLSELDKAGFIKRQLVETRQITKHVAQILDSRMNTKYDENDKLIREVKVITLKSKLVSDFRKDFQFYKVREINNYHHAHDAYLNAVVGTALIKKYPKLESEFVYGDYKVYDVRKMIAKSEQEIGKATAKYFFYSNIMNFFKTEITLANGEIRKRPLIETNGETGEIVWDKGRDFATVRKVLSMPQVNIVKKTEVQTGGFSKESILPKRNSDKLIARKKDWDPKKYGGFDSPTVAYSVLVVAKVEKGKSKKLKSVKELLGITIMERSSFEKNPIDFLEAKGYKEVKKDLIIKLPKYSLFELENGRKRMLASAGELQKGNELALPSKYVNFLYLASHYEKLKGSPEDNEQKQLFVEQHKHYLDEIIEQISEFSKRVILADANLDKVLSAYNKHRDKPIREQAENIIHLFTLTNLGAPAAFKYFDTTIDRKRYTSTKEVLDATLIHQSITGLYETRIDLSQLGGDGGGGSEAAAKPAPGGVLNLEEEYRLHEKPVPSSIDPSWLQLFPTVWAERAGMGLANQVPPVVVELRSGASPVAVRQYPMSKEAREGIRPHIQRFLDLGVLVPCQSPWNTPLLPVKKPGTNDYRPVQDLREINKRVQDIHPTVPNPYNLLSSLPPSHTWYSVLDLKDAFFCLKLHPNSQPLFAFEWRDPEKGNTGQLTWTRLPQGFKNSPTLFNEALHRDLAPFRALNPQVVLLQYVDDLLVAAPTYRDCKEGTQKLLQELSKLGYRVSAKKAQLCQKEVTYLGYLLKEGKRWLTPARKATVMKIPPPTTPRQVREFLGTAGFCRLWIPGFASLAAPLYPLTKPSIPFIWTEEHQKAFDRIKEALLSAPALALPDLTKPFTLYVDERAGVARGVLTQTLGPWRRPVAYLSKKLDPVASGWPTCLKAVAAVALLLKDADKLTLGQNVTVIASHSLESIVRQPPDRWMTNARMTHYQSLLLNERVSFAPPAVLNPATLLPVESEATPVHRCSEILAEETGTRRDLKDQPLPGVPAWYTDGSSFIAEGKRRAGAAIVDGKRTVWASSLPEGTSAQKAELVALTQALRLAEGKDINIYTDSRYAFATAHIHGAIYKQRGWLTSAGKDIKNKEEILALLEAIHLPKRVAIIHCPGHQKGNDPVATGNRRADEAAKQAALSTRVLAETTKPAGKRTADGSEFEKRTADGSEFESPKKKAKVE

SEQ ID NO: 845 - protein, 2092 aa, synthetic construct
  source 1..2092: note = Description of Artificial Sequence: Synthetic polypeptide
MPAAKRVKLDGGDKKYSIGLDIGTNSVGWAVITDEYKVPSKKFKVLGNTDRHSIKKNLIGALLFDSGETAEATRLKRTARRRYTRRKNRICYLQEIFSNEMAKVDDSFFHRLEESFLVEEDKKHERHPIFGNIVDEVAYHEKYPTIYHLRKKLVDSTDKADLRLIYLALAHMIKFRGHFLIEGDLNPDNSDVDKLFIQLVQTYNQLFEENPINASGVDAKAILSARLSKSRRLENLIAQLPGEKKNGLFGNLIALSLGLTPNFKSNFDLAEDAKLQLSKDTYDDDLDNLLAQIGDQYADLFLAAKNLSDAILLSDILRVNTEITKAPLSASMIKRYDEHHQDLTLLKALVRQQLPEKYKEIFFDQSKNGYAGYIDGGASQEEFYKFIKPILEKMDGTEELLVKLNREDLLRKQRTFDNGSIPHQIHLGELHAILRRQEDFYPFLKDNREKIEKILTFRIPYYVGPLARGNSRFAWMTRKSEETITPWNFEEVVDKGASAQSFIERMTNFDKNLPNEKVLPKHSLLYEYFTVYNELTKVKYVTEGMRKPAFLSGEQKKAIVDLLFKTNRKVTVKQLKEDYFKKIECFDSVEISGVEDRFNASLGTYHDLLKIIKDKDFLDNEENEDILEDIVLTLTLFEDREMIEERLKTYAHLFDDKVMKQLKRRRYTGWGRLSRKLINGIRDKQSGKTILDFLKSDGFANRNFMQLIHDDSLTFKEDIQKAQVSGQGDSLHEHIANLAGSPAIKKGILQTVKVVDELVKVMGRHKPENIVIEMARENQTTQKGQKNSRERMKRIEEGIKELGSQILKEHPVENTQLQNEKLYLYYLQNGRDMYVDQELDINRLSDYDVDHIVPQSFLKDDSIDNKVLTRSDKARGKSDNVPSEEVVKKMKNYWRQLLNAKLITQRKFDNLTKAERGGLSELDKAGFIKRQLVETRQITKHVAQILDSRMNTKYDENDKLIREVKVITLKSKLVSDFRKDFQFYKVREINNYHHAHDAYLNAVVGTALIKKYPKLESEFVYGDYKVYDVRKMIAKSEQEIGKATAKYFFYSNIMNFFKTEITLANGEIRKRPLIETNGETGEIVWDKGRDFATVRKVLSMPQVNIVKKTEVQTGGFSKESILPKRNSDKLIARKKDWDPKKYGGFDSPTVAYSVLVVAKVEKGKSKKLKSVKELLGITIMERSSFEKNPIDFLEAKGYKEVKKDLIIKLPKYSLFELENGRKRMLASAGELQKGNELALPSKYVNFLYLASHYEKLKGSPEDNEQKQLFVEQHKHYLDEIIEQISEFSKRVILADANLDKVLSAYNKHRDKPIREQAENIIHLFTLTNLGAPAAFKYFDTTIDRKRYTSTKEVLDATLIHQSITGLYETRIDLSQLGGDGGGSSPAPGGGGGVLNLEEEYRLHEKPVPSSIDPSWLQLFPTVWAERAGMGLANQVPPVVVELRSGASPVAVRQYPMSKEAREGIRPHIQRFLDLGVLVPCQSPWNTPLLPVKKPGTNDYRPVQDLREINKRVQDIHPTVPNPYNLLSSLPPSHTWYSVLDLKDAFFCLKLHPNSQPLFAFEWRDPEKGNTGQLTWTRLPQGFKNSPTLFNEALHRDLAPFRALNPQVVLLQYVDDLLVAAPTYRDCKEGTQKLLQELSKLGYRVSAKKAQLCQKEVTYLGYLLKEGKRWLTPARKATVMKIPPPTTPRQVREFLGTAGFCRLWIPGFASLAAPLYPLTKPSIPFIWTEEHQKAFDRIKEALLSAPALALPDLTKPFTLYVDERAGVARGVLTQTLGPWRRPVAYLSKKLDPVASGWPTCLKAVAAVALLLKDADKLTLGQNVTVIASHSLESIVRQPPDRWMTNARMTHYQSLLLNERVSFAPPAVLNPATLLPVESEATPVHRCSEILAEETGTRRDLKDQPLPGVPAWYTDGSSFIAEGKRRAGAAIVDGKRTVWASSLPEGTSAQKAELVALTQALRLAEGKDINIYTDSRYAFATAHIHGAIYKQRGWLTSAGKDIKNKEEILALLEAIHLPKRVAIIHCPGHQKGNDPVATGNRRADEAAKQAALSTRVLAETTKPAGKRTADGSEFEKRTADGSEFESPKKKAKVE

SEQ ID NO: 846 - protein, 2095 aa, synthetic construct
  source 1..2095: note = Description of Artificial Sequence: Synthetic polypeptide
MPAAKRVKLDGGDKKYSIGLDIGTNSVGWAVITDEYKVPSKKFKVLGNTDRHSIKKNLIGALLFDSGETAEATRLKRTARRRYTRRKNRICYLQEIFSNEMAKVDDSFFHRLEESFLVEEDKKHERHPIFGNIVDEVAYHEKYPTIYHLRKKLVDSTDKADLRLIYLALAHMIKFRGHFLIEGDLNPDNSDVDKLFIQLVQTYNQLFEENPINASGVDAKAILSARLSKSRRLENLIAQLPGEKKNGLFGNLIALSLGLTPNFKSNFDLAEDAKLQLSKDTYDDDLDNLLAQIGDQYADLFLAAKNLSDAILLSDILRVNTEITKAPLSASMIKRYDEHHQDLTLLKALVRQQLPEKYKEIFFDQSKNGYAGYIDGGASQEEFYKFIKPILEKMDGTEELLVKLNREDLLRKQRTFDNGSIPHQIHLGELHAILRRQEDFYPFLKDNREKIEKILTFRIPYYVGPLARGNSRFAWMTRKSEETITPWNFEEVVDKGASAQSFIERMTNFDKNLPNEKVLPKHSLLYEYFTVYNELTKVKYVTEGMRKPAFLSGEQKKAIVDLLFKTNRKVTVKQLKEDYFKKIECFDSVEISGVEDRFNASLGTYHDLLKIIKDKDFLDNEENEDILEDIVLTLTLFEDREMIEERLKTYAHLFDDKVMKQLKRRRYTGWGRLSRKLINGIRDKQSGKTILDFLKSDGFANRNFMQLIHDDSLTFKEDIQKAQVSGQGDSLHEHIANLAGSPAIKKGILQTVKVVDELVKVMGRHKPENIVIEMARENQTTQKGQKNSRERMKRIEEGIKELGSQILKEHPVENTQLQNEKLYLYYLQNGRDMYVDQELDINRLSDYDVDHIVPQSFLKDDSIDNKVLTRSDKARGKSDNVPSEEVVKKMKNYWRQLLNAKLITQRKFDNLTKAERGGLSELDKAGFIKRQLVETRQITKHVAQILDSRMNTKYDENDKLIREVKVITLKSKLVSDFRKDFQFYKVREINNYHHAHDAYLNAVVGTALIKKYPKLESEFVYGDYKVYDVRKMIAKSEQEIGKATAKYFFYSNIMNFFKTEITLANGEIRKRPLIETNGETGEIVWDKGRDFATVRKVLSMPQVNIVKKTEVQTGGFSKESILPKRNSDKLIARKKDWDPKKYGGFDSPTVAYSVLVVAKVEKGKSKKLKSVKELLGITIMERSSFEKNPIDFLEAKGYKEVKKDLIIKLPKYSLFELENGRKRMLASAGELQKGNELALPSKYVNFLYLASHYEKLKGSPEDNEQKQLFVEQHKHYLDEIIEQISEFSKRVILADANLDKVLSAYNKHRDKPIREQAENIIHLFTLTNLGAPAAFKYFDTTIDRKRYTSTKEVLDATLIHQSITGLYETRIDLSQLGGDGGGSSGSSGSSGSSGGVLNLEEEYRLHEKPVPSSIDPSWLQLFPTVWAERAGMGLANQVPPVVVELRSGASPVAVRQYPMSKEAREGIRPHIQRFLDLGVLVPCQSPWNTPLLPVKKPGTNDYRPVQDLREINKRVQDIHPTVPNPYNLLSSLPPSHTWYSVLDLKDAFFCLKLHPNSQPLFAFEWRDPEKGNTGQLTWTRLPQGFKNSPTLFNEALHRDLAPFRALNPQVVLLQYVDDLLVAAPTYRDCKEGTQKLLQELSKLGYRVSAKKAQLCQKEVTYLGYLLKEGKRWLTPARKATVMKIPPPTTPRQVREFLGTAGFCRLWIPGFASLAAPLYPLTKPSIPFIWTEEHQKAFDRIKEALLSAPALALPDLTKPFTLYVDERAGVARGVLTQTLGPWRRPVAYLSKKLDPVASGWPTCLKAVAAVALLLKDADKLTLGQNVTVIASHSLESIVRQPPDRWMTNARMTHYQSLLLNERVSFAPPAVLNPATLLPVESEATPVHRCSEILAEETGTRRDLKDQPLPGVPAWYTDGSSFIAEGKRRAGAAIVDGKRTVWASSLPEGTSAQKAELVALTQALRLAEGKDINIYTDSRYAFATAHIHGAIYKQRGWLTSAGKDIKNKEEILALLEAIHLPKRVAIIHCPGHQKGNDPVATGNRRADEAAKQAALSTRVLAETTKPAGKRTADGSEFEKRTADGSEFESPKKKAKVE

SEQ ID NO: 847 - protein, 2094 aa, synthetic construct
  source 1..2094: note = Description of Artificial Sequence: Synthetic polypeptide
MPAAKRVKLDGGDKKYSIGLDIGTNSVGWAVITDEYKVPSKKFKVLGNTDRHSIKKNLIGALLFDSGETAEATRLKRTARRRYTRRKNRICYLQEIFSNEMAKVDDSFFHRLEESFLVEEDKKHERHPIFGNIVDEVAYHEKYPTIYHLRKKLVDSTDKADLRLIYLALAHMIKFRGHFLIEGDLNPDNSDVDKLFIQLVQTYNQLFEENPINASGVDAKAILSARLSKSRRLENLIAQLPGEKKNGLFGNLIALSLGLTPNFKSNFDLAEDAKLQLSKDTYDDDLDNLLAQIGDQYADLFLAAKNLSDAILLSDILRVNTEITKAPLSASMIKRYDEHHQDLTLLKALVRQQLPEKYKEIFFDQSKNGYAGYIDGGASQEEFYKFIKPILEKMDGTEELLVKLNREDLLRKQRTFDNGSIPHQIHLGELHAILRRQEDFYPFLKDNREKIEKILTFRIPYYVGPLARGNSRFAWMTRKSEETITPWNFEEVVDKGASAQSFIERMTNFDKNLPNEKVLPKHSLLYEYFTVYNELTKVKYVTEGMRKPAFLSGEQKKAIVDLLFKTNRKVTVKQLKEDYFKKIECFDSVEISGVEDRFNASLGTYHDLLKIIKDKDFLDNEENEDILEDIVLTLTLFEDREMIEERLKTYAHLFDDKVMKQLKRRRYTGWGRLSRKLINGIRDKQSGKTILDFLKSDGFANRNFMQLIHDDSLTFKEDIQKAQVSGQGDSLHEHIANLAGSPAIKKGILQTVKVVDELVKVMGRHKPENIVIEMARENQTTQKGQKNSRERMKRIEEGIKELGSQILKEHPVENTQLQNEKLYLYYLQNGRDMYVDQELDINRLSDYDVDHIVPQSFLKDDSIDNKVLTRSDKARGKSDNVPSEEVVKKMKNYWRQLLNAKLITQRKFDNLTKAERGGLSELDKAGFIKRQLVETRQITKHVAQILDSRMNTKYDENDKLIREVKVITLKSKLVSDFRKDFQFYKVREINNYHHAHDAYLNAVVGTALIKKYPKLESEFVYGDYKVYDVRKMIAKSEQEIGKATAKYFFYSNIMNFFKTEITLANGEIRKRPLIETNGETGEIVWDKGRDFATVRKVLSMPQVNIVKKTEVQTGGFSKESILPKRNSDKLIARKKDWDPKKYGGFDSPTVAYSVLVVAKVEKGKSKKLKSVKELLGITIMERSSFEKNPIDFLEAKGYKEVKKDLIIKLPKYSLFELENGRKRMLASAGELQKGNELALPSKYVNFLYLASHYEKLKGSPEDNEQKQLFVEQHKHYLDEIIEQISEFSKRVILADANLDKVLSAYNKHRDKPIREQAENIIHLFTLTNLGAPAAFKYFDTTIDRKRYTSTKEVLDATLIHQSITGLYETRIDLSQLGGDGGPAPGGSEAAAKGGVLNLEEEYRLHEKPVPSSIDPSWLQLFPTVWAERAGMGLANQVPPVVVELRSGASPVAVRQYPMSKEAREGIRPHIQRFLDLGVLVPCQSPWNTPLLPVKKPGTNDYRPVQDLREINKRVQDIHPTVPNPYNLLSSLPPSHTWYSVLDLKDAFFCLKLHPNSQPLFAFEWRDPEKGNTGQLTWTRLPQGFKNSPTLFNEALHRDLAPFRALNPQVVLLQYVDDLLVAAPTYRDCKEGTQKLLQELSKLGYRVSAKKAQLCQKEVTYLGYLLKEGKRWLTPARKATVMKIPPPTTPRQVREFLGTAGFCRLWIPGFASLAAPLYPLTKPSIPFIWTEEHQKAFDRIKEALLSAPALALPDLTKPFTLYVDERAGVARGVLTQTLGPWRRPVAYLSKKLDPVASGWPTCLKAVAAVALLLKDADKLTLGQNVTVIASHSLESIVRQPPDRWMTNARMTHYQSLLLNERVSFAPPAVLNPATLLPVESEATPVHRCSEILAEETGTRRDLKDQPLPGVPAWYTDGSSFIAEGKRRAGAAIVDGKRTVWASSLPEGTSAQKAELVALTQALRLAEGKDINIYTDSRYAFATAHIHGAIYKQRGWLTSAGKDIKNKEEILALLEAIHLPKRVAIIHCPGHQKGNDPVATGNRRADEAAKQAALSTRVLAETTKPAGKRTADGSEFEKRTADGSEFESPKKKAKVE

SEQ ID NO: 848 - protein, 2088 aa, synthetic construct
  source 1..2088: note = Description of Artificial Sequence: Synthetic polypeptide
MPAAKRVKLDGGDKKYSIGLDIGTNSVGWAVITDEYKVPSKKFKVLGNTDRHSIKKNLIGALLFDSGETAEATRLKRTARRRYTRRKNRICYLQEIFSNEMAKVDDSFFHRLEESFLVEEDKKHERHPIFGNIVDEVAYHEKYPTIYHLRKKLVDSTDKADLRLIYLALAHMIKFRGHFLIEGDLNPDNSDVDKLFIQLVQTYNQLFEENPINASGVDAKAILSARLSKSRRLENLIAQLPGEKKNGLFGNLIALSLGLTPNFKSNFDLAEDAKLQLSKDTYDDDLDNLLAQIGDQYADLFLAAKNLSDAILLSDILRVNTEITKAPLSASMIKRYDEHHQDLTLLKALVRQQLPEKYKEIFFDQSKNGYAGYIDGGASQEEFYKFIKPILEKMDGTEELLVKLNREDLLRKQRTFDNGSIPHQIHLGELHAILRRQEDFYPFLKDNREKIEKILTFRIPYYVGPLARGNSRFAWMTRKSEETITPWNFEEVVDKGASAQSFIERMTNFDKNLPNEKVLPKHSLLYEYFTVYNELTKVKYVTEGMRKPAFLSGEQKKAIVDLLFKTNRKVTVKQLKEDYFKKIECFDSVEISGVEDRFNASLGTYHDLLKIIKDKDFLDNEENEDILEDIVLTLTLFEDREMIEERLKTYAHLFDDKVMKQLKRRRYTGWGRLSRKLINGIRDKQSGKTILDFLKSDGFANRNFMQLIHDDSLTFKEDIQKAQVSGQGDSLHEHIANLAGSPAIKKGILQTVKVVDELVKVMGRHKPENIVIEMARENQTTQKGQKNSRERMKRIEEGIKELGSQILKEHPVENTQLQNEKLYLYYLQNGRDMYVDQELDINRLSDYDVDHIVPQSFLKDDSIDNKVLTRSDKARGKSDNVPSEEVVKKMKNYWRQLLNAKLITQRKFDNLTKAERGGLSELDKAGFIKRQLVETRQITKHVAQILDSRMNTKYDENDKLIREVKVITLKSKLVSDFRKDFQFYKVREINNYHHAHDAYLNAVVGTALIKKYPKLESEFVYGDYKVYDVRKMIAKSEQEIGKATAKYFFYSNIMNFFKTEITLANGEIRKRPLIETNGETGEIVWDKGRDFATVRKVLSMPQVNIVKKTEVQTGGFSKESILPKRNSDKLIARKKDWDPKKYGGFDSPTVAYSVLVVAKVEKGKSKKLKSVKELLGITIMERSSFEKNPIDFLEAKGYKEVKKDLIIKLPKYSLFELENGRKRMLASAGELQKGNELALPSKYVNFLYLASHYEKLKGSPEDNEQKQLFVEQHKHYLDEIIEQISEFSKRVILADANLDKVLSAYNKHRDKPIREQAENIIHLFTLTNLGAPAAFKYFDTTIDRKRYTSTKEVLDATLIHQSITGLYETRIDLSQLGGDGGPAPAPGGVLNLEEEYRLHEKPVPSSIDPSWLQLFPTVWAERAGMGLANQVPPVVVELRSGASPVAVRQYPMSKEAREGIRPHIQRFLDLGVLVPCQSPWNTPLLPVKKPGTNDYRPVQDLREINKRVQDIHPTVPNPYNLLSSLPPSHTWYSVLDLKDAFFCLKLHPNSQPLFAFEWRDPEKGNTGQLTWTRLPQGFKNSPTLFNEALHRDLAPFRALNPQVVLLQYVDDLLVAAPTYRDCKEGTQKLLQELSKLGYRVSAKKAQLCQKEVTYLGYLLKEGKRWLTPARKATVMKIPPPTTPRQVREFLGTAGFCRLWIPGFASLAAPLYPLTKPSIPFIWTEEHQKAFDRIKEALLSAPALALPDLTKPFTLYVDERAGVARGVLTQTLGPWRRPVAYLSKKLDPVASGWPTCLKAVAAVALLLKDADKLTLGQNVTVIASHSLESIVRQPPDRWMTNARMTHYQSLLLNERVSFAPPAVLNPATLLPVESEATPVHRCSEILAEETGTRRDLKDQPLPGVPAWYTDGSSFIAEGKRRAGAAIVDGKRTVWASSLPEGTSAQKAELVALTQALRLAEGKDINIYTDSRYAFATAHIHGAIYKQRGWLTSAGKDIKNKEEILALLEAIHLPKRVAIIHCPGHQKGNDPVATGNRRADEAAKQAALSTRVLAETTKPAGKRTADGSEFEKRTADGSEFESPKKKAKVE

SEQ ID NO: 849 - protein, 2092 aa, synthetic construct
  source 1..2092: note = Description of Artificial Sequence: Synthetic polypeptide
MPAAKRVKLDGGDKKYSIGLDIGTNSVGWAVITDEYKVPSKKFKVLGNTDRHSIKKNLIGALLFDSGETAEATRLKRTARRRYTRRKNRICYLQEIFSNEMAKVDDSFFHRLEESFLVEEDKKHERHPIFGNIVDEVAYHEKYPTIYHLRKKLVDSTDKADLRLIYLALAHMIKFRGHFLIEGDLNPDNSDVDKLFIQLVQTYNQLFEENPINASGVDAKAILSARLSKSRRLENLIAQLPGEKKNGLFGNLIALSLGLTPNFKSNFDLAEDAKLQLSKDTYDDDLDNLLAQIGDQYADLFLAAKNLSDAILLSDILRVNTEITKAPLSASMIKRYDEHHQDLTLLKALVRQQLPEKYKEIFFDQSKNGYAGYIDGGASQEEFYKFIKPILEKMDGTEELLVKLNREDLLRKQRTFDNGSIPHQIHLGELHAILRRQEDFYPFLKDNREKIEKILTFRIPYYVGPLARGNSRFAWMTRKSEETITPWNFEEVVDKGASAQSFIERMTNFDKNLPNEKVLPKHSLLYEYFTVYNELTKVKYVTEGMRKPAFLSGEQKKAIVDLLFKTNRKVTVKQLKEDYFKKIECFDSVEISGVEDRFNASLGTYHDLLKIIKDKDFLDNEENEDILEDIVLTLTLFEDREMIEERLKTYAHLFDDKVMKQLKRRRYTGWGRLSRKLINGIRDKQSGKTILDFLKSDGFANRNFMQLIHDDSLTFKEDIQKAQVSGQGDSLHEHIANLAGSPAIKKGILQTVKVVDELVKVMGRHKPENIVIEMARENQTTQKGQKNSRERMKRIEEGIKELGSQILKEHPVENTQLQNEKLYLYYLQNGRDMYVDQELDINRLSDYDVDHIVPQSFLKDDSIDNKVLTRSDKARGKSDNVPSEEVVKKMKNYWRQLLNAKLITQRKFDNLTKAERGGLSELDKAGFIKRQLVETRQITKHVAQILDSRMNTKYDENDKLIREVKVITLKSKLVSDFRKDFQFYKVREINNYHHAHDAYLNAVVGTALIKKYPKLESEFVYGDYKVYDVRKMIAKSEQEIGKATAKYFFYSNIMNFFKTEITLANGEIRKRPLIETNGETGEIVWDKGRDFATVRKVLSMPQVNIVKKTEVQTGGFSKESILPKRNSDKLIARKKDWDPKKYGGFDSPTVAYSVLVVAKVEKGKSKKLKSVKELLGITIMERSSFEKNPIDFLEAKGYKEVKKDLIIKLPKYSLFELENGRKRMLASAGELQKGNELALPSKYVNFLYLASHYEKLKGSPEDNEQKQLFVEQHKHYLDEIIEQISEFSKRVILADANLDKVLSAYNKHRDKPIREQAENIIHLFTLTNLGAPAAFKYFDTTIDRKRYTSTKEVLDATLIHQSITGLYETRIDLSQLGGDGGGSSGGGGGSGGVLNLEEEYRLHEKPVPSSIDPSWLQLFPTVWAERAGMGLANQVPPVVVELRSGASPVAVRQYPMSKEAREGIRPHIQRFLDLGVLVPCQSPWNTPLLPVKKPGTNDYRPVQDLREINKRVQDIHPTVPNPYNLLSSLPPSHTWYSVLDLKDAFFCLKLHPNSQPLFAFEWRDPEKGNTGQLTWTRLPQGFKNSPTLFNEALHRDLAPFRALNPQVVLLQYVDDLLVAAPTYRDCKEGTQKLLQELSKLGYRVSAKKAQLCQKEVTYLGYLLKEGKRWLTPARKATVMKIPPPTTPRQVREFLGTAGFCRLWIPGFASLAAPLYPLTKPSIPFIWTEEHQKAFDRIKEALLSAPALALPDLTKPFTLYVDERAGVARGVLTQTLGPWRRPVAYLSKKLDPVASGWPTCLKAVAAVALLLKDADKLTLGQNVTVIASHSLESIVRQPPDRWMTNARMTHYQSLLLNERVSFAPPAVLNPATLLPVESEATPVHRCSEILAEETGTRRDLKDQPLPGVPAWYTDGSSFIAEGKRRAGAAIVDGKRTVWASSLPEGTSAQKAELVALTQALRLAEGKDINIYTDSRYAFATAHIHGAIYKQRGWLTSAGKDIKNKEEILALLEAIHLPKRVAIIHCPGHQKGNDPVATGNRRADEAAKQAALSTRVLAETTKPAGKRTADGSEFEKRTADGSEFESPKKKAKVE

SEQ ID NO: 850 - protein, 2092 aa, synthetic construct
  source 1..2092: note = Description of Artificial Sequence: Synthetic polypeptide
MPAAKRVKLDGGDKKYSIGLDIGTNSVGWAVITDEYKVPSKKFKVLGNTDRHSIKKNLIGALLFDSGETAEATRLKRTARRRYTRRKNRICYLQEIFSNEMAKVDDSFFHRLEESFLVEEDKKHERHPIFGNIVDEVAYHEKYPTIYHLRKKLVDSTDKADLRLIYLALAHMIKFRGHFLIEGDLNPDNSDVDKLFIQLVQTYNQLFEENPINASGVDAKAILSARLSKSRRLENLIAQLPGEKKNGLFGNLIALSLGLTPNFKSNFDLAEDAKLQLSKDTYDDDLDNLLAQIGDQYADLFLAAKNLSDAILLSDILRVNTEITKAPLSASMIKRYDEHHQDLTLLKALVRQQLPEKYKEIFFDQSKNGYAGYIDGGASQEEFYKFIKPILEKMDGTEELLVKLNREDLLRKQRTFDNGSIPHQIHLGELHAILRRQEDFYPFLKDNREKIEKILTFRIPYYVGPLARGNSRFAWMTRKSEETITPWNFEEVVDKGASAQSFIERMTNFDKNLPNEKVLPKHSLLYEYFTVYNELTKVKYVTEGMRKPAFLSGEQKKAIVDLLFKTNRKVTVKQLKEDYFKKIECFDSVEISGVEDRFNASLGTYHDLLKIIKDKDFLDNEENEDILEDIVLTLTLFEDREMIEERLKTYAHLFDDKVMKQLKRRRYTGWGRLSRKLINGIRDKQSGKTILDFLKSDGFANRNFMQLIHDDSLTFKEDIQKAQVSGQGDSLHEHIANLAGSPAIKKGILQTVKVVDELVKVMGRHKPENIVIEMARENQTTQKGQKNSRERMKRIEEGIKELGSQILKEHPVENTQLQNEKLYLYYLQNGRDMYVDQELDINRLSDYDVDHIVPQSFLKDDSIDNKVLTRSDKARGKSDNVPSEEVVKKMKNYWRQLLNAKLITQRKFDNLTKAERGGLSELDKAGFIKRQLVETRQITKHVAQILDSRMNTKYDENDKLIREVKVITLKSKLVSDFRKDFQFYKVREINNYHHAHDAYLNAVVGTALIKKYPKLESEFVYGDYKVYDVRKMIAKSEQEIGKATAKYFFYSNIMNFFKTEITLANGEIRKRPLIETNGETGEIVWDKGRDFATVRKVLSMPQVNIVKKTEVQTGGFSKESILPKRNSDKLIARKKDWDPKKYGGFDSPTVAYSVLVVAKVEKGKSKKLKSVKELLGITIMERSSFEKNPIDFLEAKGYKEVKKDLIIKLPKYSLFELENGRKRMLASAGELQKGNELALPSKYVNFLYLASHYEKLKGSPEDNEQKQLFVEQHKHYLDEIIEQISEFSKRVILADANLDKVLSAYNKHRDKPIREQAENIIHLFTLTNLGAPAAFKYFDTTIDRKRYTSTKEVLDATLIHQSITGLYETRIDLSQLGGDGGGGSGGSGGSGGVLNLEEEYRLHEKPVPSSIDPSWLQLFPTVWAERAGMGLANQVPPVVVELRSGASPVAVRQYPMSKEAREGIRPHIQRFLDLGVLVPCQSPWNTPLLPVKKPGTNDYRPVQDLREINKRVQDIHPTVPNPYNLLSSLPPSHTWYSVLDLKDAFFCLKLHPNSQPLFAFEWRDPEKGNTGQLTWTRLPQGFKNSPTLFNEALHRDLAPFRALNPQVVLLQYVDDLLVAAPTYRDCKEGTQKLLQELSKLGYRVSAKKAQLCQKEVTYLGYLLKEGKRWLTPARKATVMKIPPPTTPRQVREFLGTAGFCRLWIPGFASLAAPLYPLTKPSIPFIWTEEHQKAFDRIKEALLSAPALALPDLTKPFTLYVDERAGVARGVLTQTLGPWRRPVAYLSKKLDPVASGWPTCLKAVAAVALLLKDADKLTLGQNVTVIASHSLESIVRQPPDRWMTNARMTHYQSLLLNERVSFAPPAVLNPATLLPVESEATPVHRCSEILAEETGTRRDLKDQPLPGVPAWYTDGSSFIAEGKRRAGAAIVDGKRTVWASSLPEGTSAQKAELVALTQALRLAEGKDINIYTDSRYAFATAHIHGAIYKQRGWLTSAGKDIKNKEEILALLEAIHLPKRVAIIHCPGHQKGNDPVATGNRRADEAAKQAALSTRVLAETTKPAGKRTADGSEFEKRTADGSEFESPKKKAKVE

SEQ ID NO: 851 - protein, 2086 aa, synthetic construct
  source 1..2086: note = Description of Artificial Sequence: Synthetic polypeptide
MPAAKRVKLDGGDKKYSIGLDIGTNSVGWAVITDEYKVPSKKFKVLGNTDRHSIKKNLIGALLFDSGETAEATRLKRTARRRYTRRKNRICYLQEIFSNEMAKVDDSFFHRLEESFLVEEDKKHERHPIFGNIVDEVAYHEKYPTIYHLRKKLVDSTDKADLRLIYLALAHMIKFRGHFLIEGDLNPDNSDVDKLFIQLVQTYNQLFEENPINASGVDAKAILSARLSKSRRLENLIAQLPGEKKNGLFGNLIALSLGLTPNFKSNFDLAEDAKLQLSKDTYDDDLDNLLAQIGDQYADLFLAAKNLSDAILLSDILRVNTEITKAPLSASMIKRYDEHHQDLTLLKALVRQQLPEKYKEIFFDQSKNGYAGYIDGGASQEEFYKFIKPILEKMDGTEELLVKLNREDLLRKQRTFDNGSIPHQIHLGELHAILRRQEDFYPFLKDNREKIEKILTFRIPYYVGPLARGNSRFAWMTRKSEETITPWNFEEVVDKGASAQSFIERMTNFDKNLPNEKVLPKHSLLYEYFTVYNELTKVKYVTEGMRKPAFLSGEQKKAIVDLLFKTNRKVTVKQLKEDYFKKIECFDSVEISGVEDRFNASLGTYHDLLKIIKDKDFLDNEENEDILEDIVLTLTLFEDREMIEERLKTYAHLFDDKVMKQLKRRRYTGWGRLSRKLINGIRDKQSGKTILDFLKSDGFANRNFMQLIHDDSLTFKEDIQKAQVSGQGDSLHEHIANLAGSPAIKKGILQTVKVVDELVKVMGRHKPENIVIEMARENQTTQKGQKNSRERMKRIEEGIKELGSQILKEHPVENTQLQNEKLYLYYLQNGRDMYVDQELDINRLSDYDVDHIVPQSFLKDDSIDNKVLTRSDKARGKSDNVPSEEVVKKMKNYWRQLLNAKLITQRKFDNLTKAERGGLSELDKAGFIKRQLVETRQITKHVAQILDSRMNTKYDENDKLIREVKVITLKSKLVSDFRKDFQFYKVREINNYHHAHDAYLNAVVGTALIKKYPKLESEFVYGDYKVYDVRKMIAKSEQEIGKATAKYFFYSNIMNFFKTEITLANGEIRKRPLIETNGETGEIVWDKGRDFATVRKVLSMPQVNIVKKTEVQTGGFSKESILPKRNSDKLIARKKDWDPKKYGGFDSPTVAYSVLVVAKVEKGKSKKLKSVKELLGITIMERSSFEKNPIDFLEAKGYKEVKKDLIIKLPKYSLFELENGRKRMLASAGELQKGNELALPSKYVNFLYLASHYEKLKGSPEDNEQKQLFVEQHKHYLDEIIEQISEFSKRVILADANLDKVLSAYNKHRDKPIREQAENIIHLFTLTNLGAPAAFKYFDTTIDRKRYTSTKEVLDATLIHQSITGLYETRIDLSQLGGDGGGGSGGVLNLEEEYRLHEKPVPSSIDPSWLQLFPTVWAERAGMGLANQVPPVVVELRSGASPVAVRQYPMSKEAREGIRPHIQRFLDLGVLVPCQSPWNTPLLPVKKPGTNDYRPVQDLREINKRVQDIHPTVPNPYNLLSSLPPSHTWYSVLDLKDAFFCLKLHPNSQPLFAFEWRDPEKGNTGQLTWTRLPQGFKNSPTLFNEALHRDLAPFRALNPQVVLLQYVDDLLVAAPTYRDCKEGTQKLLQELSKLGYRVSAKKAQLCQKEVTYLGYLLKEGKRWLTPARKATVMKIPPPTTPRQVREFLGTAGFCRLWIPGFASLAAPLYPLTKPSIPFIWTEEHQKAFDRIKEALLSAPALALPDLTKPFTLYVDERAGVARGVLTQTLGPWRRPVAYLSKKLDPVASGWPTCLKAVAAVALLLKDADKLTLGQNVTVIASHSLESIVRQPPDRWMTNARMTHYQSLLLNERVSFAPPAVLNPATLLPVESEATPVHRCSEILAEETGTRRDLKDQPLPGVPAWYTDGSSFIAEGKRRAGAAIVDGKRTVWASSLPEGTSAQKAELVALTQALRLAEGKDINIYTDSRYAFATAHIHGAIYKQRGWLTSAGKDIKNKEEILALLEAIHLPKRVAIIHCPGHQKGNDPVATGNRRADEAAKQAALSTRVLAETTKPAGKRTADGSEFEKRTADGSEFESPKKKAKVE

SEQ ID NO: 852 - protein, 2091 aa, synthetic construct
  source 1..2091: note = Description of Artificial Sequence: Synthetic polypeptide
MPAAKRVKLDGGDKKYSIGLDIGTNSVGWAVITDEYKVPSKKFKVLGNTDRHSIKKNLIGALLFDSGETAEATRLKRTARRRYTRRKNRICYLQEIFSNEMAKVDDSFFHRLEESFLVEEDKKHERHPIFGNIVDEVAYHEKYPTIYHLRKKLVDSTDKADLRLIYLALAHMIKFRGHFLIEGDLNPDNSDVDKLFIQLVQTYNQLFEENPINASGVDAKAILSARLSKSRRLENLIAQLPGEKKNGLFGNLIALSLGLTPNFKSNFDLAEDAKLQLSKDTYDDDLDNLLAQIGDQYADLFLAAKNLSDAILLSDILRVNTEITKAPLSASMIKRYDEHHQDLTLLKALVRQQLPEKYKEIFFDQSKNGYAGYIDGGASQEEFYKFIKPILEKMDGTEELLVKLNREDLLRKQRTFDNGSIPHQIHLGELHAILRRQEDFYPFLKDNREKIEKILTFRIPYYVGPLARGNSRFAWMTRKSEETITPWNFEEVVDKGASAQSFIERMTNFDKNLPNEKVLPKHSLLYEYFTVYNELTKVKYVTEGMRKPAFLSGEQKKAIVDLLFKTNRKVTVKQLKEDYFKKIECFDSVEISGVEDRFNASLGTYHDLLKIIKDKDFLDNEENEDILEDIVLTLTLFEDREMIEERLKTYAHLFDDKVMKQLKRRRYTGWGRLSRKLINGIRDKQSGKTILDFLKSDGFANRNFMQLIHDDSLTFKEDIQKAQVSGQGDSLHEHIANLAGSPAIKKGILQTVKVVDELVKVMGRHKPENIVIEMARENQTTQKGQKNSRERMKRIEEGIKELGSQILKEHPVENTQLQNEKLYLYYLQNGRDMYVDQELDINRLSDYDVDHIVPQSFLKDDSIDNKVLTRSDKARGKSDNVPSEEVVKKMKNYWRQLLNAKLITQRKFDNLTKAERGGLSELDKAGFIKRQLVETRQITKHVAQILDSRMNTKYDENDKLIREVKVITLKSKLVSDFRKDFQFYKVREINNYHHAHDAYLNAVVGTALIKKYPKLESEFVYGDYKVYDVRKMIAKSEQEIGKATAKYFFYSNIMNFFKTEITLANGEIRKRPLIETNGETGEIVWDKGRDFATVRKVLSMPQVNIVKKTEVQTGGFSKESILPKRNSDKLIARKKDWDPKKYGGFDSPTVAYSVLVVAKVEKGKSKKLKSVKELLGITIMERSSFEKNPIDFLEAKGYKEVKKDLIIKLPKYSLFELENGRKRMLASAGELQKGNELALPSKYVNFLYLASHYEKLKGSPEDNEQKQLFVEQHKHYLDEIIEQISEFSKRVILADANLDKVLSAYNKHRDKPIREQAENIIHLFTLTNLGAPAAFKYFDTTIDRKRYTSTKEVLDATLIHQSITGLYETRIDLSQLGGDGGGGSEAAAKGGVLNLEEEYRLHEKPVPSSIDPSWLQLFPTVWAERAGMGLANQVPPVVVELRSGASPVAVRQYPMSKEAREGIRPHIQRFLDLGVLVPCQSPWNTPLLPVKKPGTNDYRPVQDLREINKRVQDIHPTVPNPYNLLSSLPPSHTWYSVLDLKDAFFCLKLHPNSQPLFAFEWRDPEKGNTGQLTWTRLPQGFKNSPTLFNEALHRDLAPFRALNPQVVLLQYVDDLLVAAPTYRDCKEGTQKLLQELSKLGYRVSAKKAQLCQKEVTYLGYLLKEGKRWLTPARKATVMKIPPPTTPRQVREFLGTAGFCRLWIPGFASLAAPLYPLTKPSIPFIWTEEHQKAFDRIKEALLSAPALALPDLTKPFTLYVDERAGVARGVLTQTLGPWRRPVAYLSKKLDPVASGWPTCLKAVAAVALLLKDADKLTLGQNVTVIASHSLESIVRQPPDRWMTNARMTHYQSLLLNERVSFAPPAVLNPATLLPVESEATPVHRCSEILAEETGTRRDLKDQPLPGVPAWYTDGSSFIAEGKRRAGAAIVDGKRTVWASSLPEGTSAQKAELVALTQALRLAEGKDINIYTDSRYAFATAHIHGAIYKQRGWLTSAGKDIKNKEEILALLEAIHLPKRVAIIHCPGHQKGNDPVATGNRRADEAAKQAALSTRVLAETTKPAGKRTADGSEFEKRTADGSEFESPKKKAKVE

SEQ ID NO: 853 - protein, 2094 aa, synthetic construct
  source 1..2094: note = Description of Artificial Sequence: Synthetic polypeptide
MPAAKRVKLDGGDKKYSIGLDIGTNSVGWAVITDEYKVPSKKFKVLGNTDRHSIKKNLIGALLFDSGETAEATRLKRTARRRYTRRKNRICYLQEIFSNEMAKVDDSFFHRLEESFLVEEDKKHERHPIFGNIVDEVAYHEKYPTIYHLRKKLVDSTDKADLRLIYLALAHMIKFRGHFLIEGDLNPDNSDVDKLFIQLVQTYNQLFEENPINASGVDAKAILSARLSKSRRLENLIAQLPGEKKNGLFGNLIALSLGLTPNFKSNFDLAEDAKLQLSKDTYDDDLDNLLAQIGDQYADLFLAAKNLSDAILLSDILRVNTEITKAPLSASMIKRYDEHHQDLTLLKALVRQQLPEKYKEIFFDQSKNGYAGYIDGGASQEEFYKFIKPILEKMDGTEELLVKLNREDLLRKQRTFDNGSIPHQIHLGELHAILRRQEDFYPFLKDNREKIEKILTFRIPYYVGPLARGNSRFAWMTRKSEETITPWNFEEVVDKGASAQSFIERMTNFDKNLPNEKVLPKHSLLYEYFTVYNELTKVKYVTEGMRKPAFLSGEQKKAIVDLLFKTNRKVTVKQLKEDYFKKIECFDSVEISGVEDRFNASLGTYHDLLKIIKDKDFLDNEENEDILEDIVLTLTLFEDREMIEERLKTYAHLFDDKVMKQLKRRRYTGWGRLSRKLINGIRDKQSGKTILDFLKSDGFANRNFMQLIHDDSLTFKEDIQKAQVSGQGDSLHEHIANLAGSPAIKKGILQTVKVVDELVKVMGRHKPENIVIEMARENQTTQKGQKNSRERMKRIEEGIKELGSQILKEHPVENTQLQNEKLYLYYLQNGRDMYVDQELDINRLSDYDVDHIVPQSFLKDDSIDNKVLTRSDKARGKSDNVPSEEVVKKMKNYWRQLLNAKLITQRKFDNLTKAERGGLSELDKAGFIKRQLVETRQITKHVAQILDSRMNTKYDENDKLIREVKVITLKSKLVSDFRKDFQFYKVREINNYHHAHDAYLNAVVGTALIKKYPKLESEFVYGDYKVYDVRKMIAKSEQEIGKATAKYFFYSNIMNFFKTEITLANGEIRKRPLIETNGETGEIVWDKGRDFATVRKVLSMPQVNIVKKTEVQTGGFSKESILPKRNSDKLIARKKDWDPKKYGGFDSPTVAYSVLVVAKVEKGKSKKLKSVKELLGITIMERSSFEKNPIDFLEAKGYKEVKKDLIIKLPKYSLFELENGRKRMLASAGELQKGNELALPSKYVNFLYLASHYEKLKGSPEDNEQKQLFVEQHKHYLDEIIEQISEFSKRVILADANLDKVLSAYNKHRDKPIREQAENIIHLFTLTNLGAPAAFKYFDTTIDRKRYTSTKEVLDATLIHQSITGLYETRIDLSQLGGDGGGSSEAAAKGGGGGVLNLEEEYRLHEKPVPSSIDPSWLQLFPTVWAERAGMGLANQVPPVVVELRSGASPVAVRQYPMSKEAREGIRPHIQRFLDLGVLVPCQSPWNTPLLPVKKPGTNDYRPVQDLREINKRVQDIHPTVPNPYNLLSSLPPSHTWYSVLDLKDAFFCLKLHPNSQPLFAFEWRDPEKGNTGQLTWTRLPQGFKNSPTLFNEALHRDLAPFRALNPQVVLLQYVDDLLVAAPTYRDCKEGTQKLLQELSKLGYRVSAKKAQLCQKEVTYLGYLLKEGKRWLTPARKATVMKIPPPTTPRQVREFLGTAGFCRLWIPGFASLAAPLYPLTKPSIPFIWTEEHQKAFDRIKEALLSAPALALPDLTKPFTLYVDERAGVARGVLTQTLGPWRRPVAYLSKKLDPVASGWPTCLKAVAAVALLLKDADKLTLGQNVTVIASHSLESIVRQPPDRWMTNARMTHYQSLLLNERVSFAPPAVLNPATLLPVESEATPVHRCSEILAEETGTRRDLKDQPLPGVPAWYTDGSSFIAEGKRRAGAAIVDGKRTVWASSLPEGTSAQKAELVALTQALRLAEGKDINIYTDSRYAFATAHIHGAIYKQRGWLTSAGKDIKNKEEILALLEAIHLPKRVAIIHCPGHQKGNDPVATGNRRADEAAKQAALSTRVLAETTKPAGKRTADGSEFEKRTADGSEFESPKKKAKVE

SEQ ID NO: 854 - protein, 2094 aa, synthetic construct
  source 1..2094: note = Description of Artificial Sequence: Synthetic polypeptide
MPAAKRVKLDGGDKKYSIGLDIGTNSVGWAVITDEYKVPSKKFKVLGNTDRHSIKKNLIGALLFDSGETAEATRLKRTARRRYTRRKNRICYLQEIFSNEMAKVDDSFFHRLEESFLVEEDKKHERHPIFGNIVDEVAYHEKYPTIYHLRKKLVDSTDKADLRLIYLALAHMIKFRGHFLIEGDLNPDNSDVDKLFIQLVQTYNQLFEENPINASGVDAKAILSARLSKSRRLENLIAQLPGEKKNGLFGNLIALSLGLTPNFKSNFDLAEDAKLQLSKDTYDDDLDNLLAQIGDQYADLFLAAKNLSDAILLSDILRVNTEITKAPLSASMIKRYDEHHQDLTLLKALVRQQLPEKYKEIFFDQSKNGYAGYIDGGASQEEFYKFIKPILEKMDGTEELLVKLNREDLLRKQRTFDNGSIPHQIHLGELHAILRRQEDFYPFLKDNREKIEKILTFRIPYYVGPLARGNSRFAWMTRKSEETITPWNFEEVVDKGASAQSFIERMTNFDKNLPNEKVLPKHSLLYEYFTVYNELTKVKYVTEGMRKPAFLSGEQKKAIVDLLFKTNRKVTVKQLKEDYFKKIECFDSVEISGVEDRFNASLGTYHDLLKIIKDKDFLDNEENEDILEDIVLTLTLFEDREMIEERLKTYAHLFDDKVMKQLKRRRYTGWGRLSRKLINGIRDKQSGKTILDFLKSDGFANRNFMQLIHDDSLTFKEDIQKAQVSGQGDSLHEHIANLAGSPAIKKGILQTVKVVDELVKVMGRHKPENIVIEMARENQTTQKGQKNSRERMKRIEEGIKELGSQILKEHPVENTQLQNEKLYLYYLQNGRDMYVDQELDINRLSDYDVDHIVPQSFLKDDSIDNKVLTRSDKARGKSDNVPSEEVVKKMKNYWRQLLNAKLITQRKFDNLTKAERGGLSELDKAGFIKRQLVETRQITKHVAQILDSRMNTKYDENDKLIREVKVITLKSKLVSDFRKDFQFYKVREINNYHHAHDAYLNAVVGTALIKKYPKLESEFVYGDYKVYDVRKMIAKSEQEIGKATAKYFFYSNIMNFFKTEITLANGEIRKRPLIETNGETGEIVWDKGRDFATVRKVLSMPQVNIVKKTEVQTGGFSKESILPKRNSDKLIARKKDWDPKKYGGFDSPTVAYSVLVVAKVEKGKSKKLKSVKELLGITIMERSSFEKNPIDFLEAKGYKEVKKDLIIKLPKYSLFELENGRKRMLASAGELQKGNELALPSKYVNFLYLASHYEKLKGSPEDNEQKQLFVEQHKHYLDEIIEQISEFSKRVILADANLDKVLSAYNKHRDKPIREQAENIIHLFTLTNLGAPAAFKYFDTTIDRKRYTSTKEVLDATLIHQSITGLYETRIDLSQLGGDGGGGSEAAAKGGGGGVLNLEEEYRLHEKPVPSSIDPSWLQLFPTVWAERAGMGLANQVPPVVVELRSGASPVAVRQYPMSKEAREGIRPHIQRFLDLGVLVPCQSPWNTPLLPVKKPGTNDYRPVQDLREINKRVQDIHPTVPNPYNLLSSLPPSHTWYSVLDLKDAFFCLKLHPNSQPLFAFEWRDPEKGNTGQLTWTRLPQGFKNSPTLFNEALHRDLAPFRALNPQVVLLQYVDDLLVAAPTYRDCKEGTQKLLQELSKLGYRVSAKKAQLCQKEVTYLGYLLKEGKRWLTPARKATVMKIPPPTTPRQVREFLGTAGFCRLWIPGFASLAAPLYPLTKPSIPFIWTEEHQKAFDRIKEALLSAPALALPDLTKPFTLYVDERAGVARGVLTQTLGPWRRPVAYLSKKLDPVASGWPTCLKAVAAVALLLKDADKLTLGQNVTVIASHSLESIVRQPPDRWMTNARMTHYQSLLLNERVSFAPPAVLNPATLLPVESEATPVHRCSEILAEETGTRRDLKDQPLPGVPAWYTDGSSFIAEGKRRAGAAIVDGKRTVWASSLPEGTSAQKAELVALTQALRLAEGKDINIYTDSRYAFATAHIHGAIYKQRGWLTSAGKDIKNKEEILALLEAIHLPKRVAIIHCPGHQKGNDPVATGNRRADEAAKQAALSTRVLAETTKPAGKRTADGSEFEKRTADGSEFESPKKKAKVE

SEQ ID NO: 855 - protein, 2089 aa, synthetic construct
  source 1..2089: note = Description of Artificial Sequence: Synthetic polypeptide
MPAAKRVKLDGGDKKYSIGLDIGTNSVGWAVITDEYKVPSKKFKVLGNTDRHSIKKNLIGALLFDSGETAEATRLKRTARRRYTRRKNRICYLQEIFSNEMAKVDDSFFHRLEESFLVEEDKKHERHPIFGNIVDEVAYHEKYPTIYHLRKKLVDSTDKADLRLIYLALAHMIKFRGHFLIEGDLNPDNSDVDKLFIQLVQTYNQLFEENPINASGVDAKAILSARLSKSRRLENLIAQLPGEKKNGLFGNLIALSLGLTPNFKSNFDLAEDAKLQLSKDTYDDDLDNLLAQIGDQYADLFLAAKNLSDAILLSDILRVNTEITKAPLSASMIKRYDEHHQDLTLLKALVRQQLPEKYKEIFFDQSKNGYAGYIDGGASQEEFYKFIKPILEKMDGTEELLVKLNREDLLRKQRTFDNGSIPHQIHLGELHAILRRQEDFYPFLKDNREKIEKILTFRIPYYVGPLARGNSRFAWMTRKSEETITPWNFEEVVDKGASAQSFIERMTNFDKNLPNEKVLPKHSLLYEYFTVYNELTKVKYVTEGMRKPAFLSGEQKKAIVDLLFKTNRKVTVKQLKEDYFKKIECFDSVEISGVEDRFNASLGTYHDLLKIIKDKDFLDNEENEDILEDIVLTLTLFEDREMIEERLKTYAHLFDDKVMKQLKRRRYTGWGRLSRKLINGIRDKQSGKTILDFLKSDGFANRNFMQLIHDDSLTFKEDIQKAQVSGQGDSLHEHIANLAGSPAIKKGILQTVKVVDELVKVMGRHKPENIVIEMARENQTTQKGQKNSRERMKRIEEGIKELGSQILKEHPVENTQLQNEKLYLYYLQNGRDMYVDQELDINRLSDYDVDHIVPQSFLKDDSIDNKVLTRSDKARGKSDNVPSEEVVKKMKNYWRQLLNAKLITQRKFDNLTKAERGGLSELDKAGFIKRQLVETRQITKHVAQILDSRMNTKYDENDKLIREVKVITLKSKLVSDFRKDFQFYKVREINNYHHAHDAYLNAVVGTALIKKYPKLESEFVYGDYKVYDVRKMIAKSEQEIGKATAKYFFYSNIMNFFKTEITLANGEIRKRPLIETNGETGEIVWDKGRDFATVRKVLSMPQVNIVKKTEVQTGGFSKESILPKRNSDKLIARKKDWDPKKYGGFDSPTVAYSVLVVAKVEKGKSKKLKSVKELLGITIMERSSFEKNPIDFLEAKGYKEVKKDLIIKLPKYSLFELENGRKRMLASAGELQKGNELALPSKYVNFLYLASHYEKLKGSPEDNEQKQLFVEQHKHYLDEIIEQISEFSKRVILADANLDKVLSAYNKHRDKPIREQAENIIHLFTLTNLGAPAAFKYFDTTIDRKRYTSTKEVLDATLIHQSITGLYETRIDLSQLGGDGGGGSGGGGGVLNLEEEYRLHEKPVPSSIDPSWLQLFPTVWAERAGMGLANQVPPVVVELRSGASPVAVRQYPMSKEAREGIRPHIQRFLDLGVLVPCQSPWNTPLLPVKKPGTNDYRPVQDLREINKRVQDIHPTVPNPYNLLSSLPPSHTWYSVLDLKDAFFCLKLHPNSQPLFAFEWRDPEKGNTGQLTWTRLPQGFKNSPTLFNEALHRDLAPFRALNPQVVLLQYVDDLLVAAPTYRDCKEGTQKLLQELSKLGYRVSAKKAQLCQKEVTYLGYLLKEGKRWLTPARKATVMKIPPPTTPRQVREFLGTAGFCRLWIPGFASLAAPLYPLTKPSIPFIWTEEHQKAFDRIKEALLSAPALALPDLTKPFTLYVDERAGVARGVLTQTLGPWRRPVAYLSKKLDPVASGWPTCLKAVAAVALLLKDADKLTLGQNVTVIASHSLESIVRQPPDRWMTNARMTHYQSLLLNERVSFAPPAVLNPATLLPVESEATPVHRCSEILAEETGTRRDLKDQPLPGVPAWYTDGSSFIAEGKRRAGAAIVDGKRTVWASSLPEGTSAQKAELVALTQALRLAEGKDINIYTDSRYAFATAHIHGAIYKQRGWLTSAGKDIKNKEEILALLEAIHLPKRVAIIHCPGHQKGNDPVATGNRRADEAAKQAALSTRVLAETTKPAGKRTADGSEFEKRTADGSEFESPKKKAKVE

SEQ ID NO: 856 - protein, 2094 aa, synthetic construct
  source 1..2094: note = Description of Artificial Sequence: Synthetic polypeptide
MPAAKRVKLDGGDKKYSIGLDIGTNSVGWAVITDEYKVPSKKFKVLGNTDRHSIKKNLIGALLFDSGETAEATRLKRTARRRYTRRKNRICYLQEIFSNEMAKVDDSFFHRLEESFLVEEDKKHERHPIFGNIVDEVAYHEKYPTIYHLRKKLVDSTDKADLRLIYLALAHMIKFRGHFLIEGDLNPDNSDVDKLFIQLVQTYNQLFEENPINASGVDAKAILSARLSKSRRLENLIAQLPGEKKNGLFGNLIALSLGLTPNFKSNFDLAEDAKLQLSKDTYDDDLDNLLAQIGDQYADLFLAAKNLSDAILLSDILRVNTEITKAPLSASMIKRYDEHHQDLTLLKALVRQQLPEKYKEIFFDQSKNGYAGYIDGGASQEEFYKFIKPILEKMDGTEELLVKLNREDLLRKQRTFDNGSIPHQIHLGELHAILRRQEDFYPFLKDNREKIEKILTFRIPYYVGPLARGNSRFAWMTRKSEETITPWNFEEVVDKGASAQSFIERMTNFDKNLPNEKVLPKHSLLYEYFTVYNELTKVKYVTEGMRKPAFLSGEQKKAIVDLLFKTNRKVTVKQLKEDYFKKIECFDSVEISGVEDRFNASLGTYHDLLKIIKDKDFLDNEENEDILEDIVLTLTLFEDREMIEERLKTYAHLFDDKVMKQLKRRRYTGWGRLSRKLINGIRDKQSGKTILDFLKSDGFANRNFMQLIHDDSLTFKEDIQKAQVSGQGDSLHEHIANLAGSPAIKKGILQTVKVVDELVKVMGRHKPENIVIEMARENQTTQKGQKNSRERMKRIEEGIKELGSQILKEHPVENTQLQNEKLYLYYLQNGRDMYVDQELDINRLSDYDVDHIVPQSFLKDDSIDNKVLTRSDKARGKSDNVPSEEVVKKMKNYWRQLLNAKLITQRKFDNLTKAERGGLSELDKAGFIKRQLVETRQITKHVAQILDSRMNTKYDENDKLIREVKVITLKSKLVSDFRKDFQFYKVREINNYHHAHDAYLNAVVGTALIKKYPKLESEFVYGDYKVYDVRKMIAKSEQEIGKATAKYFFYSNIMNFFKTEITLANGEIRKRPLIETNGETGEIVWDKGRDFATVRKVLSMPQVNIVKKTEVQTGGFSKESILPKRNSDKLIARKKDWDPKKYGGFDSPTVAYSVLVVAKVEKGKSKKLKSVKELLGITIMERSSFEKNPIDFLEAKGYKEVKKDLIIKLPKYSLFELENGRKRMLASAGELQKGNELALPSKYVNFLYLASHYEKLKGSPEDNEQKQLFVEQHKHYLDEIIEQISEFSKRVILADANLDKVLSAYNKHRDKPIREQAENIIHLFTLTNLGAPAAFKYFDTTIDRKRYTSTKEVLDATLIHQSITGLYETRIDLSQLGGDGGEAAAKPAPGGGGGVLNLEEEYRLHEKPVPSSIDPSWLQLFPTVWAERAGMGLANQVPPVVVELRSGASPVAVRQYPMSKEAREGIRPHIQRFLDLGVLVPCQSPWNTPLLPVKKPGTNDYRPVQDLREINKRVQDIHPTVPNPYNLLSSLPPSHTWYSVLDLKDAFFCLKLHPNSQPLFAFEWRDPEKGNTGQLTWTRLPQGFKNSPTLFNEALHRDLAPFRALNPQVVLLQYVDDLLVAAPTYRDCKEGTQKLLQELSKLGYRVSAKKAQLCQKEVTYLGYLLKEGKRWLTPARKATVMKIPPPTTPRQVREFLGTAGFCRLWIPGFASLAAPLYPLTKPSIPFIWTEEHQKAFDRIKEALLSAPALALPDLTKPFTLYVDERAGVARGVLTQTLGPWRRPVAYLSKKLDPVASGWPTCLKAVAAVALLLKDADKLTLGQNVTVIASHSLESIVRQPPDRWMTNARMTHYQSLLLNERVSFAPPAVLNPATLLPVESEATPVHRCSEILAEETGTRRDLKDQPLPGVPAWYTDGSSFIAEGKRRAGAAIVDGKRTVWASSLPEGTSAQKAELVALTQALRLAEGKDINIYTDSRYAFATAHIHGAIYKQRGWLTSAGKDIKNKEEILALLEAIHLPKRVAIIHCPGHQKGNDPVATGNRRADEAAKQAALSTRVLAETTKPAGKRTADGSEFEKRTADGSEFESPKKKAKVE

SEQ ID NO: 857 - protein, 2094 aa, synthetic construct
  source 1..2094: note = Description of Artificial Sequence: Synthetic polypeptide
MPAAKRVKLDGGDKKYSIGLDIGTNSVGWAVITDEYKVPSKKFKVLGNTDRHSIKKNLIGALLFDSGETAEATRLKRTARRRYTRRKNRICYLQEIFSNEMAKVDDSFFHRLEESFLVEEDKKHERHPIFGNIVDEVAYHEKYPTIYHLRKKLVDSTDKADLRLIYLALAHMIKFRGHFLIEGDLNPDNSDVDKLFIQLVQTYNQLFEENPINASGVDAKAILSARLSKSRRLENLIAQLPGEKKNGLFGNLIALSLGLTPNFKSNFDLAEDAKLQLSKDTYDDDLDNLLAQIGDQYADLFLAAKNLSDAILLSDILRVNTEITKAPLSASMIKRYDEHHQDLTLLKALVRQQLPEKYKEIFFDQSKNGYAGYIDGGASQEEFYKFIKPILEKMDGTEELLVKLNREDLLRKQRTFDNGSIPHQIHLGELHAILRRQEDFYPFLKDNREKIEKILTFRIPYYVGPLARGNSRFAWMTRKSEETITPWNFEEVVDKGASAQSFIERMTNFDKNLPNEKVLPKHSLLYEYFTVYNELTKVKYVTEGMRKPAFLSGEQKKAIVDLLFKTNRKVTVKQLKEDYFKKIECFDSVEISGVEDRFNASLGTYHDLLKIIKDKDFLDNEENEDILEDIVLTLTLFEDREMIEERLKTYAHLFDDKVMKQLKRRRYTGWGRLSRKLINGIRDKQSGKTILDFLKSDGFANRNFMQLIHDDSLTFKEDIQKAQVSGQGDSLHEHIANLAGSPAIKKGILQTVKVVDELVKVMGRHKPENIVIEMARENQTTQKGQKNSRERMKRIEEGIKELGSQILKEHPVENTQLQNEKLYLYYLQNGRDMYVDQELDINRLSDYDVDHIVPQSFLKDDSIDNKVLTRSDKARGKSDNVPSEEVVKKMKNYWRQLLNAKLITQRKFDNLTKAERGGLSELDKAGFIKRQLVETRQITKHVAQILDSRMNTKYDENDKLIREVKVITLKSKLVSDFRKDFQFYKVREINNYHHAHDAYLNAVVGTALIKKYPKLESEFVYGDYKVYDVRKMIAKSEQEIGKATAKYFFYSNIMNFFKTEITLANGEIRKRPLIETNGETGEIVWDKGRDFATVRKVLSMPQVNIVKKTEVQTGGFSKESILPKRNSDKLIARKKDWDPKKYGGFDSPTVAYSVLVVAKVEKGKSKKLKSVKELLGITIMERSSFEKNPIDFLEAKGYKEVKKDLIIKLPKYSLFELENGRKRMLASAGELQKGNELALPSKYVNFLYLASHYEKLKGSPEDNEQKQLFVEQHKHYLDEIIEQISEFSKRVILADANLDKVLSAYNKHRDKPIREQAENIIHLFTLTNLGAPAAFKYFDTTIDRKRYTSTKEVLDATLIHQSITGLYETRIDLSQLGGDGGGSSEAAAKGGSGGVLNLEEEYRLHEKPVPSSIDPSWLQLFPTVWAERAGMGLANQVPPVVVELRSGASPVAVRQYPMSKEAREGIRPHIQRFLDLGVLVPCQSPWNTPLLPVKKPGTNDYRPVQDLREINKRVQDIHPTVPNPYNLLSSLPPSHTWYSVLDLKDAFFCLKLHPNSQPLFAFEWRDPEKGNTGQLTWTRLPQGFKNSPTLFNEALHRDLAPFRALNPQVVLLQYVDDLLVAAPTYRDCKEGTQKLLQELSKLGYRVSAKKAQLCQKEVTYLGYLLKEGKRWLTPARKATVMKIPPPTTPRQVREFLGTAGFCRLWIPGFASLAAPLYPLTKPSIPFIWTEEHQKAFDRIKEALLSAPALALPDLTKPFTLYVDERAGVARGVLTQTLGPWRRPVAYLSKKLDPVASGWPTCLKAVAAVALLLKDADKLTLGQNVTVIASHSLESIVRQPPDRWMTNARMTHYQSLLLNERVSFAPPAVLNPATLLPVESEATPVHRCSEILAEETGTRRDLKDQPLPGVPAWYTDGSSFIAEGKRRAGAAIVDGKRTVWASSLPEGTSAQKAELVALTQALRLAEGKDINIYTDSRYAFATAHIHGAIYKQRGWLTSAGKDIKNKEEILALLEAIHLPKRVAIIHCPGHQKGNDPVATGNRRADEAAKQAALSTRVLAETTKPAGKRTADGSEFEKRTADGSEFESPKKKAKVE

SEQ ID NO: 858 - protein, 2092 aa, synthetic construct
  source 1..2092: note = Description of Artificial Sequence: Synthetic polypeptide
MPAAKRVKLDGGDKKYSIGLDIGTNSVGWAVITDEYKVPSKKFKVLGNTDRHSIKKNLIGALLFDSGETAEATRLKRTARRRYTRRKNRICYLQEIFSNEMAKVDDSFFHRLEESFLVEEDKKHERHPIFGNIVDEVAYHEKYPTIYHLRKKLVDSTDKADLRLIYLALAHMIKFRGHFLIEGDLNPDNSDVDKLFIQLVQTYNQLFEENPINASGVDAKAILSARLSKSRRLENLIAQLPGEKKNGLFGNLIALSLGLTPNFKSNFDLAEDAKLQLSKDTYDDDLDNLLAQIGDQYADLFLAAKNLSDAILLSDILRVNTEITKAPLSASMIKRYDEHHQDLTLLKALVRQQLPEKYKEIFFDQSKNGYAGYIDGGASQEEFYKFIKPILEKMDGTEELLVKLNREDLLRKQRTFDNGSIPHQIHLGELHAILRRQEDFYPFLKDNREKIEKILTFRIPYYVGPLARGNSRFAWMTRKSEETITPWNFEEVVDKGASAQSFIERMTNFDKNLPNEKVLPKHSLLYEYFTVYNELTKVKYVTEGMRKPAFLSGEQKKAIVDLLFKTNRKVTVKQLKEDYFKKIECFDSVEISGVEDRFNASLGTYHDLLKIIKDKDFLDNEENEDILEDIVLTLTLFEDREMIEERLKTYAHLFDDKVMKQLKRRRYTGWGRLSRKLINGIRDKQSGKTILDFLKSDGFANRNFMQLIHDDSLTFKEDIQKAQVSGQGDSLHEHIANLAGSPAIKKGILQTVKVVDELVKVMGRHKPENIVIEMARENQTTQKGQKNSRERMKRIEEGIKELGSQILKEHPVENTQLQNEKLYLYYLQNGRDMYVDQELDINRLSDYDVDHIVPQSFLKDDSIDNKVLTRSDKARGKSDNVPSEEVVKKMKNYWRQLLNAKLITQRKFDNLTKAERGGLSELDKAGFIKRQLVETRQITKHVAQILDSRMNTKYDENDKLIREVKVITLKSKLVSDFRKDFQFYKVREINNYHHAHDAYLNAVVGTALIKKYPKLESEFVYGDYKVYDVRKMIAKSEQEIGKATAKYFFYSNIMNFFKTEITLANGEIRKRPLIETNGETGEIVWDKGRDFATVRKVLSMPQVNIVKKTEVQTGGFSKESILPKRNSDKLIARKKDWDPKKYGGFDSPTVAYSVLVVAKVEKGKSKKLKSVKELLGITIMERSSFEKNPIDFLEAKGYKEVKKDLIIKLPKYSLFELENGRKRMLASAGELQKGNELALPSKYVNFLYLASHYEKLKGSPEDNEQKQLFVEQHKHYLDEIIEQISEFSKRVILADANLDKVLSAYNKHRDKPIREQAENIIHLFTLTNLGAPAAFKYFDTTIDRKRYTSTKEVLDATLIHQSITGLYETRIDLSQLGGDGGPAPGGSGGGGGVLNLEEEYRLHEKPVPSSIDPSWLQLFPTVWAERAGMGLANQVPPVVVELRSGASPVAVRQYPMSKEAREGIRPHIQRFLDLGVLVPCQSPWNTPLLPVKKPGTNDYRPVQDLREINKRVQDIHPTVPNPYNLLSSLPPSHTWYSVLDLKDAFFCLKLHPNSQPLFAFEWRDPEKGNTGQLTWTRLPQGFKNSPTLFNEALHRDLAPFRALNPQVVLLQYVDDLLVAAPTYRDCKEGTQKLLQELSKLGYRVSAKKAQLCQKEVTYLGYLLKEGKRWLTPARKATVMKIPPPTTPRQVREFLGTAGFCRLWIPGFASLAAPLYPLTKPSIPFIWTEEHQKAFDRIKEALLSAPALALPDLTKPFTLYVDERAGVARGVLTQTLGPWRRPVAYLSKKLDPVASGWPTCLKAVAAVALLLKDADKLTLGQNVTVIASHSLESIVRQPPDRWMTNARMTHYQSLLLNERVSFAPPAVLNPATLLPVESEATPVHRCSEILAEETGTRRDLKDQPLPGVPAWYTDGSSFIAEGKRRAGAAIVDGKRTVWASSLPEGTSAQKAELVALTQALRLAEGKDINIYTDSRYAFATAHIHGAIYKQRGWLTSAGKDIKNKEEILALLEAIHLPKRVAIIHCPGHQKGNDPVATGNRRADEAAKQAALSTRVLAETTKPAGKRTADGSEFEKRTADGSEFESPKKKAKVE

SEQ ID NO: 859 - protein, 2089 aa, synthetic construct
  source 1..2089: note = Description of Artificial Sequence: Synthetic polypeptide
MPAAKRVKLDGGDKKYSIGLDIGTNSVGWAVITDEYKVPSKKFKVLGNTDRHSIKKNLIGALLFDSGETAEATRLKRTARRRYTRRKNRICYLQEIFSNEMAKVDDSFFHRLEESFLVEEDKKHERHPIFGNIVDEVAYHEKYPTIYHLRKKLVDSTDKADLRLIYLALAHMIKFRGHFLIEGDLNPDNSDVDKLFIQLVQTYNQLFEENPINASGVDAKAILSARLSKSRRLENLIAQLPGEKKNGLFGNLIALSLGLTPNFKSNFDLAEDAKLQLSKDTYDDDLDNLLAQIGDQYADLFLAAKNLSDAILLSDILRVNTEITKAPLSASMIKRYDEHHQDLTLLKALVRQQLPEKYKEIFFDQSKNGYAGYIDGGASQEEFYKFIKPILEKMDGTEELLVKLNREDLLRKQRTFDNGSIPHQIHLGELHAILRRQEDFYPFLKDNREKIEKILTFRIPYYVGPLARGNSRFAWMTRKSEETITPWNFEEVVDKGASAQSFIERMTNFDKNLPNEKVLPKHSLLYEYFTVYNELTKVKYVTEGMRKPAFLSGEQKKAIVDLLFKTNRKVTVKQLKEDYFKKIECFDSVEISGVEDRFNASLGTYHDLLKIIKDKDFLDNEENEDILEDIVLTLTLFEDREMIEERLKTYAHLFDDKVMKQLKRRRYTGWGRLSRKLINGIRDKQSGKTILDFLKSDGFANRNFMQLIHDDSLTFKEDIQKAQVSGQGDSLHEHIANLAGSPAIKKGILQTVKVVDELVKVMGRHKPENIVIEMARENQTTQKGQKNSRERMKRIEEGIKELGSQILKEHPVENTQLQNEKLYLYYLQNGRDMYVDQELDINRLSDYDVDHIVPQSFLKDDSIDNKVLTRSDKARGKSDNVPSEEVVKKMKNYWRQLLNAKLITQRKFDNLTKAERGGLSELDKAGFIKRQLVETRQITKHVAQILDSRMNTKYDENDKLIREVKVITLKSKLVSDFRKDFQFYKVREINNYHHAHDAYLNAVVGTALIKKYPKLESEFVYGDYKVYDVRKMIAKSEQEIGKATAKYFFYSNIMNFFKTEITLANGEIRKRPLIETNGETGEIVWDKGRDFATVRKVLSMPQVNIVKKTEVQTGGFSKESILPKRNSDKLIARKKDWDPKKYGGFDSPTVAYSVLVVAKVEKGKSKKLKSVKELLGITIMERSSFEKNPIDFLEAKGYKEVKKDLIIKLPKYSLFELENGRKRMLASAGELQKGNELALPSKYVNFLYLASHYEKLKGSPEDNEQKQLFVEQHKHYLDEIIEQISEFSKRVILADANLDKVLSAYNKHRDKPIREQAENIIHLFTLTNLGAPAAFKYFDTTIDRKRYTSTKEVLDATLIHQSITGLYETRIDLSQLGGDGGPAPGSSGGVLNLEEEYRLHEKPVPSSIDPSWLQLFPTVWAERAGMGLANQVPPVVVELRSGASPVAVRQYPMSKEAREGIRPHIQRFLDLGVLVPCQSPWNTPLLPVKKPGTNDYRPVQDLREINKRVQDIHPTVPNPYNLLSSLPPSHTWYSVLDLKDAFFCLKLHPNSQPLFAFEWRDPEKGNTGQLTWTRLPQGFKNSPTLFNEALHRDLAPFRALNPQVVLLQYVDDLLVAAPTYRDCKEGTQKLLQELSKLGYRVSAKKAQLCQKEVTYLGYLLKEGKRWLTPARKATVMKIPPPTTPRQVREFLGTAGFCRLWIPGFASLAAPLYPLTKPSIPFIWTEEHQKAFDRIKEALLSAPALALPDLTKPFTLYVDERAGVARGVLTQTLGPWRRPVAYLSKKLDPVASGWPTCLKAVAAVALLLKDADKLTLGQNVTVIASHSLESIVRQPPDRWMTNARMTHYQSLLLNERVSFAPPAVLNPATLLPVESEATPVHRCSEILAEETGTRRDLKDQPLPGVPAWYTDGSSFIAEGKRRAGAAIVDGKRTVWASSLPEGTSAQKAELVALTQALRLAEGKDINIYTDSRYAFATAHIHGAIYKQRGWLTSAGKDIKNKEEILALLEAIHLPKRVAIIHCPGHQKGNDPVATGNRRADEAAKQAALSTRVLAETTKPAGKRTADGSEFEKRTADGSEFESPKKKAKVE

SEQ ID NO: 860 - protein, 2090 aa, synthetic construct
  source 1..2090: note = Description of Artificial Sequence: Synthetic polypeptide
MPAAKRVKLDGGDKKYSIGLDIGTNSVGWAVITDEYKVPSKKFKVLGNTDRHSIKKNLIGALLFDSGETAEATRLKRTARRRYTRRKNRICYLQEIFSNEMAKVDDSFFHRLEESFLVEEDKKHERHPIFGNIVDEVAYHEKYPTIYHLRKKLVDSTDKADLRLIYLALAHMIKFRGHFLIEGDLNPDNSDVDKLFIQLVQTYNQLFEENPINASGVDAKAILSARLSKSRRLENLIAQLPGEKKNGLFGNLIALSLGLTPNFKSNFDLAEDAKLQLSKDTYDDDLDNLLAQIGDQYADLFLAAKNLSDAILLSDILRVNTEITKAPLSASMIKRYDEHHQDLTLLKALVRQQLPEKYKEIFFDQSKNGYAGYIDGGASQEEFYKFIKPILEKMDGTEELLVKLNREDLLRKQRTFDNGSIPHQIHLGELHAILRRQEDFYPFLKDNREKIEKILTFRIPYYVGPLARGNSRFAWMTRKSEETITPWNFEEVVDKGASAQSFIERMTNFDKNLPNEKVLPKHSLLYEYFTVYNELTKVKYVTEGMRKPAFLSGEQKKAIVDLLFKTNRKVTVKQLKEDYFKKIECFDSVEISGVEDRFNASLGTYHDLLKIIKDKDFLDNEENEDILEDIVLTLTLFEDREMIEERLKTYAHLFDDKVMKQLKRRRYTGWGRLSRKLINGIRDKQSGKTILDFLKSDGFANRNFMQLIHDDSLTFKEDIQKAQVSGQGDSLHEHIANLAGSPAIKKGILQTVKVVDELVKVMGRHKPENIVIEMARENQTTQKGQKNSRERMKRIEEGIKELGSQILKEHPVENTQLQNEKLYLYYLQNGRDMYVDQELDINRLSDYDVDHIVPQSFLKDDSIDNKVLTRSDKARGKSDNVPSEEVVKKMKNYWRQLLNAKLITQRKFDNLTKAERGGLSELDKAGFIKRQLVETRQITKHVAQILDSRMNTKYDENDKLIREVKVITLKSKLVSDFRKDFQFYKVREINNYHHAHDAYLNAVVGTALIKKYPKLESEFVYGDYKVYDVRKMIAKSEQEIGKATAKYFFYSNIMNFFKTEITLANGEIRKRPLIETNGETGEIVWDKGRDFATVRKVLSMPQVNIVKKTEVQTGGFSKESILPKRNSDKLIARKKDWDPKKYGGFDSPTVAYSVLVVAKVEKGKSKKLKSVKELLGITIMERSSFEKNPIDFLEAKGYKEVKKDLIIKLPKYSLFELENGRKRMLASAGELQKGNELALPSKYVNFLYLASHYEKLKGSPEDNEQKQLFVEQHKHYLDEIIEQISEFSKRVILADANLDKVLSAYNKHRDKPIREQAENIIHLFTLTNLGAPAAFKYFDTTIDRKRYTSTKEVLDATLIHQSITGLYETRIDLSQLGGDGGPAPAPAPGGVLNLEEEYRLHEKPVPSSIDPSWLQLFPTVWAERAGMGLANQVPPVVVELRSGASPVAVRQYPMSKEAREGIRPHIQRFLDLGVLVPCQSPWNTPLLPVKKPGTNDYRPVQDLREINKRVQDIHPTVPNPYNLLSSLPPSHTWYSVLDLKDAFFCLKLHPNSQPLFAFEWRDPEKGNTGQLTWTRLPQGFKNSPTLFNEALHRDLAPFRALNPQVVLLQYVDDLLVAAPTYRDCKEGTQKLLQELSKLGYRVSAKKAQLCQKEVTYLGYLLKEGKRWLTPARKATVMKIPPPTTPRQVREFLGTAGFCRLWIPGFASLAAPLYPLTKPSIPFIWTEEHQKAFDRIKEALLSAPALALPDLTKPFTLYVDERAGVARGVLTQTLGPWRRPVAYLSKKLDPVASGWPTCLKAVAAVALLLKDADKLTLGQNVTVIASHSLESIVRQPPDRWMTNARMTHYQSLLLNERVSFAPPAVLNPATLLPVESEATPVHRCSEILAEETGTRRDLKDQPLPGVPAWYTDGSSFIAEGKRRAGAAIVDGKRTVWASSLPEGTSAQKAELVALTQALRLAEGKDINIYTDSRYAFATAHIHGAIYKQRGWLTSAGKDIKNKEEILALLEAIHLPKRVAIIHCPGHQKGNDPVATGNRRADEAAKQAALSTRVLAETTKPAGKRTADGSEFEKRTADGSEFESPKKKAKVE

SEQ ID NO: 861 - protein, 2094 aa, synthetic construct
  source 1..2094: note = Description of Artificial Sequence: Synthetic polypeptide
MPAAKRVKLDGGDKKYSIGLDIGTNSVGWAVITDEYKVPSKKFKVLGNTDRHSIKKNLIGALLFDSGETAEATRLKRTARRRYTRRKNRICYLQEIFSNEMAKVDDSFFHRLEESFLVEEDKKHERHPIFGNIVDEVAYHEKYPTIYHLRKKLVDSTDKADLRLIYLALAHMIKFRGHFLIEGDLNPDNSDVDKLFIQLVQTYNQLFEENPINASGVDAKAILSARLSKSRRLENLIAQLPGEKKNGLFGNLIALSLGLTPNFKSNFDLAEDAKLQLSKDTYDDDLDNLLAQIGDQYADLFLAAKNLSDAILLSDILRVNTEITKAPLSASMIKRYDEHHQDLTLLKALVRQQLPEKYKEIFFDQSKNGYAGYIDGGASQEEFYKFIKPILEKMDGTEELLVKLNREDLLRKQRTFDNGSIPHQIHLGELHAILRRQEDFYPFLKDNREKIEKILTFRIPYYVGPLARGNSRFAWMTRKSEETITPWNFEEVVDKGASAQSFIERMTNFDKNLPNEKVLPKHSLLYEYFTVYNELTKVKYVTEGMRKPAFLSGEQKKAIVDLLFKTNRKVTVKQLKEDYFKKIECFDSVEISGVEDRFNASLGTYHDLLKIIKDKDFLDNEENEDILEDIVLTLTLFEDREMIEERLKTYAHLFDDKVMKQLKRRRYTGWGRLSRKLINGIRDKQSGKTILDFLKSDGFANRNFMQLIHDDSLTFKEDIQKAQVSGQGDSLHEHIANLAGSPAIKKGILQTVKVVDELVKVMGRHKPENIVIEMARENQTTQKGQKNSRERMKRIEEGIKELGSQILKEHPVENTQLQNEKLYLYYLQNGRDMYVDQELDINRLSDYDVDHIVPQSFLKDDSIDNKVLTRSDKARGKSDNVPSEEVVKKMKNYWRQLLNAKLITQRKFDNLTKAERGGLSELDKAGFIKRQLVETRQITKHVAQILDSRMNTKYDENDKLIREVKVITLKSKLVSDFRKDFQFYKVREINNYHHAHDAYLNAVVGTALIKKYPKLESEFVYGDYKVYDVRKMIAKSEQEIGKATAKYFFYSNIMNFFKTEITLANGEIRKRPLIETNGETGEIVWDKGRDFATVRKVLSMPQVNIVKKTEVQTGGFSKESILPKRNSDKLIARKKDWDPKKYGGFDSPTVAYSVLVVAKVEKGKSKKLKSVKELLGITIMERSSFEKNPIDFLEAKGYKEVKKDLIIKLPKYSLFELENGRKRMLASAGELQKGNELALPSKYVNFLYLASHYEKLKGSPEDNEQKQLFVEQHKHYLDEIIEQISEFSKRVILADANLDKVLSAYNKHRDKPIREQAENIIHLFTLTNLGAPAAFKYFDTTIDRKRYTSTKEVLDATLIHQSITGLYETRIDLSQLGGDGGGGSGGGEAAAKGGVLNLEEEYRLHEKPVPSSIDPSWLQLFPTVWAERAGMGLANQVPPVVVELRSGASPVAVRQYPMSKEAREGIRPHIQRFLDLGVLVPCQSPWNTPLLPVKKPGTNDYRPVQDLREINKRVQDIHPTVPNPYNLLSSLPPSHTWYSVLDLKDAFFCLKLHPNSQPLFAFEWRDPEKGNTGQLTWTRLPQGFKNSPTLFNEALHRDLAPFRALNPQVVLLQYVDDLLVAAPTYRDCKEGTQKLLQELSKLGYRVSAKKAQLCQKEVTYLGYLLKEGKRWLTPARKATVMKIPPPTTPRQVREFLGTAGFCRLWIPGFASLAAPLYPLTKPSIPFIWTEEHQKAFDRIKEALLSAPALALPDLTKPFTLYVDERAGVARGVLTQTLGPWRRPVAYLSKKLDPVASGWPTCLKAVAAVALLLKDADKLTLGQNVTVIASHSLESIVRQPPDRWMTNARMTHYQSLLLNERVSFAPPAVLNPATLLPVESEATPVHRCSEILAEETGTRRDLKDQPLPGVPAWYTDGSSFIAEGKRRAGAAIVDGKRTVWASSLPEGTSAQKAELVALTQALRLAEGKDINIYTDSRYAFATAHIHGAIYKQRGWLTSAGKDIKNKEEILALLEAIHLPKRVAIIHCPGHQKGNDPVATGNRRADEAAKQAALSTRVLAETTKPAGKRTADGSEFEKRTADGSEFESPKKKAKVE

SEQ ID NO: 862 - protein, 2095 aa, synthetic construct
  source 1..2095: note = Description of Artificial Sequence: Synthetic polypeptide
MPAAKRVKLDGGDKKYSIGLDIGTNSVGWAVITDEYKVPSKKFKVLGNTDRHSIKKNLIGALLFDSGETAEATRLKRTARRRYTRRKNRICYLQEIFSNEMAKVDDSFFHRLEESFLVEEDKKHERHPIFGNIVDEVAYHEKYPTIYHLRKKLVDSTDKADLRLIYLALAHMIKFRGHFLIEGDLNPDNSDVDKLFIQLVQTYNQLFEENPINASGVDAKAILSARLSKSRRLENLIAQLPGEKKNGLFGNLIALSLGLTPNFKSNFDLAEDAKLQLSKDTYDDDLDNLLAQIGDQYADLFLAAKNLSDAILLSDILRVNTEITKAPLSASMIKRYDEHHQDLTLLKALVRQQLPEKYKEIFFDQSKNGYAGYIDGGASQEEFYKFIKPILEKMDGTEELLVKLNREDLLRKQRTFDNGSIPHQIHLGELHAILRRQEDFYPFLKDNREKIEKILTFRIPYYVGPLARGNSRFAWMTRKSEETITPWNFEEVVDKGASAQSFIERMTNFDKNLPNEKVLPKHSLLYEYFTVYNELTKVKYVTEGMRKPAFLSGEQKKAIVDLLFKTNRKVTVKQLKEDYFKKIECFDSVEISGVEDRFNASLGTYHDLLKIIKDKDFLDNEENEDILEDIVLTLTLFEDREMIEERLKTYAHLFDDKVMKQLKRRRYTGWGRLSRKLINGIRDKQSGKTILDFLKSDGFANRNFMQLIHDDSLTFKEDIQKAQVSGQGDSLHEHIANLAGSPAIKKGILQTVKVVDELVKVMGRHKPENIVIEMARENQTTQKGQKNSRERMKRIEEGIKELGSQILKEHPVENTQLQNEKLYLYYLQNGRDMYVDQELDINRLSDYDVDHIVPQSFLKDDSIDNKVLTRSDKARGKSDNVPSEEVVKKMKNYWRQLLNAKLITQRKFDNLTKAERGGLSELDKAGFIKRQLVETRQITKHVAQILDSRMNTKYDENDKLIREVKVITLKSKLVSDFRKDFQFYKVREINNYHHAHDAYLNAVVGTALIKKYPKLESEFVYGDYKVYDVRKMIAKSEQEIGKATAKYFFYSNIMNFFKTEITLANGEIRKRPLIETNGETGEIVWDKGRDFATVRKVLSMPQVNIVKKTEVQTGGFSKESILPKRNSDKLIARKKDWDPKKYGGFDSPTVAYSVLVVAKVEKGKSKKLKSVKELLGITIMERSSFEKNPIDFLEAKGYKEVKKDLIIKLPKYSLFELENGRKRMLASAGELQKGNELALPSKYVNFLYLASHYEKLKGSPEDNEQKQLFVEQHKHYLDEIIEQISEFSKRVILADANLDKVLSAYNKHRDKPIREQAENIIHLFTLTNLGAPAAFKYFDTTIDRKRYTSTKEVLDATLIHQSITGLYETRIDLSQLGGDGGGSAGSAAGSGEFGGVLNLEEEYRLHEKPVPSSIDPSWLQLFPTVWAERAGMGLANQVPPVVVELRSGASPVAVRQYPMSKEAREGIRPHIQRFLDLGVLVPCQSPWNTPLLPVKKPGTNDYRPVQDLREINKRVQDIHPTVPNPYNLLSSLPPSHTWYSVLDLKDAFFCLKLHPNSQPLFAFEWRDPEKGNTGQLTWTRLPQGFKNSPTLFNEALHRDLAPFRALNPQVVLLQYVDDLLVAAPTYRDCKEGTQKLLQELSKLGYRVSAKKAQLCQKEVTYLGYLLKEGKRWLTPARKATVMKIPPPTTPRQVREFLGTAGFCRLWIPGFASLAAPLYPLTKPSIPFIWTEEHQKAFDRIKEALLSAPALALPDLTKPFTLYVDERAGVARGVLTQTLGPWRRPVAYLSKKLDPVASGWPTCLKAVAAVALLLKDADKLTLGQNVTVIASHSLESIVRQPPDRWMTNARMTHYQSLLLNERVSFAPPAVLNPATLLPVESEATPVHRCSEILAEETGTRRDLKDQPLPGVPAWYTDGSSFIAEGKRRAGAAIVDGKRTVWASSLPEGTSAQKAELVALTQALRLAEGKDINIYTDSRYAFATAHIHGAIYKQRGWLTSAGKDIKNKEEILALLEAIHLPKRVAIIHCPGHQKGNDPVATGNRRADEAAKQAALSTRVLAETTKPAGKRTADGSEFEKRTADGSEFESPKKKAKVE

SEQ ID NO: 863 - protein, 2094 aa, synthetic construct
  source 1..2094: note = Description of Artificial Sequence: Synthetic polypeptide
MPAAKRVKLDGGDKKYSIGLDIGTNSVGWAVITDEYKVPSKKFKVLGNTDRHSIKKNLIGALLFDSGETAEATRLKRTARRRYTRRKNRICYLQEIFSNEMAKVDDSFFHRLEESFLVEEDKKHERHPIFGNIVDEVAYHEKYPTIYHLRKKLVDSTDKADLRLIYLALAHMIKFRGHFLIEGDLNPDNSDVDKLFIQLVQTYNQLFEENPINASGVDAKAILSARLSKSRRLENLIAQLPGEKKNGLFGNLIALSLGLTPNFKSNFDLAEDAKLQLSKDTYDDDLDNLLAQIGDQYADLFLAAKNLSDAILLSDILRVNTEITKAPLSASMIKRYDEHHQDLTLLKALVRQQLPEKYKEIFFDQSKNGYAGYIDGGASQEEFYKFIKPILEKMDGTEELLVKLNREDLLRKQRTFDNGSIPHQIHLGELHAILRRQEDFYPFLKDNREKIEKILTFRIPYYVGPLARGNSRFAWMTRKSEETITPWNFEEVVDKGASAQSFIERMTNFDKNLPNEKVLPKHSLLYEYFTVYNELTKVKYVTEGMRKPAFLSGEQKKAIVDLLFKTNRKVTVKQLKEDYFKKIECFDSVEISGVEDRFNASLGTYHDLLKIIKDKDFLDNEENEDILEDIVLTLTLFEDREMIEERLKTYAHLFDDKVMKQLKRRRYTGWGRLSRKLINGIRDKQSGKTILDFLKSDGFANRNFMQLIHDDSLTFKEDIQKAQVSGQGDSLHEHIANLAGSPAIKKGILQTVKVVDELVKVMGRHKPENIVIEMARENQTTQKGQKNSRERMKRIEEGIKELGSQILKEHPVENTQLQNEKLYLYYLQNGRDMYVDQELDINRLSDYDVDHIVPQSFLKDDSIDNKVLTRSDKARGKSDNVPSEEVVKKMKNYWRQLLNAKLITQRKFDNLTKAERGGLSELDKAGFIKRQLVETRQITKHVAQILDSRMNTKYDENDKLIREVKVITLKSKLVSDFRKDFQFYKVREINNYHHAHDAYLNAVVGTALIKKYPKLESEFVYGDYKVYDVRKMIAKSEQEIGKATAKYFFYSNIMNFFKTEITLANGEIRKRPLIETNGETGEIVWDKGRDFATVRKVLSMPQVNIVKKTEVQTGGFSKESILPKRNSDKLIARKKDWDPKKYGGFDSPTVAYSVLVVAKVEKGKSKKLKSVKELLGITIMERSSFEKNPIDFLEAKGYKEVKKDLIIKLPKYSLFELENGRKRMLASAGELQKGNELALPSKYVNFLYLASHYEKLKGSPEDNEQKQLFVEQHKHYLDEIIEQISEFSKRVILADANLDKVLSAYNKHRDKPIREQAENIIHLFTLTNLGAPAAFKYFDTTIDRKRYTSTKEVLDATLIHQSITGLYETRIDLSQLGGDGGPAPEAAAKGGSGGVLNLEEEYRLHEKPVPSSIDPSWLQLFPTVWAERAGMGLANQVPPVVVELRSGASPVAVRQYPMSKEAREGIRPHIQRFLDLGVLVPCQSPWNTPLLPVKKPGTNDYRPVQDLREINKRVQDIHPTVPNPYNLLSSLPPSHTWYSVLDLKDAFFCLKLHPNSQPLFAFEWRDPEKGNTGQLTWTRLPQGFKNSPTLFNEALHRDLAPFRALNPQVVLLQYVDDLLVAAPTYRDCKEGTQKLLQELSKLGYRVSAKKAQLCQKEVTYLGYLLKEGKRWLTPARKATVMKIPPPTTPRQVREFLGTAGFCRLWIPGFASLAAPLYPLTKPSIPFIWTEEHQKAFDRIKEALLSAPALALPDLTKPFTLYVDERAGVARGVLTQTLGPWRRPVAYLSKKLDPVASGWPTCLKAVAAVALLLKDADKLTLGQNVTVIASHSLESIVRQPPDRWMTNARMTHYQSLLLNERVSFAPPAVLNPATLLPVESEATPVHRCSEILAEETGTRRDLKDQPLPGVPAWYTDGSSFIAEGKRRAGAAIVDGKRTVWASSLPEGTSAQKAELVALTQALRLAEGKDINIYTDSRYAFATAHIHGAIYKQRGWLTSAGKDIKNKEEILALLEAIHLPKRVAIIHCPGHQKGNDPVATGNRRADEAAKQAALSTRVLAETTKPAGKRTADGSEFEKRTADGSEFESPKKKAKVE

SEQ ID NO: 864 - protein, 2092 aa, synthetic construct
  source 1..2092: note = Description of Artificial Sequence: Synthetic polypeptide
MPAAKRVKLDGGDKKYSIGLDIGTNSVGWAVITDEYKVPSKKFKVLGNTDRHSIKKNLIGALLFDSGETAEATRLKRTARRRYTRRKNRICYLQEIFSNEMAKVDDSFFHRLEESFLVEEDKKHERHPIFGNIVDEVAYHEKYPTIYHLRKKLVDSTDKADLRLIYLALAHMIKFRGHFLIEGDLNPDNSDVDKLFIQLVQTYNQLFEENPINASGVDAKAILSARLSKSRRLENLIAQLPGEKKNGLFGNLIALSLGLTPNFKSNFDLAEDAKLQLSKDTYDDDLDNLLAQIGDQYADLFLAAKNLSDAILLSDILRVNTEITKAPLSASMIKRYDEHHQDLTLLKALVRQQLPEKYKEIFFDQSKNGYAGYIDGGASQEEFYKFIKPILEKMDGTEELLVKLNREDLLRKQRTFDNGSIPHQIHLGELHAILRRQEDFYPFLKDNREKIEKILTFRIPYYVGPLARGNSRFAWMTRKSEETITPWNFEEVVDKGASAQSFIERMTNFDKNLPNEKVLPKHSLLYEYFTVYNELTKVKYVTEGMRKPAFLSGEQKKAIVDLLFKTNRKVTVKQLKEDYFKKIECFDSVEISGVEDRFNASLGTYHDLLKIIKDKDFLDNEENEDILEDIVLTLTLFEDREMIEERLKTYAHLFDDKVMKQLKRRRYTGWGRLSRKLINGIRDKQSGKTILDFLKSDGFANRNFMQLIHDDSLTFKEDIQKAQVSGQGDSLHEHIANLAGSPAIKKGILQTVKVVDELVKVMGRHKPENIVIEMARENQTTQKGQKNSRERMKRIEEGIKELGSQILKEHPVENTQLQNEKLYLYYLQNGRDMYVDQELDINRLSDYDVDHIVPQSFLKDDSIDNKVLTRSDKARGKSDNVPSEEVVKKMKNYWRQLLNAKLITQRKFDNLTKAERGGLSELDKAGFIKRQLVETRQITKHVAQILDSRMNTKYDENDKLIREVKVITLKSKLVSDFRKDFQFYKVREINNYHHAHDAYLNAVVGTALIKKYPKLESEFVYGDYKVYDVRKMIAKSEQEIGKATAKYFFYSNIMNFFKTEITLANGEIRKRPLIETNGETGEIVWDKGRDFATVRKVLSMPQVNIVKKTEVQTGGFSKESILPKRNSDKLIARKKDWDPKKYGGFDSPTVAYSVLVVAKVEKGKSKKLKSVKELLGITIMERSSFEKNPIDFLEAKGYKEVKKDLIIKLPKYSLFELENGRKRMLASAGELQKGNELALPSKYVNFLYLASHYEKLKGSPEDNEQKQLFVEQHKHYLDEIIEQISEFSKRVILADANLDKVLSAYNKHRDKPIREQAENIIHLFTLTNLGAPAAFKYFDTTIDRKRYTSTKEVLDATLIHQSITGLYETRIDLSQLGGDGGPAPGSSGGGGGVLNLEEEYRLHEKPVPSSIDPSWLQLFPTVWAERAGMGLANQVPPVVVELRSGASPVAVRQYPMSKEAREGIRPHIQRFLDLGVLVPCQSPWNTPLLPVKKPGTNDYRPVQDLREINKRVQDIHPTVPNPYNLLSSLPPSHTWYSVLDLKDAFFCLKLHPNSQPLFAFEWRDPEKGNTGQLTWTRLPQGFKNSPTLFNEALHRDLAPFRALNPQVVLLQYVDDLLVAAPTYRDCKEGTQKLLQELSKLGYRVSAKKAQLCQKEVTYLGYLLKEGKRWLTPARKATVMKIPPPTTPRQVREFLGTAGFCRLWIPGFASLAAPLYPLTKPSIPFIWTEEHQKAFDRIKEALLSAPALALPDLTKPFTLYVDERAGVARGVLTQTLGPWRRPVAYLSKKLDPVASGWPTCLKAVAAVALLLKDADKLTLGQNVTVIASHSLESIVRQPPDRWMTNARMTHYQSLLLNERVSFAPPAVLNPATLLPVESEATPVHRCSEILAEETGTRRDLKDQPLPGVPAWYTDGSSFIAEGKRRAGAAIVDGKRTVWASSLPEGTSAQKAELVALTQALRLAEGKDINIYTDSRYAFATAHIHGAIYKQRGWLTSAGKDIKNKEEILALLEAIHLPKRVAIIHCPGHQKGNDPVATGNRRADEAAKQAALSTRVLAETTKPAGKRTADGSEFEKRTADGSEFESPKKKAKVE

SEQ ID NO: 865 - protein, 2092 aa, synthetic construct
  source 1..2092: note = Description of Artificial Sequence: Synthetic polypeptide
MPAAKRVKLDGGDKKYSIGLDIGTNSVGWAVITDEYKVPSKKFKVLGNTDRHSIKKNLIGALLFDSGETAEATRLKRTARRRYTRRKNRICYLQEIFSNEMAKVDDSFFHRLEESFLVEEDKKHERHPIFGNIVDEVAYHEKYPTIYHLRKKLVDSTDKADLRLIYLALAHMIKFRGHFLIEGDLNPDNSDVDKLFIQLVQTYNQLFEENPINASGVDAKAILSARLSKSRRLENLIAQLPGEKKNGLFGNLIALSLGLTPNFKSNFDLAEDAKLQLSKDTYDDDLDNLLAQIGDQYADLFLAAKNLSDAILLSDILRVNTEITKAPLSASMIKRYDEHHQDLTLLKALVRQQLPEKYKEIFFDQSKNGYAGYIDGGASQEEFYKFIKPILEKMDGTEELLVKLNREDLLRKQRTFDNGSIPHQIHLGELHAILRRQEDFYPFLKDNREKIEKILTFRIPYYVGPLARGNSRFAWMTRKSEETITPWNFEEVVDKGASAQSFIERMTNFDKNLPNEKVLPKHSLLYEYFTVYNELTKVKYVTEGMRKPAFLSGEQKKAIVDLLFKTNRKVTVKQLKEDYFKKIECFDSVEISGVEDRFNASLGTYHDLLKIIKDKDFLDNEENEDILEDIVLTLTLFEDREMIEERLKTYAHLFDDKVMKQLKRRRYTGWGRLSRKLINGIRDKQSGKTILDFLKSDGFANRNFMQLIHDDSLTFKEDIQKAQVSGQGDSLHEHIANLAGSPAIKKGILQTVKVVDELVKVMGRHKPENIVIEMARENQTTQKGQKNSRERMKRIEEGIKELGSQILKEHPVENTQLQNEKLYLYYLQNGRDMYVDQELDINRLSDYDVDHIVPQSFLKDDSIDNKVLTRSDKARGKSDNVPSEEVVKKMKNYWRQLLNAKLITQRKFDNLTKAERGGLSELDKAGFIKRQLVETRQITKHVAQILDSRMNTKYDENDKLIREVKVITLKSKLVSDFRKDFQFYKVREINNYHHAHDAYLNAVVGTALIKKYPKLESEFVYGDYKVYDVRKMIAKSEQEIGKATAKYFFYSNIMNFFKTEITLANGEIRKRPLIETNGETGEIVWDKGRDFATVRKVLSMPQVNIVKKTEVQTGGFSKESILPKRNSDKLIARKKDWDPKKYGGFDSPTVAYSVLVVAKVEKGKSKKLKSVKELLGITIMERSSFEKNPIDFLEAKGYKEVKKDLIIKLPKYSLFELENGRKRMLASAGELQKGNELALPSKYVNFLYLASHYEKLKGSPEDNEQKQLFVEQHKHYLDEIIEQISEFSKRVILADANLDKVLSAYNKHRDKPIREQAENIIHLFTLTNLGAPAAFKYFDTTIDRKRYTSTKEVLDATLIHQSITGLYETRIDLSQLGGDGGGGSGSSGGGGGVLNLEEEYRLHEKPVPSSIDPSWLQLFPTVWAERAGMGLANQVPPVVVELRSGASPVAVRQYPMSKEAREGIRPHIQRFLDLGVLVPCQSPWNTPLLPVKKPGTNDYRPVQDLREINKRVQDIHPTVPNPYNLLSSLPPSHTWYSVLDLKDAFFCLKLHPNSQPLFAFEWRDPEKGNTGQLTWTRLPQGFKNSPTLFNEALHRDLAPFRALNPQVVLLQYVDDLLVAAPTYRDCKEGTQKLLQELSKLGYRVSAKKAQLCQKEVTYLGYLLKEGKRWLTPARKATVMKIPPPTTPRQVREFLGTAGFCRLWIPGFASLAAPLYPLTKPSIPFIWTEEHQKAFDRIKEALLSAPALALPDLTKPFTLYVDERAGVARGVLTQTLGPWRRPVAYLSKKLDPVASGWPTCLKAVAAVALLLKDADKLTLGQNVTVIASHSLESIVRQPPDRWMTNARMTHYQSLLLNERVSFAPPAVLNPATLLPVESEATPVHRCSEILAEETGTRRDLKDQPLPGVPAWYTDGSSFIAEGKRRAGAAIVDGKRTVWASSLPEGTSAQKAELVALTQALRLAEGKDINIYTDSRYAFATAHIHGAIYKQRGWLTSAGKDIKNKEEILALLEAIHLPKRVAIIHCPGHQKGNDPVATGNRRADEAAKQAALSTRVLAETTKPAGKRTADGSEFEKRTADGSEFESPKKKAKVE

SEQ ID NO: 866 - protein, 2094 aa, synthetic construct
  source 1..2094: note = Description of Artificial Sequence: Synthetic polypeptide
MPAAKRVKLDGGDKKYSIGLDIGTNSVGWAVITDEYKVPSKKFKVLGNTDRHSIKKNLIGALLFDSGETAEATRLKRTARRRYTRRKNRICYLQEIFSNEMAKVDDSFFHRLEESFLVEEDKKHERHPIFGNIVDEVAYHEKYPTIYHLRKKLVDSTDKADLRLIYLALAHMIKFRGHFLIEGDLNPDNSDVDKLFIQLVQTYNQLFEENPINASGVDAKAILSARLSKSRRLENLIAQLPGEKKNGLFGNLIALSLGLTPNFKSNFDLAEDAKLQLSKDTYDDDLDNLLAQIGDQYADLFLAAKNLSDAILLSDILRVNTEITKAPLSASMIKRYDEHHQDLTLLKALVRQQLPEKYKEIFFDQSKNGYAGYIDGGASQEEFYKFIKPILEKMDGTEELLVKLNREDLLRKQRTFDNGSIPHQIHLGELHAILRRQEDFYPFLKDNREKIEKILTFRIPYYVGPLARGNSRFAWMTRKSEETITPWNFEEVVDKGASAQSFIERMTNFDKNLPNEKVLPKHSLLYEYFTVYNELTKVKYVTEGMRKPAFLSGEQKKAIVDLLFKTNRKVTVKQLKEDYFKKIECFDSVEISGVEDRFNASLGTYHDLLKIIKDKDFLDNEENEDILEDIVLTLTLFEDREMIEERLKTYAHLFDDKVMKQLKRRRYTGWGRLSRKLINGIRDKQSGKTILDFLKSDGFANRNFMQLIHDDSLTFKEDIQKAQVSGQGDSLHEHIANLAGSPAIKKGILQTVKVVDELVKVMGRHKPENIVIEMARENQTTQKGQKNSRERMKRIEEGIKELGSQILKEHPVENTQLQNEKLYLYYLQNGRDMYVDQELDINRLSDYDVDHIVPQSFLKDDSIDNKVLTRSDKARGKSDNVPSEEVVKKMKNYWRQLLNAKLITQRKFDNLTKAERGGLSELDKAGFIKRQLVETRQITKHVAQILDSRMNTKYDENDKLIREVKVITLKSKLVSDFRKDFQFYKVREINNYHHAHDAYLNAVVGTALIKKYPKLESEFVYGDYKVYDVRKMIAKSEQEIGKATAKYFFYSNIMNFFKTEITLANGEIRKRPLIETNGETGEIVWDKGRDFATVRKVLSMPQVNIVKKTEVQTGGFSKESILPKRNSDKLIARKKDWDPKKYGGFDSPTVAYSVLVVAKVEKGKSKKLKSVKELLGITIMERSSFEKNPIDFLEAKGYKEVKKDLIIKLPKYSLFELENGRKRMLASAGELQKGNELALPSKYVNFLYLASHYEKLKGSPEDNEQKQLFVEQHKHYLDEIIEQISEFSKRVILADANLDKVLSAYNKHRDKPIREQAENIIHLFTLTNLGAPAAFKYFDTTIDRKRYTSTKEVLDATLIHQSITGLYETRIDLSQLGGDGGPAPEAAAKGGGGGVLNLEEEYRLHEKPVPSSIDPSWLQLFPTVWAERAGMGLANQVPPVVVELRSGASPVAVRQYPMSKEAREGIRPHIQRFLDLGVLVPCQSPWNTPLLPVKKPGTNDYRPVQDLREINKRVQDIHPTVPNPYNLLSSLPPSHTWYSVLDLKDAFFCLKLHPNSQPLFAFEWRDPEKGNTGQLTWTRLPQGFKNSPTLFNEALHRDLAPFRALNPQVVLLQYVDDLLVAAPTYRDCKEGTQKLLQELSKLGYRVSAKKAQLCQKEVTYLGYLLKEGKRWLTPARKATVMKIPPPTTPRQVREFLGTAGFCRLWIPGFASLAAPLYPLTKPSIPFIWTEEHQKAFDRIKEALLSAPALALPDLTKPFTLYVDERAGVARGVLTQTLGPWRRPVAYLSKKLDPVASGWPTCLKAVAAVALLLKDADKLTLGQNVTVIASHSLESIVRQPPDRWMTNARMTHYQSLLLNERVSFAPPAVLNPATLLPVESEATPVHRCSEILAEETGTRRDLKDQPLPGVPAWYTDGSSFIAEGKRRAGAAIVDGKRTVWASSLPEGTSAQKAELVALTQALRLAEGKDINIYTDSRYAFATAHIHGAIYKQRGWLTSAGKDIKNKEEILALLEAIHLPKRVAIIHCPGHQKGNDPVATGNRRADEAAKQAALSTRVLAETTKPAGKRTADGSEFEKRTADGSEFESPKKKAKVE

SEQ ID NO: 867 - protein, 2089 aa, synthetic construct
  source 1..2089: note = Description of Artificial Sequence: Synthetic polypeptide
MPAAKRVKLDGGDKKYSIGLDIGTNSVGWAVITDEYKVPSKKFKVLGNTDRHSIKKNLIGALLFDSGETAEATRLKRTARRRYTRRKNRICYLQEIFSNEMAKVDDSFFHRLEESFLVEEDKKHERHPIFGNIVDEVAYHEKYPTIYHLRKKLVDSTDKADLRLIYLALAHMIKFRGHFLIEGDLNPDNSDVDKLFIQLVQTYNQLFEENPINASGVDAKAILSARLSKSRRLENLIAQLPGEKKNGLFGNLIALSLGLTPNFKSNFDLAEDAKLQLSKDTYDDDLDNLLAQIGDQYADLFLAAKNLSDAILLSDILRVNTEITKAPLSASMIKRYDEHHQDLTLLKALVRQQLPEKYKEIFFDQSKNGYAGYIDGGASQEEFYKFIKPILEKMDGTEELLVKLNREDLLRKQRTFDNGSIPHQIHLGELHAILRRQEDFYPFLKDNREKIEKILTFRIPYYVGPLARGNSRFAWMTRKSEETITPWNFEEVVDKGASAQSFIERMTNFDKNLPNEKVLPKHSLLYEYFTVYNELTKVKYVTEGMRKPAFLSGEQKKAIVDLLFKTNRKVTVKQLKEDYFKKIECFDSVEISGVEDRFNASLGTYHDLLKIIKDKDFLDNEENEDILEDIVLTLTLFEDREMIEERLKTYAHLFDDKVMKQLKRRRYTGWGRLSRKLINGIRDKQSGKTILDFLKSDGFANRNFMQLIHDDSLTFKEDIQKAQVSGQGDSLHEHIANLAGSPAIKKGILQTVKVVDELVKVMGRHKPENIVIEMARENQTTQKGQKNSRERMKRIEEGIKELGSQILKEHPVENTQLQNEKLYLYYLQNGRDMYVDQELDINRLSDYDVDHIVPQSFLKDDSIDNKVLTRSDKARGKSDNVPSEEVVKKMKNYWRQLLNAKLITQRKFDNLTKAERGGLSELDKAGFIKRQLVETRQITKHVAQILDSRMNTKYDENDKLIREVKVITLKSKLVSDFRKDFQFYKVREINNYHHAHDAYLNAVVGTALIKKYPKLESEFVYGDYKVYDVRKMIAKSEQEIGKATAKYFFYSNIMNFFKTEITLANGEIRKRPLIETNGETGEIVWDKGRDFATVRKVLSMPQVNIVKKTEVQTGGFSKESILPKRNSDKLIARKKDWDPKKYGGFDSPTVAYSVLVVAKVEKGKSKKLKSVKELLGITIMERSSFEKNPIDFLEAKGYKEVKKDLIIKLPKYSLFELENGRKRMLASAGELQKGNELALPSKYVNFLYLASHYEKLKGSPEDNEQKQLFVEQHKHYLDEIIEQISEFSKRVILADANLDKVLSAYNKHRDKPIREQAENIIHLFTLTNLGAPAAFKYFDTTIDRKRYTSTKEVLDATLIHQSITGLYETRIDLSQLGGDGGGSSPAPGGVLNLEEEYRLHEKPVPSSIDPSWLQLFPTVWAERAGMGLANQVPPVVVELRSGASPVAVRQYPMSKEAREGIRPHIQRFLDLGVLVPCQSPWNTPLLPVKKPGTNDYRPVQDLREINKRVQDIHPTVPNPYNLLSSLPPSHTWYSVLDLKDAFFCLKLHPNSQPLFAFEWRDPEKGNTGQLTWTRLPQGFKNSPTLFNEALHRDLAPFRALNPQVVLLQYVDDLLVAAPTYRDCKEGTQKLLQELSKLGYRVSAKKAQLCQKEVTYLGYLLKEGKRWLTPARKATVMKIPPPTTPRQVREFLGTAGFCRLWIPGFASLAAPLYPLTKPSIPFIWTEEHQKAFDRIKEALLSAPALALPDLTKPFTLYVDERAGVARGVLTQTLGPWRRPVAYLSKKLDPVASGWPTCLKAVAAVALLLKDADKLTLGQNVTVIASHSLESIVRQPPDRWMTNARMTHYQSLLLNERVSFAPPAVLNPATLLPVESEATPVHRCSEILAEETGTRRDLKDQPLPGVPAWYTDGSSFIAEGKRRAGAAIVDGKRTVWASSLPEGTSAQKAELVALTQALRLAEGKDINIYTDSRYAFATAHIHGAIYKQRGWLTSAGKDIKNKEEILALLEAIHLPKRVAIIHCPGHQKGNDPVATGNRRADEAAKQAALSTRVLAETTKPAGKRTADGSEFEKRTADGSEFESPKKKAKVE

SEQ ID NO: 868 - protein, 2092 aa, synthetic construct
  source 1..2092: note = Description of Artificial Sequence: Synthetic polypeptide
MPAAKRVKLDGGDKKYSIGLDIGTNSVGWAVITDEYKVPSKKFKVLGNTDRHSIKKNLIGALLFDSGETAEATRLKRTARRRYTRRKNRICYLQEIFSNEMAKVDDSFFHRLEESFLVEEDKKHERHPIFGNIVDEVAYHEKYPTIYHLRKKLVDSTDKADLRLIYLALAHMIKFRGHFLIEGDLNPDNSDVDKLFIQLVQTYNQLFEENPINASGVDAKAILSARLSKSRRLENLIAQLPGEKKNGLFGNLIALSLGLTPNFKSNFDLAEDAKLQLSKDTYDDDLDNLLAQIGDQYADLFLAAKNLSDAILLSDILRVNTEITKAPLSASMIKRYDEHHQDLTLLKALVRQQLPEKYKEIFFDQSKNGYAGYIDGGASQEEFYKFIKPILEKMDGTEELLVKLNREDLLRKQRTFDNGSIPHQIHLGELHAILRRQEDFYPFLKDNREKIEKILTFRIPYYVGPLARGNSRFAWMTRKSEETITPWNFEEVVDKGASAQSFIERMTNFDKNLPNEKVLPKHSLLYEYFTVYNELTKVKYVTEGMRKPAFLSGEQKKAIVDLLFKTNRKVTVKQLKEDYFKKIECFDSVEISGVEDRFNASLGTYHDLLKIIKDKDFLDNEENEDILEDIVLTLTLFEDREMIEERLKTYAHLFDDKVMKQLKRRRYTGWGRLSRKLINGIRDKQSGKTILDFLKSDGFANRNFMQLIHDDSLTFKEDIQKAQVSGQGDSLHEHIANLAGSPAIKKGILQTVKVVDELVKVMGRHKPENIVIEMARENQTTQKGQKNSRERMKRIEEGIKELGSQILKEHPVENTQLQNEKLYLYYLQNGRDMYVDQELDINRLSDYDVDHIVPQSFLKDDSIDNKVLTRSDKARGKSDNVPSEEVVKKMKNYWRQLLNAKLITQRKFDNLTKAERGGLSELDKAGFIKRQLVETRQITKHVAQILDSRMNTKYDENDKLIREVKVITLKSKLVSDFRKDFQFYKVREINNYHHAHDAYLNAVVGTALIKKYPKLESEFVYGDYKVYDVRKMIAKSEQEIGKATAKYFFYSNIMNFFKTEITLANGEIRKRPLIETNGETGEIVWDKGRDFATVRKVLSMPQVNIVKKTEVQTGGFSKESILPKRNSDKLIARKKDWDPKKYGGFDSPTVAYSVLVVAKVEKGKSKKLKSVKELLGITIMERSSFEKNPIDFLEAKGYKEVKKDLIIKLPKYSLFELENGRKRMLASAGELQKGNELALPSKYVNFLYLASHYEKLKGSPEDNEQKQLFVEQHKHYLDEIIEQISEFSKRVILADANLDKVLSAYNKHRDKPIREQAENIIHLFTLTNLGAPAAFKYFDTTIDRKRYTSTKEVLDATLIHQSITGLYETRIDLSQLGGDGGGSSGGGPAPGGVLNLEEEYRLHEKPVPSSIDPSWLQLFPTVWAERAGMGLANQVPPVVVELRSGASPVAVRQYPMSKEAREGIRPHIQRFLDLGVLVPCQSPWNTPLLPVKKPGTNDYRPVQDLREINKRVQDIHPTVPNPYNLLSSLPPSHTWYSVLDLKDAFFCLKLHPNSQPLFAFEWRDPEKGNTGQLTWTRLPQGFKNSPTLFNEALHRDLAPFRALNPQVVLLQYVDDLLVAAPTYRDCKEGTQKLLQELSKLGYRVSAKKAQLCQKEVTYLGYLLKEGKRWLTPARKATVMKIPPPTTPRQVREFLGTAGFCRLWIPGFASLAAPLYPLTKPSIPFIWTEEHQKAFDRIKEALLSAPALALPDLTKPFTLYVDERAGVARGVLTQTLGPWRRPVAYLSKKLDPVASGWPTCLKAVAAVALLLKDADKLTLGQNVTVIASHSLESIVRQPPDRWMTNARMTHYQSLLLNERVSFAPPAVLNPATLLPVESEATPVHRCSEILAEETGTRRDLKDQPLPGVPAWYTDGSSFIAEGKRRAGAAIVDGKRTVWASSLPEGTSAQKAELVALTQALRLAEGKDINIYTDSRYAFATAHIHGAIYKQRGWLTSAGKDIKNKEEILALLEAIHLPKRVAIIHCPGHQKGNDPVATGNRRADEAAKQAALSTRVLAETTKPAGKRTADGSEFEKRTADGSEFESPKKKAKVE

SEQ ID NO: 869 - protein, 2089 aa, synthetic construct
  source 1..2089: note = Description of Artificial Sequence: Synthetic polypeptide
MPAAKRVKLDGGDKKYSIGLDIGTNSVGWAVITDEYKVPSKKFKVLGNTDRHSIKKNLIGALLFDSGETAEATRLKRTARRRYTRRKNRICYLQEIFSNEMAKVDDSFFHRLEESFLVEEDKKHERHPIFGNIVDEVAYHEKYPTIYHLRKKLVDSTDKADLRLIYLALAHMIKFRGHFLIEGDLNPDNSDVDKLFIQLVQTYNQLFEENPINASGVDAKAILSARLSKSRRLENLIAQLPGEKKNGLFGNLIALSLGLTPNFKSNFDLAEDAKLQLSKDTYDDDLDNLLAQIGDQYADLFLAAKNLSDAILLSDILRVNTEITKAPLSASMIKRYDEHHQDLTLLKALVRQQLPEKYKEIFFDQSKNGYAGYIDGGASQEEFYKFIKPILEKMDGTEELLVKLNREDLLRKQRTFDNGSIPHQIHLGELHAILRRQEDFYPFLKDNREKIEKILTFRIPYYVGPLARGNSRFAWMTRKSEETITPWNFEEVVDKGASAQSFIERMTNFDKNLPNEKVLPKHSLLYEYFTVYNELTKVKYVTEGMRKPAFLSGEQKKAIVDLLFKTNRKVTVKQLKEDYFKKIECFDSVEISGVEDRFNASLGTYHDLLKIIKDKDFLDNEENEDILEDIVLTLTLFEDREMIEERLKTYAHLFDDKVMKQLKRRRYTGWGRLSRKLINGIRDKQSGKTILDFLKSDGFANRNFMQLIHDDSLTFKEDIQKAQVSGQGDSLHEHIANLAGSPAIKKGILQTVKVVDELVKVMGRHKPENIVIEMARENQTTQKGQKNSRERMKRIEEGIKELGSQILKEHPVENTQLQNEKLYLYYLQNGRDMYVDQELDINRLSDYDVDHIVPQSFLKDDSIDNKVLTRSDKARGKSDNVPSEEVVKKMKNYWRQLLNAKLITQRKFDNLTKAERGGLSELDKAGFIKRQLVETRQITKHVAQILDSRMNTKYDENDKLIREVKVITLKSKLVSDFRKDFQFYKVREINNYHHAHDAYLNAVVGTALIKKYPKLESEFVYGDYKVYDVRKMIAKSEQEIGKATAKYFFYSNIMNFFKTEITLANGEIRKRPLIETNGETGEIVWDKGRDFATVRKVLSMPQVNIVKKTEVQTGGFSKESILPKRNSDKLIARKKDWDPKKYGGFDSPTVAYSVLVVAKVEKGKSKKLKSVKELLGITIMERSSFEKNPIDFLEAKGYKEVKKDLIIKLPKYSLFELENGRKRMLASAGELQKGNELALPSKYVNFLYLASHYEKLKGSPEDNEQKQLFVEQHKHYLDEIIEQISEFSKRVILADANLDKVLSAYNKHRDKPIREQAENIIHLFTLTNLGAPAAFKYFDTTIDRKRYTSTKEVLDATLIHQSITGLYETRIDLSQLGGDGGGGSGGSGGVLNLEEEYRLHEKPVPSSIDPSWLQLFPTVWAERAGMGLANQVPPVVVELRSGASPVAVRQYPMSKEAREGIRPHIQRFLDLGVLVPCQSPWNTPLLPVKKPGTNDYRPVQDLREINKRVQDIHPTVPNPYNLLSSLPPSHTWYSVLDLKDAFFCLKLHPNSQPLFAFEWRDPEKGNTGQLTWTRLPQGFKNSPTLFNEALHRDLAPFRALNPQVVLLQYVDDLLVAAPTYRDCKEGTQKLLQELSKLGYRVSAKKAQLCQKEVTYLGYLLKEGKRWLTPARKATVMKIPPPTTPRQVREFLGTAGFCRLWIPGFASLAAPLYPLTKPSIPFIWTEEHQKAFDRIKEALLSAPALALPDLTKPFTLYVDERAGVARGVLTQTLGPWRRPVAYLSKKLDPVASGWPTCLKAVAAVALLLKDADKLTLGQNVTVIASHSLESIVRQPPDRWMTNARMTHYQSLLLNERVSFAPPAVLNPATLLPVESEATPVHRCSEILAEETGTRRDLKDQPLPGVPAWYTDGSSFIAEGKRRAGAAIVDGKRTVWASSLPEGTSAQKAELVALTQALRLAEGKDINIYTDSRYAFATAHIHGAIYKQRGWLTSAGKDIKNKEEILALLEAIHLPKRVAIIHCPGHQKGNDPVATGNRRADEAAKQAALSTRVLAETTKPAGKRTADGSEFEKRTADGSEFESPKKKAKVE

SEQ ID NO: 870 - protein, 2094 aa, synthetic construct
  source 1..2094: note = Description of Artificial Sequence: Synthetic polypeptide
MPAAKRVKLDGGDKKYSIGLDIGTNSVGWAVITDEYKVPSKKFKVLGNTDRHSIKKNLIGALLFDSGETAEATRLKRTARRRYTRRKNRICYLQEIFSNEMAKVDDSFFHRLEESFLVEEDKKHERHPIFGNIVDEVAYHEKYPTIYHLRKKLVDSTDKADLRLIYLALAHMIKFRGHFLIEGDLNPDNSDVDKLFIQLVQTYNQLFEENPINASGVDAKAILSARLSKSRRLENLIAQLPGEKKNGLFGNLIALSLGLTPNFKSNFDLAEDAKLQLSKDTYDDDLDNLLAQIGDQYADLFLAAKNLSDAILLSDILRVNTEITKAPLSASMIKRYDEHHQDLTLLKALVRQQLPEKYKEIFFDQSKNGYAGYIDGGASQEEFYKFIKPILEKMDGTEELLVKLNREDLLRKQRTFDNGSIPHQIHLGELHAILRRQEDFYPFLKDNREKIEKILTFRIPYYVGPLARGNSRFAWMTRKSEETITPWNFEEVVDKGASAQSFIERMTNFDKNLPNEKVLPKHSLLYEYFTVYNELTKVKYVTEGMRKPAFLSGEQKKAIVDLLFKTNRKVTVKQLKEDYFKKIECFDSVEISGVEDRFNASLGTYHDLLKIIKDKDFLDNEENEDILEDIVLTLTLFEDREMIEERLKTYAHLFDDKVMKQLKRRRYTGWGRLSRKLINGIRDKQSGKTILDFLKSDGFANRNFMQLIHDDSLTFKEDIQKAQVSGQGDSLHEHIANLAGSPAIKKGILQTVKVVDELVKVMGRHKPENIVIEMARENQTTQKGQKNSRERMKRIEEGIKELGSQILKEHPVENTQLQNEKLYLYYLQNGRDMYVDQELDINRLSDYDVDHIVPQSFLKDDSIDNKVLTRSDKARGKSDNVPSEEVVKKMKNYWRQLLNAKLITQRKFDNLTKAERGGLSELDKAGFIKRQLVETRQITKHVAQILDSRMNTKYDENDKLIREVKVITLKSKLVSDFRKDFQFYKVREINNYHHAHDAYLNAVVGTALIKKYPKLESEFVYGDYKVYDVRKMIAKSEQEIGKATAKYFFYSNIMNFFKTEITLANGEIRKRPLIETNGETGEIVWDKGRDFATVRKVLSMPQVNIVKKTEVQTGGFSKESILPKRNSDKLIARKKDWDPKKYGGFDSPTVAYSVLVVAKVEKGKSKKLKSVKELLGITIMERSSFEKNPIDFLEAKGYKEVKKDLIIKLPKYSLFELENGRKRMLASAGELQKGNELALPSKYVNFLYLASHYEKLKGSPEDNEQKQLFVEQHKHYLDEIIEQISEFSKRVILADANLDKVLSAYNKHRDKPIREQAENIIHLFTLTNLGAPAAFKYFDTTIDRKRYTSTKEVLDATLIHQSITGLYETRIDLSQLGGDGGGGGPAPEAAAKGGVLNLEEEYRLHEKPVPSSIDPSWLQLFPTVWAERAGMGLANQVPPVVVELRSGASPVAVRQYPMSKEAREGIRPHIQRFLDLGVLVPCQSPWNTPLLPVKKPGTNDYRPVQDLREINKRVQDIHPTVPNPYNLLSSLPPSHTWYSVLDLKDAFFCLKLHPNSQPLFAFEWRDPEKGNTGQLTWTRLPQGFKNSPTLFNEALHRDLAPFRALNPQVVLLQYVDDLLVAAPTYRDCKEGTQKLLQELSKLGYRVSAKKAQLCQKEVTYLGYLLKEGKRWLTPARKATVMKIPPPTTPRQVREFLGTAGFCRLWIPGFASLAAPLYPLTKPSIPFIWTEEHQKAFDRIKEALLSAPALALPDLTKPFTLYVDERAGVARGVLTQTLGPWRRPVAYLSKKLDPVASGWPTCLKAVAAVALLLKDADKLTLGQNVTVIASHSLESIVRQPPDRWMTNARMTHYQSLLLNERVSFAPPAVLNPATLLPVESEATPVHRCSEILAEETGTRRDLKDQPLPGVPAWYTDGSSFIAEGKRRAGAAIVDGKRTVWASSLPEGTSAQKAELVALTQALRLAEGKDINIYTDSRYAFATAHIHGAIYKQRGWLTSAGKDIKNKEEILALLEAIHLPKRVAIIHCPGHQKGNDPVATGNRRADEAAKQAALSTRVLAETTKPAGKRTADGSEFEKRTADGSEFESPKKKAKVE

SEQ ID NO: 871 - protein, 2129 aa, synthetic construct
  source 1..2129: note = Description of Artificial Sequence: Synthetic polypeptide
MPAAKRVKLDGGDKKYSIGLDIGTNSVGWAVITDEYKVPSKKFKVLGNTDRHSIKKNLIGALLFDSGETAEATRLKRTARRRYTRRKNRICYLQEIFSNEMAKVDDSFFHRLEESFLVEEDKKHERHPIFGNIVDEVAYHEKYPTIYHLRKKLVDSTDKADLRLIYLALAHMIKFRGHFLIEGDLNPDNSDVDKLFIQLVQTYNQLFEENPINASGVDAKAILSARLSKSRRLENLIAQLPGEKKNGLFGNLIALSLGLTPNFKSNFDLAEDAKLQLSKDTYDDDLDNLLAQIGDQYADLFLAAKNLSDAILLSDILRVNTEITKAPLSASMIKRYDEHHQDLTLLKALVRQQLPEKYKEIFFDQSKNGYAGYIDGGASQEEFYKFIKPILEKMDGTEELLVKLNREDLLRKQRTFDNGSIPHQIHLGELHAILRRQEDFYPFLKDNREKIEKILTFRIPYYVGPLARGNSRFAWMTRKSEETITPWNFEEVVDKGASAQSFIERMTNFDKNLPNEKVLPKHSLLYEYFTVYNELTKVKYVTEGMRKPAFLSGEQKKAIVDLLFKTNRKVTVKQLKEDYFKKIECFDSVEISGVEDRFNASLGTYHDLLKIIKDKDFLDNEENEDILEDIVLTLTLFEDREMIEERLKTYAHLFDDKVMKQLKRRRYTGWGRLSRKLINGIRDKQSGKTILDFLKSDGFANRNFMQLIHDDSLTFKEDIQKAQVSGQGDSLHEHIANLAGSPAIKKGILQTVKVVDELVKVMGRHKPENIVIEMARENQTTQKGQKNSRERMKRIEEGIKELGSQILKEHPVENTQLQNEKLYLYYLQNGRDMYVDQELDINRLSDYDVDHIVPQSFLKDDSIDNKVLTRSDKARGKSDNVPSEEVVKKMKNYWRQLLNAKLITQRKFDNLTKAERGGLSELDKAGFIKRQLVETRQITKHVAQILDSRMNTKYDENDKLIREVKVITLKSKLVSDFRKDFQFYKVREINNYHHAHDAYLNAVVGTALIKKYPKLESEFVYGDYKVYDVRKMIAKSEQEIGKATAKYFFYSNIMNFFKTEITLANGEIRKRPLIETNGETGEIVWDKGRDFATVRKVLSMPQVNIVKKTEVQTGGFSKESILPKRNSDKLIARKKDWDPKKYGGFDSPTVAYSVLVVAKVEKGKSKKLKSVKELLGITIMERSSFEKNPIDFLEAKGYKEVKKDLIIKLPKYSLFELENGRKRMLASAGELQKGNELALPSKYVNFLYLASHYEKLKGSPEDNEQKQLFVEQHKHYLDEIIEQISEFSKRVILADANLDKVLSAYNKHRDKPIREQAENIIHLFTLTNLGAPAAFKYFDTTIDRKRYTSTKEVLDATLIHQSITGLYETRIDLSQLGGDGGAEAAAKEAAAKEAAAKEAAAKALEAEAAAKEAAAKEAAAKEAAAKAGGVLNLEEEYRLHEKPVPSSIDPSWLQLFPTVWAERAGMGLANQVPPVVVELRSGASPVAVRQYPMSKEAREGIRPHIQRFLDLGVLVPCQSPWNTPLLPVKKPGTNDYRPVQDLREINKRVQDIHPTVPNPYNLLSSLPPSHTWYSVLDLKDAFFCLKLHPNSQPLFAFEWRDPEKGNTGQLTWTRLPQGFKNSPTLFNEALHRDLAPFRALNPQVVLLQYVDDLLVAAPTYRDCKEGTQKLLQELSKLGYRVSAKKAQLCQKEVTYLGYLLKEGKRWLTPARKATVMKIPPPTTPRQVREFLGKAGFCRLFIPGFASLAAPLYPLTKPSIPFIWTEEHQKAFDRIKEALLSAPALALPDLTKPFTLYVDERAGVARGVLTQTLGPWRRPVAYLSKKLDPVASGWPTCLKAVAAVALLLKDADKLTLGQNVTVIASHSLESIVRQPPDRWMTNARMTHYQSLLLNERVSFAPPAVLNPATLLPVESEATPVHRCSEILAEETGTRRDLKDQPLPGVPAWYTDGSSFIAEGKRRAGAAIVDGKRTVWASSLPEGTSAQKAELVALTQALRLAEGKDINIYTDSRYAFATAHIHGAIYKQRGWLTSAGKDIKNKEEILALLEAIHLPKRVAIIHCPGHQKGNDPVATGNRRADEAAKQAALSTRVLAETTKPAGKRTADGSEFEKRTADGSEFESPKKKAKVE

SEQ ID NO: 872 - protein, 2092 aa, synthetic construct
  source 1..2092: note = Description of Artificial Sequence: Synthetic polypeptide
MPAAKRVKLDGGDKKYSIGLDIGTNSVGWAVITDEYKVPSKKFKVLGNTDRHSIKKNLIGALLFDSGETAEATRLKRTARRRYTRRKNRICYLQEIFSNEMAKVDDSFFHRLEESFLVEEDKKHERHPIFGNIVDEVAYHEKYPTIYHLRKKLVDSTDKADLRLIYLALAHMIKFRGHFLIEGDLNPDNSDVDKLFIQLVQTYNQLFEENPINASGVDAKAILSARLSKSRRLENLIAQLPGEKKNGLFGNLIALSLGLTPNFKSNFDLAEDAKLQLSKDTYDDDLDNLLAQIGDQYADLFLAAKNLSDAILLSDILRVNTEITKAPLSASMIKRYDEHHQDLTLLKALVRQQLPEKYKEIFFDQSKNGYAGYIDGGASQEEFYKFIKPILEKMDGTEELLVKLNREDLLRKQRTFDNGSIPHQIHLGELHAILRRQEDFYPFLKDNREKIEKILTFRIPYYVGPLARGNSRFAWMTRKSEETITPWNFEEVVDKGASAQSFIERMTNFDKNLPNEKVLPKHSLLYEYFTVYNELTKVKYVTEGMRKPAFLSGEQKKAIVDLLFKTNRKVTVKQLKEDYFKKIECFDSVEISGVEDRFNASLGTYHDLLKIIKDKDFLDNEENEDILEDIVLTLTLFEDREMIEERLKTYAHLFDDKVMKQLKRRRYTGWGRLSRKLINGIRDKQSGKTILDFLKSDGFANRNFMQLIHDDSLTFKEDIQKAQVSGQGDSLHEHIANLAGSPAIKKGILQTVKVVDELVKVMGRHKPENIVIEMARENQTTQKGQKNSRERMKRIEEGIKELGSQILKEHPVENTQLQNEKLYLYYLQNGRDMYVDQELDINRLSDYDVDHIVPQSFLKDDSIDNKVLTRSDKARGKSDNVPSEEVVKKMKNYWRQLLNAKLITQRKFDNLTKAERGGLSELDKAGFIKRQLVETRQITKHVAQILDSRMNTKYDENDKLIREVKVITLKSKLVSDFRKDFQFYKVREINNYHHAHDAYLNAVVGTALIKKYPKLESEFVYGDYKVYDVRKMIAKSEQEIGKATAKYFFYSNIMNFFKTEITLANGEIRKRPLIETNGETGEIVWDKGRDFATVRKVLSMPQVNIVKKTEVQTGGFSKESILPKRNSDKLIARKKDWDPKKYGGFDSPTVAYSVLVVAKVEKGKSKKLKSVKELLGITIMERSSFEKNPIDFLEAKGYKEVKKDLIIKLPKYSLFELENGRKRMLASAGELQKGNELALPSKYVNFLYLASHYEKLKGSPEDNEQKQLFVEQHKHYLDEIIEQISEFSKRVILADANLDKVLSAYNKHRDKPIREQAENIIHLFTLTNLGAPAAFKYFDTTIDRKRYTSTKEVLDATLIHQSITGLYETRIDLSQLGGDGGPAPGGGGSSGGVLNLEEEYRLHEKPVPSSIDPSWLQLFPTVWAERAGMGLANQVPPVVVELRSGASPVAVRQYPMSKEAREGIRPHIQRFLDLGVLVPCQSPWNTPLLPVKKPGTNDYRPVQDLREINKRVQDIHPTVPNPYNLLSSLPPSHTWYSVLDLKDAFFCLKLHPNSQPLFAFEWRDPEKGNTGQLTWTRLPQGFKNSPTLFNEALHRDLAPFRALNPQVVLLQYVDDLLVAAPTYRDCKEGTQKLLQELSKLGYRVSAKKAQLCQKEVTYLGYLLKEGKRWLTPARKATVMKIPPPTTPRQVREFLGKAGFCRLFIPGFASLAAPLYPLTKPSIPFIWTEEHQKAFDRIKEALLSAPALALPDLTKPFTLYVDERAGVARGVLTQTLGPWRRPVAYLSKKLDPVASGWPTCLKAVAAVALLLKDADKLTLGQNVTVIASHSLESIVRQPPDRWMTNARMTHYQSLLLNERVSFAPPAVLNPATLLPVESEATPVHRCSEILAEETGTRRDLKDQPLPGVPAWYTDGSSFIAEGKRRAGAAIVDGKRTVWASSLPEGTSAQKAELVALTQALRLAEGKDINIYTDSRYAFATAHIHGAIYKQRGWLTSAGKDIKNKEEILALLEAIHLPKRVAIIHCPGHQKGNDPVATGNRRADEAAKQAALSTRVLAETTKPAGKRTADGSEFEKRTADGSEFESPKKKAKVE

SEQ ID NO: 873 - protein, 2108 aa, synthetic construct
  source 1..2108: note = Description of Artificial Sequence: Synthetic polypeptide
MPAAKRVKLDGGDKKYSIGLDIGTNSVGWAVITDEYKVPSKKFKVLGNTDRHSIKKNLIGALLFDSGETAEATRLKRTARRRYTRRKNRICYLQEIFSNEMAKVDDSFFHRLEESFLVEEDKKHERHPIFGNIVDEVAYHEKYPTIYHLRKKLVDSTDKADLRLIYLALAHMIKFRGHFLIEGDLNPDNSDVDKLFIQLVQTYNQLFEENPINASGVDAKAILSARLSKSRRLENLIAQLPGEKKNGLFGNLIALSLGLTPNFKSNFDLAEDAKLQLSKDTYDDDLDNLLAQIGDQYADLFLAAKNLSDAILLSDILRVNTEITKAPLSASMIKRYDEHHQDLTLLKALVRQQLPEKYKEIFFDQSKNGYAGYIDGGASQEEFYKFIKPILEKMDGTEELLVKLNREDLLRKQRTFDNGSIPHQIHLGELHAILRRQEDFYPFLKDNREKIEKILTFRIPYYVGPLARGNSRFAWMTRKSEETITPWNFEEVVDKGASAQSFIERMTNFDKNLPNEKVLPKHSLLYEYFTVYNELTKVKYVTEGMRKPAFLSGEQKKAIVDLLFKTNRKVTVKQLKEDYFKKIECFDSVEISGVEDRFNASLGTYHDLLKIIKDKDFLDNEENEDILEDIVLTLTLFEDREMIEERLKTYAHLFDDKVMKQLKRRRYTGWGRLSRKLINGIRDKQSGKTILDFLKSDGFANRNFMQLIHDDSLTFKEDIQKAQVSGQGDSLHEHIANLAGSPAIKKGILQTVKVVDELVKVMGRHKPENIVIEMARENQTTQKGQKNSRERMKRIEEGIKELGSQILKEHPVENTQLQNEKLYLYYLQNGRDMYVDQELDINRLSDYDVDHIVPQSFLKDDSIDNKVLTRSDKARGKSDNVPSEEVVKKMKNYWRQLLNAKLITQRKFDNLTKAERGGLSELDKAGFIKRQLVETRQITKHVAQILDSRMNTKYDENDKLIREVKVITLKSKLVSDFRKDFQFYKVREINNYHHAHDAYLNAVVGTALIKKYPKLESEFVYGDYKVYDVRKMIAKSEQEIGKATAKYFFYSNIMNFFKTEITLANGEIRKRPLIETNGETGEIVWDKGRDFATVRKVLSMPQVNIVKKTEVQTGGFSKESILPKRNSDKLIARKKDWDPKKYGGFDSPTVAYSVLVVAKVEKGKSKKLKSVKELLGITIMERSSFEKNPIDFLEAKGYKEVKKDLIIKLPKYSLFELENGRKRMLASAGELQKGNELALPSKYVNFLYLASHYEKLKGSPEDNEQKQLFVEQHKHYLDEIIEQISEFSKRVILADANLDKVLSAYNKHRDKPIREQAENIIHLFTLTNLGAPAAFKYFDTTIDRKRYTSTKEVLDATLIHQSITGLYETRIDLSQLGGDGGGGGGSGGGGSGGGGSGGGGSGGGGSGGVLNLEEEYRLHEKPVPSSIDPSWLQLFPTVWAERAGMGLANQVPPVVVELRSGASPVAVRQYPMSKEAREGIRPHIQRFLDLGVLVPCQSPWNTPLLPVKKPGTNDYRPVQDLREINKRVQDIHPTVPNPYNLLSSLPPSHTWYSVLDLKDAFFCLKLHPNSQPLFAFEWRDPEKGNTGQLTWTRLPQGFKNSPTLFNEALHRDLAPFRALNPQVVLLQYVDDLLVAAPTYRDCKEGTQKLLQELSKLGYRVSAKKAQLCQKEVTYLGYLLKEGKRWLTPARKATVMKIPPPTTPRQVREFLGKAGFCRLFIPGFASLAAPLYPLTKPSIPFIWTEEHQKAFDRIKEALLSAPALALPDLTKPFTLYVDERAGVARGVLTQTLGPWRRPVAYLSKKLDPVASGWPTCLKAVAAVALLLKDADKLTLGQNVTVIASHSLESIVRQPPDRWMTNARMTHYQSLLLNERVSFAPPAVLNPATLLPVESEATPVHRCSEILAEETGTRRDLKDQPLPGVPAWYTDGSSFIAEGKRRAGAAIVDGKRTVWASSLPEGTSAQKAELVALTQALRLAEGKDINIYTDSRYAFATAHIHGAIYKQRGWLTSAGKDIKNKEEILALLEAIHLPKRVAIIHCPGHQKGNDPVATGNRRADEAAKQAALSTRVLAETTKPAGKRTADGSEFEKRTADGSEFESPKKKAKVE

SEQ ID NO: 874 - protein, 2094 aa, synthetic construct
  source 1..2094: note = Description of Artificial Sequence: Synthetic polypeptide
MPAAKRVKLDGGDKKYSIGLDIGTNSVGWAVITDEYKVPSKKFKVLGNTDRHSIKKNLIGALLFDSGETAEATRLKRTARRRYTRRKNRICYLQEIFSNEMAKVDDSFFHRLEESFLVEEDKKHERHPIFGNIVDEVAYHEKYPTIYHLRKKLVDSTDKADLRLIYLALAHMIKFRGHFLIEGDLNPDNSDVDKLFIQLVQTYNQLFEENPINASGVDAKAILSARLSKSRRLENLIAQLPGEKKNGLFGNLIALSLGLTPNFKSNFDLAEDAKLQLSKDTYDDDLDNLLAQIGDQYADLFLAAKNLSDAILLSDILRVNTEITKAPLSASMIKRYDEHHQDLTLLKALVRQQLPEKYKEIFFDQSKNGYAGYIDGGASQEEFYKFIKPILEKMDGTEELLVKLNREDLLRKQRTFDNGSIPHQIHLGELHAILRRQEDFYPFLKDNREKIEKILTFRIPYYVGPLARGNSRFAWMTRKSEETITPWNFEEVVDKGASAQSFIERMTNFDKNLPNEKVLPKHSLLYEYFTVYNELTKVKYVTEGMRKPAFLSGEQKKAIVDLLFKTNRKVTVKQLKEDYFKKIECFDSVEISGVEDRFNASLGTYHDLLKIIKDKDFLDNEENEDILEDIVLTLTLFEDREMIEERLKTYAHLFDDKVMKQLKRRRYTGWGRLSRKLINGIRDKQSGKTILDFLKSDGFANRNFMQLIHDDSLTFKEDIQKAQVSGQGDSLHEHIANLAGSPAIKKGILQTVKVVDELVKVMGRHKPENIVIEMARENQTTQKGQKNSRERMKRIEEGIKELGSQILKEHPVENTQLQNEKLYLYYLQNGRDMYVDQELDINRLSDYDVDHIVPQSFLKDDSIDNKVLTRSDKARGKSDNVPSEEVVKKMKNYWRQLLNAKLITQRKFDNLTKAERGGLSELDKAGFIKRQLVETRQITKHVAQILDSRMNTKYDENDKLIREVKVITLKSKLVSDFRKDFQFYKVREINNYHHAHDAYLNAVVGTALIKKYPKLESEFVYGDYKVYDVRKMIAKSEQEIGKATAKYFFYSNIMNFFKTEITLANGEIRKRPLIETNGETGEIVWDKGRDFATVRKVLSMPQVNIVKKTEVQTGGFSKESILPKRNSDKLIARKKDWDPKKYGGFDSPTVAYSVLVVAKVEKGKSKKLKSVKELLGITIMERSSFEKNPIDFLEAKGYKEVKKDLIIKLPKYSLFELENGRKRMLASAGELQKGNELALPSKYVNFLYLASHYEKLKGSPEDNEQKQLFVEQHKHYLDEIIEQISEFSKRVILADANLDKVLSAYNKHRDKPIREQAENIIHLFTLTNLGAPAAFKYFDTTIDRKRYTSTKEVLDATLIHQSITGLYETRIDLSQLGGDGGEAAAKPAPGSSGGVLNLEEEYRLHEKPVPSSIDPSWLQLFPTVWAERAGMGLANQVPPVVVELRSGASPVAVRQYPMSKEAREGIRPHIQRFLDLGVLVPCQSPWNTPLLPVKKPGTNDYRPVQDLREINKRVQDIHPTVPNPYNLLSSLPPSHTWYSVLDLKDAFFCLKLHPNSQPLFAFEWRDPEKGNTGQLTWTRLPQGFKNSPTLFNEALHRDLAPFRALNPQVVLLQYVDDLLVAAPTYRDCKEGTQKLLQELSKLGYRVSAKKAQLCQKEVTYLGYLLKEGKRWLTPARKATVMKIPPPTTPRQVREFLGKAGFCRLFIPGFASLAAPLYPLTKPSIPFIWTEEHQKAFDRIKEALLSAPALALPDLTKPFTLYVDERAGVARGVLTQTLGPWRRPVAYLSKKLDPVASGWPTCLKAVAAVALLLKDADKLTLGQNVTVIASHSLESIVRQPPDRWMTNARMTHYQSLLLNERVSFAPPAVLNPATLLPVESEATPVHRCSEILAEETGTRRDLKDQPLPGVPAWYTDGSSFIAEGKRRAGAAIVDGKRTVWASSLPEGTSAQKAELVALTQALRLAEGKDINIYTDSRYAFATAHIHGAIYKQRGWLTSAGKDIKNKEEILALLEAIHLPKRVAIIHCPGHQKGNDPVATGNRRADEAAKQAALSTRVLAETTKPAGKRTADGSEFEKRTADGSEFESPKKKAKVE

SEQ ID NO: 875 - protein, 2092 aa, synthetic construct
  source 1..2092: note = Description of Artificial Sequence: Synthetic polypeptide
MPAAKRVKLDGGDKKYSIGLDIGTNSVGWAVITDEYKVPSKKFKVLGNTDRHSIKKNLIGALLFDSGETAEATRLKRTARRRYTRRKNRICYLQEIFSNEMAKVDDSFFHRLEESFLVEEDKKHERHPIFGNIVDEVAYHEKYPTIYHLRKKLVDSTDKADLRLIYLALAHMIKFRGHFLIEGDLNPDNSDVDKLFIQLVQTYNQLFEENPINASGVDAKAILSARLSKSRRLENLIAQLPGEKKNGLFGNLIALSLGLTPNFKSNFDLAEDAKLQLSKDTYDDDLDNLLAQIGDQYADLFLAAKNLSDAILLSDILRVNTEITKAPLSASMIKRYDEHHQDLTLLKALVRQQLPEKYKEIFFDQSKNGYAGYIDGGASQEEFYKFIKPILEKMDGTEELLVKLNREDLLRKQRTFDNGSIPHQIHLGELHAILRRQEDFYPFLKDNREKIEKILTFRIPYYVGPLARGNSRFAWMTRKSEETITPWNFEEVVDKGASAQSFIERMTNFDKNLPNEKVLPKHSLLYEYFTVYNELTKVKYVTEGMRKPAFLSGEQKKAIVDLLFKTNRKVTVKQLKEDYFKKIECFDSVEISGVEDRFNASLGTYHDLLKIIKDKDFLDNEENEDILEDIVLTLTLFEDREMIEERLKTYAHLFDDKVMKQLKRRRYTGWGRLSRKLINGIRDKQSGKTILDFLKSDGFANRNFMQLIHDDSLTFKEDIQKAQVSGQGDSLHEHIANLAGSPAIKKGILQTVKVVDELVKVMGRHKPENIVIEMARENQTTQKGQKNSRERMKRIEEGIKELGSQILKEHPVENTQLQNEKLYLYYLQNGRDMYVDQELDINRLSDYDVDHIVPQSFLKDDSIDNKVLTRSDKARGKSDNVPSEEVVKKMKNYWRQLLNAKLITQRKFDNLTKAERGGLSELDKAGFIKRQLVETRQITKHVAQILDSRMNTKYDENDKLIREVKVITLKSKLVSDFRKDFQFYKVREINNYHHAHDAYLNAVVGTALIKKYPKLESEFVYGDYKVYDVRKMIAKSEQEIGKATAKYFFYSNIMNFFKTEITLANGEIRKRPLIETNGETGEIVWDKGRDFATVRKVLSMPQVNIVKKTEVQTGGFSKESILPKRNSDKLIARKKDWDPKKYGGFDSPTVAYSVLVVAKVEKGKSKKLKSVKELLGITIMERSSFEKNPIDFLEAKGYKEVKKDLIIKLPKYSLFELENGRKRMLASAGELQKGNELALPSKYVNFLYLASHYEKLKGSPEDNEQKQLFVEQHKHYLDEIIEQISEFSKRVILADANLDKVLSAYNKHRDKPIREQAENIIHLFTLTNLGAPAAFKYFDTTIDRKRYTSTKEVLDATLIHQSITGLYETRIDLSQLGGDGGGGSPAPGSSGGVLNLEEEYRLHEKPVPSSIDPSWLQLFPTVWAERAGMGLANQVPPVVVELRSGASPVAVRQYPMSKEAREGIRPHIQRFLDLGVLVPCQSPWNTPLLPVKKPGTNDYRPVQDLREINKRVQDIHPTVPNPYNLLSSLPPSHTWYSVLDLKDAFFCLKLHPNSQPLFAFEWRDPEKGNTGQLTWTRLPQGFKNSPTLFNEALHRDLAPFRALNPQVVLLQYVDDLLVAAPTYRDCKEGTQKLLQELSKLGYRVSAKKAQLCQKEVTYLGYLLKEGKRWLTPARKATVMKIPPPTTPRQVREFLGKAGFCRLFIPGFASLAAPLYPLTKPSIPFIWTEEHQKAFDRIKEALLSAPALALPDLTKPFTLYVDERAGVARGVLTQTLGPWRRPVAYLSKKLDPVASGWPTCLKAVAAVALLLKDADKLTLGQNVTVIASHSLESIVRQPPDRWMTNARMTHYQSLLLNERVSFAPPAVLNPATLLPVESEATPVHRCSEILAEETGTRRDLKDQPLPGVPAWYTDGSSFIAEGKRRAGAAIVDGKRTVWASSLPEGTSAQKAELVALTQALRLAEGKDINIYTDSRYAFATAHIHGAIYKQRGWLTSAGKDIKNKEEILALLEAIHLPKRVAIIHCPGHQKGNDPVATGNRRADEAAKQAALSTRVLAETTKPAGKRTADGSEFEKRTADGSEFESPKKKAKVE

SEQ ID NO: 876 - protein, 2086 aa, synthetic construct
  source 1..2086: note = Description of Artificial Sequence: Synthetic polypeptide
MPAAKRVKLDGGDKKYSIGLDIGTNSVGWAVITDEYKVPSKKFKVLGNTDRHSIKKNLIGALLFDSGETAEATRLKRTARRRYTRRKNRICYLQEIFSNEMAKVDDSFFHRLEESFLVEEDKKHERHPIFGNIVDEVAYHEKYPTIYHLRKKLVDSTDKADLRLIYLALAHMIKFRGHFLIEGDLNPDNSDVDKLFIQLVQTYNQLFEENPINASGVDAKAILSARLSKSRRLENLIAQLPGEKKNGLFGNLIALSLGLTPNFKSNFDLAEDAKLQLSKDTYDDDLDNLLAQIGDQYADLFLAAKNLSDAILLSDILRVNTEITKAPLSASMIKRYDEHHQDLTLLKALVRQQLPEKYKEIFFDQSKNGYAGYIDGGASQEEFYKFIKPILEKMDGTEELLVKLNREDLLRKQRTFDNGSIPHQIHLGELHAILRRQEDFYPFLKDNREKIEKILTFRIPYYVGPLARGNSRFAWMTRKSEETITPWNFEEVVDKGASAQSFIERMTNFDKNLPNEKVLPKHSLLYEYFTVYNELTKVKYVTEGMRKPAFLSGEQKKAIVDLLFKTNRKVTVKQLKEDYFKKIECFDSVEISGVEDRFNASLGTYHDLLKIIKDKDFLDNEENEDILEDIVLTLTLFEDREMIEERLKTYAHLFDDKVMKQLKRRRYTGWGRLSRKLINGIRDKQSGKTILDFLKSDGFANRNFMQLIHDDSLTFKEDIQKAQVSGQGDSLHEHIANLAGSPAIKKGILQTVKVVDELVKVMGRHKPENIVIEMARENQTTQKGQKNSRERMKRIEEGIKELGSQILKEHPVENTQLQNEKLYLYYLQNGRDMYVDQELDINRLSDYDVDHIVPQSFLKDDSIDNKVLTRSDKARGKSDNVPSEEVVKKMKNYWRQLLNAKLITQRKFDNLTKAERGGLSELDKAGFIKRQLVETRQITKHVAQILDSRMNTKYDENDKLIREVKVITLKSKLVSDFRKDFQFYKVREINNYHHAHDAYLNAVVGTALIKKYPKLESEFVYGDYKVYDVRKMIAKSEQEIGKATAKYFFYSNIMNFFKTEITLANGEIRKRPLIETNGETGEIVWDKGRDFATVRKVLSMPQVNIVKKTEVQTGGFSKESILPKRNSDKLIARKKDWDPKKYGGFDSPTVAYSVLVVAKVEKGKSKKLKSVKELLGITIMERSSFEKNPIDFLEAKGYKEVKKDLIIKLPKYSLFELENGRKRMLASAGELQKGNELALPSKYVNFLYLASHYEKLKGSPEDNEQKQLFVEQHKHYLDEIIEQISEFSKRVILADANLDKVLSAYNKHRDKPIREQAENIIHLFTLTNLGAPAAFKYFDTTIDRKRYTSTKEVLDATLIHQSITGLYETRIDLSQLGGDGGGSSGGVLNLEEEYRLHEKPVPSSIDPSWLQLFPTVWAERAGMGLANQVPPVVVELRSGASPVAVRQYPMSKEAREGIRPHIQRFLDLGVLVPCQSPWNTPLLPVKKPGTNDYRPVQDLREINKRVQDIHPTVPNPYNLLSSLPPSHTWYSVLDLKDAFFCLKLHPNSQPLFAFEWRDPEKGNTGQLTWTRLPQGFKNSPTLFNEALHRDLAPFRALNPQVVLLQYVDDLLVAAPTYRDCKEGTQKLLQELSKLGYRVSAKKAQLCQKEVTYLGYLLKEGKRWLTPARKATVMKIPPPTTPRQVREFLGKAGFCRLFIPGFASLAAPLYPLTKPSIPFIWTEEHQKAFDRIKEALLSAPALALPDLTKPFTLYVDERAGVARGVLTQTLGPWRRPVAYLSKKLDPVASGWPTCLKAVAAVALLLKDADKLTLGQNVTVIASHSLESIVRQPPDRWMTNARMTHYQSLLLNERVSFAPPAVLNPATLLPVESEATPVHRCSEILAEETGTRRDLKDQPLPGVPAWYTDGSSFIAEGKRRAGAAIVDGKRTVWASSLPEGTSAQKAELVALTQALRLAEGKDINIYTDSRYAFATAHIHGAIYKQRGWLTSAGKDIKNKEEILALLEAIHLPKRVAIIHCPGHQKGNDPVATGNRRADEAAKQAALSTRVLAETTKPAGKRTADGSEFEKRTADGSEFESPKKKAKVE

SEQ ID NO: 877 - protein, 2099 aa, synthetic construct
  source 1..2099: note = Description of Artificial Sequence: Synthetic polypeptide
MPAAKRVKLDGGDKKYSIGLDIGTNSVGWAVITDEYKVPSKKFKVLGNTDRHSIKKNLIGALLFDSGETAEATRLKRTARRRYTRRKNRICYLQEIFSNEMAKVDDSFFHRLEESFLVEEDKKHERHPIFGNIVDEVAYHEKYPTIYHLRKKLVDSTDKADLRLIYLALAHMIKFRGHFLIEGDLNPDNSDVDKLFIQLVQTYNQLFEENPINASGVDAKAILSARLSKSRRLENLIAQLPGEKKNGLFGNLIALSLGLTPNFKSNFDLAEDAKLQLSKDTYDDDLDNLLAQIGDQYADLFLAAKNLSDAILLSDILRVNTEITKAPLSASMIKRYDEHHQDLTLLKALVRQQLPEKYKEIFFDQSKNGYAGYIDGGASQEEFYKFIKPILEKMDGTEELLVKLNREDLLRKQRTFDNGSIPHQIHLGELHAILRRQEDFYPFLKDNREKIEKILTFRIPYYVGPLARGNSRFAWMTRKSEETITPWNFEEVVDKGASAQSFIERMTNFDKNLPNEKVLPKHSLLYEYFTVYNELTKVKYVTEGMRKPAFLSGEQKKAIVDLLFKTNRKVTVKQLKEDYFKKIECFDSVEISGVEDRFNASLGTYHDLLKIIKDKDFLDNEENEDILEDIVLTLTLFEDREMIEERLKTYAHLFDDKVMKQLKRRRYTGWGRLSRKLINGIRDKQSGKTILDFLKSDGFANRNFMQLIHDDSLTFKEDIQKAQVSGQGDSLHEHIANLAGSPAIKKGILQTVKVVDELVKVMGRHKPENIVIEMARENQTTQKGQKNSRERMKRIEEGIKELGSQILKEHPVENTQLQNEKLYLYYLQNGRDMYVDQELDINRLSDYDVDHIVPQSFLKDDSIDNKVLTRSDKARGKSDNVPSEEVVKKMKNYWRQLLNAKLITQRKFDNLTKAERGGLSELDKAGFIKRQLVETRQITKHVAQILDSRMNTKYDENDKLIREVKVITLKSKLVSDFRKDFQFYKVREINNYHHAHDAYLNAVVGTALIKKYPKLESEFVYGDYKVYDVRKMIAKSEQEIGKATAKYFFYSNIMNFFKTEITLANGEIRKRPLIETNGETGEIVWDKGRDFATVRKVLSMPQVNIVKKTEVQTGGFSKESILPKRNSDKLIARKKDWDPKKYGGFDSPTVAYSVLVVAKVEKGKSKKLKSVKELLGITIMERSSFEKNPIDFLEAKGYKEVKKDLIIKLPKYSLFELENGRKRMLASAGELQKGNELALPSKYVNFLYLASHYEKLKGSPEDNEQKQLFVEQHKHYLDEIIEQISEFSKRVILADANLDKVLSAYNKHRDKPIREQAENIIHLFTLTNLGAPAAFKYFDTTIDRKRYTSTKEVLDATLIHQSITGLYETRIDLSQLGGDGGSGSETPGTSESATPESGGVLNLEEEYRLHEKPVPSSIDPSWLQLFPTVWAERAGMGLANQVPPVVVELRSGASPVAVRQYPMSKEAREGIRPHIQRFLDLGVLVPCQSPWNTPLLPVKKPGTNDYRPVQDLREINKRVQDIHPTVPNPYNLLSSLPPSHTWYSVLDLKDAFFCLKLHPNSQPLFAFEWRDPEKGNTGQLTWTRLPQGFKNSPTLFNEALHRDLAPFRALNPQVVLLQYVDDLLVAAPTYRDCKEGTQKLLQELSKLGYRVSAKKAQLCQKEVTYLGYLLKEGKRWLTPARKATVMKIPPPTTPRQVREFLGKAGFCRLFIPGFASLAAPLYPLTKPSIPFIWTEEHQKAFDRIKEALLSAPALALPDLTKPFTLYVDERAGVARGVLTQTLGPWRRPVAYLSKKLDPVASGWPTCLKAVAAVALLLKDADKLTLGQNVTVIASHSLESIVRQPPDRWMTNARMTHYQSLLLNERVSFAPPAVLNPATLLPVESEATPVHRCSEILAEETGTRRDLKDQPLPGVPAWYTDGSSFIAEGKRRAGAAIVDGKRTVWASSLPEGTSAQKAELVALTQALRLAEGKDINIYTDSRYAFATAHIHGAIYKQRGWLTSAGKDIKNKEEILALLEAIHLPKRVAIIHCPGHQKGNDPVATGNRRADEAAKQAALSTRVLAETTKPAGKRTADGSEFEKRTADGSEFESPKKKAKVE

SEQ ID NO: 878 - protein, 2092 aa, synthetic construct
  source 1..2092: note = Description of Artificial Sequence: Synthetic polypeptide
MPAAKRVKLDGGDKKYSIGLDIGTNSVGWAVITDEYKVPSKKFKVLGNTDRHSIKKNLIGALLFDSGETAEATRLKRTARRRYTRRKNRICYLQEIFSNEMAKVDDSFFHRLEESFLVEEDKKHERHPIFGNIVDEVAYHEKYPTIYHLRKKLVDSTDKADLRLIYLALAHMIKFRGHFLIEGDLNPDNSDVDKLFIQLVQTYNQLFEENPINASGVDAKAILSARLSKSRRLENLIAQLPGEKKNGLFGNLIALSLGLTPNFKSNFDLAEDAKLQLSKDTYDDDLDNLLAQIGDQYADLFLAAKNLSDAILLSDILRVNTEITKAPLSASMIKRYDEHHQDLTLLKALVRQQLPEKYKEIFFDQSKNGYAGYIDGGASQEEFYKFIKPILEKMDGTEELLVKLNREDLLRKQRTFDNGSIPHQIHLGELHAILRRQEDFYPFLKDNREKIEKILTFRIPYYVGPLARGNSRFAWMTRKSEETITPWNFEEVVDKGASAQSFIERMTNFDKNLPNEKVLPKHSLLYEYFTVYNELTKVKYVTEGMRKPAFLSGEQKKAIVDLLFKTNRKVTVKQLKEDYFKKIECFDSVEISGVEDRFNASLGTYHDLLKIIKDKDFLDNEENEDILEDIVLTLTLFEDREMIEERLKTYAHLFDDKVMKQLKRRRYTGWGRLSRKLINGIRDKQSGKTILDFLKSDGFANRNFMQLIHDDSLTFKEDIQKAQVSGQGDSLHEHIANLAGSPAIKKGILQTVKVVDELVKVMGRHKPENIVIEMARENQTTQKGQKNSRERMKRIEEGIKELGSQILKEHPVENTQLQNEKLYLYYLQNGRDMYVDQELDINRLSDYDVDHIVPQSFLKDDSIDNKVLTRSDKARGKSDNVPSEEVVKKMKNYWRQLLNAKLITQRKFDNLTKAERGGLSELDKAGFIKRQLVETRQITKHVAQILDSRMNTKYDENDKLIREVKVITLKSKLVSDFRKDFQFYKVREINNYHHAHDAYLNAVVGTALIKKYPKLESEFVYGDYKVYDVRKMIAKSEQEIGKATAKYFFYSNIMNFFKTEITLANGEIRKRPLIETNGETGEIVWDKGRDFATVRKVLSMPQVNIVKKTEVQTGGFSKESILPKRNSDKLIARKKDWDPKKYGGFDSPTVAYSVLVVAKVEKGKSKKLKSVKELLGITIMERSSFEKNPIDFLEAKGYKEVKKDLIIKLPKYSLFELENGRKRMLASAGELQKGNELALPSKYVNFLYLASHYEKLKGSPEDNEQKQLFVEQHKHYLDEIIEQISEFSKRVILADANLDKVLSAYNKHRDKPIREQAENIIHLFTLTNLGAPAAFKYFDTTIDRKRYTSTKEVLDATLIHQSITGLYETRIDLSQLGGDGGGGGPAPGGSGGVLNLEEEYRLHEKPVPSSIDPSWLQLFPTVWAERAGMGLANQVPPVVVELRSGASPVAVRQYPMSKEAREGIRPHIQRFLDLGVLVPCQSPWNTPLLPVKKPGTNDYRPVQDLREINKRVQDIHPTVPNPYNLLSSLPPSHTWYSVLDLKDAFFCLKLHPNSQPLFAFEWRDPEKGNTGQLTWTRLPQGFKNSPTLFNEALHRDLAPFRALNPQVVLLQYVDDLLVAAPTYRDCKEGTQKLLQELSKLGYRVSAKKAQLCQKEVTYLGYLLKEGKRWLTPARKATVMKIPPPTTPRQVREFLGKAGFCRLFIPGFASLAAPLYPLTKPSIPFIWTEEHQKAFDRIKEALLSAPALALPDLTKPFTLYVDERAGVARGVLTQTLGPWRRPVAYLSKKLDPVASGWPTCLKAVAAVALLLKDADKLTLGQNVTVIASHSLESIVRQPPDRWMTNARMTHYQSLLLNERVSFAPPAVLNPATLLPVESEATPVHRCSEILAEETGTRRDLKDQPLPGVPAWYTDGSSFIAEGKRRAGAAIVDGKRTVWASSLPEGTSAQKAELVALTQALRLAEGKDINIYTDSRYAFATAHIHGAIYKQRGWLTSAGKDIKNKEEILALLEAIHLPKRVAIIHCPGHQKGNDPVATGNRRADEAAKQAALSTRVLAETTKPAGKRTADGSEFEKRTADGSEFESPKKKAKVE

SEQ ID NO: 879 - protein, 2108 aa, synthetic construct
  source 1..2108: note = Description of Artificial Sequence: Synthetic polypeptide
MPAAKRVKLDGGDKKYSIGLDIGTNSVGWAVITDEYKVPSKKFKVLGNTDRHSIKKNLIGALLFDSGETAEATRLKRTARRRYTRRKNRICYLQEIFSNEMAKVDDSFFHRLEESFLVEEDKKHERHPIFGNIVDEVAYHEKYPTIYHLRKKLVDSTDKADLRLIYLALAHMIKFRGHFLIEGDLNPDNSDVDKLFIQLVQTYNQLFEENPINASGVDAKAILSARLSKSRRLENLIAQLPGEKKNGLFGNLIALSLGLTPNFKSNFDLAEDAKLQLSKDTYDDDLDNLLAQIGDQYADLFLAAKNLSDAILLSDILRVNTEITKAPLSASMIKRYDEHHQDLTLLKALVRQQLPEKYKEIFFDQSKNGYAGYIDGGASQEEFYKFIKPILEKMDGTEELLVKLNREDLLRKQRTFDNGSIPHQIHLGELHAILRRQEDFYPFLKDNREKIEKILTFRIPYYVGPLARGNSRFAWMTRKSEETITPWNFEEVVDKGASAQSFIERMTNFDKNLPNEKVLPKHSLLYEYFTVYNELTKVKYVTEGMRKPAFLSGEQKKAIVDLLFKTNRKVTVKQLKEDYFKKIECFDSVEISGVEDRFNASLGTYHDLLKIIKDKDFLDNEENEDILEDIVLTLTLFEDREMIEERLKTYAHLFDDKVMKQLKRRRYTGWGRLSRKLINGIRDKQSGKTILDFLKSDGFANRNFMQLIHDDSLTFKEDIQKAQVSGQGDSLHEHIANLAGSPAIKKGILQTVKVVDELVKVMGRHKPENIVIEMARENQTTQKGQKNSRERMKRIEEGIKELGSQILKEHPVENTQLQNEKLYLYYLQNGRDMYVDQELDINRLSDYDVDHIVPQSFLKDDSIDNKVLTRSDKARGKSDNVPSEEVVKKMKNYWRQLLNAKLITQRKFDNLTKAERGGLSELDKAGFIKRQLVETRQITKHVAQILDSRMNTKYDENDKLIREVKVITLKSKLVSDFRKDFQFYKVREINNYHHAHDAYLNAVVGTALIKKYPKLESEFVYGDYKVYDVRKMIAKSEQEIGKATAKYFFYSNIMNFFKTEITLANGEIRKRPLIETNGETGEIVWDKGRDFATVRKVLSMPQVNIVKKTEVQTGGFSKESILPKRNSDKLIARKKDWDPKKYGGFDSPTVAYSVLVVAKVEKGKSKKLKSVKELLGITIMERSSFEKNPIDFLEAKGYKEVKKDLIIKLPKYSLFELENGRKRMLASAGELQKGNELALPSKYVNFLYLASHYEKLKGSPEDNEQKQLFVEQHKHYLDEIIEQISEFSKRVILADANLDKVLSAYNKHRDKPIREQAENIIHLFTLTNLGAPAAFKYFDTTIDRKRYTSTKEVLDATLIHQSITGLYETRIDLSQLGGDGGEAAAKEAAAKEAAAKEAAAKEAAAKGGVLNLEEEYRLHEKPVPSSIDPSWLQLFPTVWAERAGMGLANQVPPVVVELRSGASPVAVRQYPMSKEAREGIRPHIQRFLDLGVLVPCQSPWNTPLLPVKKPGTNDYRPVQDLREINKRVQDIHPTVPNPYNLLSSLPPSHTWYSVLDLKDAFFCLKLHPNSQPLFAFEWRDPEKGNTGQLTWTRLPQGFKNSPTLFNEALHRDLAPFRALNPQVVLLQYVDDLLVAAPTYRDCKEGTQKLLQELSKLGYRVSAKKAQLCQKEVTYLGYLLKEGKRWLTPARKATVMKIPPPTTPRQVREFLGKAGFCRLFIPGFASLAAPLYPLTKPSIPFIWTEEHQKAFDRIKEALLSAPALALPDLTKPFTLYVDERAGVARGVLTQTLGPWRRPVAYLSKKLDPVASGWPTCLKAVAAVALLLKDADKLTLGQNVTVIASHSLESIVRQPPDRWMTNARMTHYQSLLLNERVSFAPPAVLNPATLLPVESEATPVHRCSEILAEETGTRRDLKDQPLPGVPAWYTDGSSFIAEGKRRAGAAIVDGKRTVWASSLPEGTSAQKAELVALTQALRLAEGKDINIYTDSRYAFATAHIHGAIYKQRGWLTSAGKDIKNKEEILALLEAIHLPKRVAIIHCPGHQKGNDPVATGNRRADEAAKQAALSTRVLAETTKPAGKRTADGSEFEKRTADGSEFESPKKKAKVE

SEQ ID NO: 880 - protein, 2092 aa, synthetic construct
  source 1..2092: note = Description of Artificial Sequence: Synthetic polypeptide
MPAAKRVKLDGGDKKYSIGLDIGTNSVGWAVITDEYKVPSKKFKVLGNTDRHSIKKNLIGALLFDSGETAEATRLKRTARRRYTRRKNRICYLQEIFSNEMAKVDDSFFHRLEESFLVEEDKKHERHPIFGNIVDEVAYHEKYPTIYHLRKKLVDSTDKADLRLIYLALAHMIKFRGHFLIEGDLNPDNSDVDKLFIQLVQTYNQLFEENPINASGVDAKAILSARLSKSRRLENLIAQLPGEKKNGLFGNLIALSLGLTPNFKSNFDLAEDAKLQLSKDTYDDDLDNLLAQIGDQYADLFLAAKNLSDAILLSDILRVNTEITKAPLSASMIKRYDEHHQDLTLLKALVRQQLPEKYKEIFFDQSKNGYAGYIDGGASQEEFYKFIKPILEKMDGTEELLVKLNREDLLRKQRTFDNGSIPHQIHLGELHAILRRQEDFYPFLKDNREKIEKILTFRIPYYVGPLARGNSRFAWMTRKSEETITPWNFEEVVDKGASAQSFIERMTNFDKNLPNEKVLPKHSLLYEYFTVYNELTKVKYVTEGMRKPAFLSGEQKKAIVDLLFKTNRKVTVKQLKEDYFKKIECFDSVEISGVEDRFNASLGTYHDLLKIIKDKDFLDNEENEDILEDIVLTLTLFEDREMIEERLKTYAHLFDDKVMKQLKRRRYTGWGRLSRKLINGIRDKQSGKTILDFLKSDGFANRNFMQLIHDDSLTFKEDIQKAQVSGQGDSLHEHIANLAGSPAIKKGILQTVKVVDELVKVMGRHKPENIVIEMARENQTTQKGQKNSRERMKRIEEGIKELGSQILKEHPVENTQLQNEKLYLYYLQNGRDMYVDQELDINRLSDYDVDHIVPQSFLKDDSIDNKVLTRSDKARGKSDNVPSEEVVKKMKNYWRQLLNAKLITQRKFDNLTKAERGGLSELDKAGFIKRQLVETRQITKHVAQILDSRMNTKYDENDKLIREVKVITLKSKLVSDFRKDFQFYKVREINNYHHAHDAYLNAVVGTALIKKYPKLESEFVYGDYKVYDVRKMIAKSEQEIGKATAKYFFYSNIMNFFKTEITLANGEIRKRPLIETNGETGEIVWDKGRDFATVRKVLSMPQVNIVKKTEVQTGGFSKESILPKRNSDKLIARKKDWDPKKYGGFDSPTVAYSVLVVAKVEKGKSKKLKSVKELLGITIMERSSFEKNPIDFLEAKGYKEVKKDLIIKLPKYSLFELENGRKRMLASAGELQKGNELALPSKYVNFLYLASHYEKLKGSPEDNEQKQLFVEQHKHYLDEIIEQISEFSKRVILADANLDKVLSAYNKHRDKPIREQAENIIHLFTLTNLGAPAAFKYFDTTIDRKRYTSTKEVLDATLIHQSITGLYETRIDLSQLGGDGGPAPGGSGSSGGVLNLEEEYRLHEKPVPSSIDPSWLQLFPTVWAERAGMGLANQVPPVVVELRSGASPVAVRQYPMSKEAREGIRPHIQRFLDLGVLVPCQSPWNTPLLPVKKPGTNDYRPVQDLREINKRVQDIHPTVPNPYNLLSSLPPSHTWYSVLDLKDAFFCLKLHPNSQPLFAFEWRDPEKGNTGQLTWTRLPQGFKNSPTLFNEALHRDLAPFRALNPQVVLLQYVDDLLVAAPTYRDCKEGTQKLLQELSKLGYRVSAKKAQLCQKEVTYLGYLLKEGKRWLTPARKATVMKIPPPTTPRQVREFLGKAGFCRLFIPGFASLAAPLYPLTKPSIPFIWTEEHQKAFDRIKEALLSAPALALPDLTKPFTLYVDERAGVARGVLTQTLGPWRRPVAYLSKKLDPVASGWPTCLKAVAAVALLLKDADKLTLGQNVTVIASHSLESIVRQPPDRWMTNARMTHYQSLLLNERVSFAPPAVLNPATLLPVESEATPVHRCSEILAEETGTRRDLKDQPLPGVPAWYTDGSSFIAEGKRRAGAAIVDGKRTVWASSLPEGTSAQKAELVALTQALRLAEGKDINIYTDSRYAFATAHIHGAIYKQRGWLTSAGKDIKNKEEILALLEAIHLPKRVAIIHCPGHQKGNDPVATGNRRADEAAKQAALSTRVLAETTKPAGKRTADGSEFEKRTADGSEFESPKKKAKVE

SEQ ID NO: 881 - protein, 2089 aa, synthetic construct
  source 1..2089: note = Description of Artificial Sequence: Synthetic polypeptide
MPAAKRVKLDGGDKKYSIGLDIGTNSVGWAVITDEYKVPSKKFKVLGNTDRHSIKKNLIGALLFDSGETAEATRLKRTARRRYTRRKNRICYLQEIFSNEMAKVDDSFFHRLEESFLVEEDKKHERHPIFGNIVDEVAYHEKYPTIYHLRKKLVDSTDKADLRLIYLALAHMIKFRGHFLIEGDLNPDNSDVDKLFIQLVQTYNQLFEENPINASGVDAKAILSARLSKSRRLENLIAQLPGEKKNGLFGNLIALSLGLTPNFKSNFDLAEDAKLQLSKDTYDDDLDNLLAQIGDQYADLFLAAKNLSDAILLSDILRVNTEITKAPLSASMIKRYDEHHQDLTLLKALVRQQLPEKYKEIFFDQSKNGYAGYIDGGASQEEFYKFIKPILEKMDGTEELLVKLNREDLLRKQRTFDNGSIPHQIHLGELHAILRRQEDFYPFLKDNREKIEKILTFRIPYYVGPLARGNSRFAWMTRKSEETITPWNFEEVVDKGASAQSFIERMTNFDKNLPNEKVLPKHSLLYEYFTVYNELTKVKYVTEGMRKPAFLSGEQKKAIVDLLFKTNRKVTVKQLKEDYFKKIECFDSVEISGVEDRFNASLGTYHDLLKIIKDKDFLDNEENEDILEDIVLTLTLFEDREMIEERLKTYAHLFDDKVMKQLKRRRYTGWGRLSRKLINGIRDKQSGKTILDFLKSDGFANRNFMQLIHDDSLTFKEDIQKAQVSGQGDSLHEHIANLAGSPAIKKGILQTVKVVDELVKVMGRHKPENIVIEMARENQTTQKGQKNSRERMKRIEEGIKELGSQILKEHPVENTQLQNEKLYLYYLQNGRDMYVDQELDINRLSDYDVDHIVPQSFLKDDSIDNKVLTRSDKARGKSDNVPSEEVVKKMKNYWRQLLNAKLITQRKFDNLTKAERGGLSELDKAGFIKRQLVETRQITKHVAQILDSRMNTKYDENDKLIREVKVITLKSKLVSDFRKDFQFYKVREINNYHHAHDAYLNAVVGTALIKKYPKLESEFVYGDYKVYDVRKMIAKSEQEIGKATAKYFFYSNIMNFFKTEITLANGEIRKRPLIETNGETGEIVWDKGRDFATVRKVLSMPQVNIVKKTEVQTGGFSKESILPKRNSDKLIARKKDWDPKKYGGFDSPTVAYSVLVVAKVEKGKSKKLKSVKELLGITIMERSSFEKNPIDFLEAKGYKEVKKDLIIKLPKYSLFELENGRKRMLASAGELQKGNELALPSKYVNFLYLASHYEKLKGSPEDNEQKQLFVEQHKHYLDEIIEQISEFSKRVILADANLDKVLSAYNKHRDKPIREQAENIIHLFTLTNLGAPAAFKYFDTTIDRKRYTSTKEVLDATLIHQSITGLYETRIDLSQLGGDGGGGSGSSGGVLNLEEEYRLHEKPVPSSIDPSWLQLFPTVWAERAGMGLANQVPPVVVELRSGASPVAVRQYPMSKEAREGIRPHIQRFLDLGVLVPCQSPWNTPLLPVKKPGTNDYRPVQDLREINKRVQDIHPTVPNPYNLLSSLPPSHTWYSVLDLKDAFFCLKLHPNSQPLFAFEWRDPEKGNTGQLTWTRLPQGFKNSPTLFNEALHRDLAPFRALNPQVVLLQYVDDLLVAAPTYRDCKEGTQKLLQELSKLGYRVSAKKAQLCQKEVTYLGYLLKEGKRWLTPARKATVMKIPPPTTPRQVREFLGKAGFCRLFIPGFASLAAPLYPLTKPSIPFIWTEEHQKAFDRIKEALLSAPALALPDLTKPFTLYVDERAGVARGVLTQTLGPWRRPVAYLSKKLDPVASGWPTCLKAVAAVALLLKDADKLTLGQNVTVIASHSLESIVRQPPDRWMTNARMTHYQSLLLNERVSFAPPAVLNPATLLPVESEATPVHRCSEILAEETGTRRDLKDQPLPGVPAWYTDGSSFIAEGKRRAGAAIVDGKRTVWASSLPEGTSAQKAELVALTQALRLAEGKDINIYTDSRYAFATAHIHGAIYKQRGWLTSAGKDIKNKEEILALLEAIHLPKRVAIIHCPGHQKGNDPVATGNRRADEAAKQAALSTRVLAETTKPAGKRTADGSEFEKRTADGSEFESPKKKAKVE

SEQ ID NO: 882 - protein, 2089 aa, synthetic construct
  source 1..2089: note = Description of Artificial Sequence: Synthetic polypeptide
MPAAKRVKLDGGDKKYSIGLDIGTNSVGWAVITDEYKVPSKKFKVLGNTDRHSIKKNLIGALLFDSGETAEATRLKRTARRRYTRRKNRICYLQEIFSNEMAKVDDSFFHRLEESFLVEEDKKHERHPIFGNIVDEVAYHEKYPTIYHLRKKLVDSTDKADLRLIYLALAHMIKFRGHFLIEGDLNPDNSDVDKLFIQLVQTYNQLFEENPINASGVDAKAILSARLSKSRRLENLIAQLPGEKKNGLFGNLIALSLGLTPNFKSNFDLAEDAKLQLSKDTYDDDLDNLLAQIGDQYADLFLAAKNLSDAILLSDILRVNTEITKAPLSASMIKRYDEHHQDLTLLKALVRQQLPEKYKEIFFDQSKNGYAGYIDGGASQEEFYKFIKPILEKMDGTEELLVKLNREDLLRKQRTFDNGSIPHQIHLGELHAILRRQEDFYPFLKDNREKIEKILTFRIPYYVGPLARGNSRFAWMTRKSEETITPWNFEEVVDKGASAQSFIERMTNFDKNLPNEKVLPKHSLLYEYFTVYNELTKVKYVTEGMRKPAFLSGEQKKAIVDLLFKTNRKVTVKQLKEDYFKKIECFDSVEISGVEDRFNASLGTYHDLLKIIKDKDFLDNEENEDILEDIVLTLTLFEDREMIEERLKTYAHLFDDKVMKQLKRRRYTGWGRLSRKLINGIRDKQSGKTILDFLKSDGFANRNFMQLIHDDSLTFKEDIQKAQVSGQGDSLHEHIANLAGSPAIKKGILQTVKVVDELVKVMGRHKPENIVIEMARENQTTQKGQKNSRERMKRIEEGIKELGSQILKEHPVENTQLQNEKLYLYYLQNGRDMYVDQELDINRLSDYDVDHIVPQSFLKDDSIDNKVLTRSDKARGKSDNVPSEEVVKKMKNYWRQLLNAKLITQRKFDNLTKAERGGLSELDKAGFIKRQLVETRQITKHVAQILDSRMNTKYDENDKLIREVKVITLKSKLVSDFRKDFQFYKVREINNYHHAHDAYLNAVVGTALIKKYPKLESEFVYGDYKVYDVRKMIAKSEQEIGKATAKYFFYSNIMNFFKTEITLANGEIRKRPLIETNGETGEIVWDKGRDFATVRKVLSMPQVNIVKKTEVQTGGFSKESILPKRNSDKLIARKKDWDPKKYGGFDSPTVAYSVLVVAKVEKGKSKKLKSVKELLGITIMERSSFEKNPIDFLEAKGYKEVKKDLIIKLPKYSLFELENGRKRMLASAGELQKGNELALPSKYVNFLYLASHYEKLKGSPEDNEQKQLFVEQHKHYLDEIIEQISEFSKRVILADANLDKVLSAYNKHRDKPIREQAENIIHLFTLTNLGAPAAFKYFDTTIDRKRYTSTKEVLDATLIHQSITGLYETRIDLSQLGGDGGGGGGGGGGVLNLEEEYRLHEKPVPSSIDPSWLQLFPTVWAERAGMGLANQVPPVVVELRSGASPVAVRQYPMSKEAREGIRPHIQRFLDLGVLVPCQSPWNTPLLPVKKPGTNDYRPVQDLREINKRVQDIHPTVPNPYNLLSSLPPSHTWYSVLDLKDAFFCLKLHPNSQPLFAFEWRDPEKGNTGQLTWTRLPQGFKNSPTLFNEALHRDLAPFRALNPQVVLLQYVDDLLVAAPTYRDCKEGTQKLLQELSKLGYRVSAKKAQLCQKEVTYLGYLLKEGKRWLTPARKATVMKIPPPTTPRQVREFLGKAGFCRLFIPGFASLAAPLYPLTKPSIPFIWTEEHQKAFDRIKEALLSAPALALPDLTKPFTLYVDERAGVARGVLTQTLGPWRRPVAYLSKKLDPVASGWPTCLKAVAAVALLLKDADKLTLGQNVTVIASHSLESIVRQPPDRWMTNARMTHYQSLLLNERVSFAPPAVLNPATLLPVESEATPVHRCSEILAEETGTRRDLKDQPLPGVPAWYTDGSSFIAEGKRRAGAAIVDGKRTVWASSLPEGTSAQKAELVALTQALRLAEGKDINIYTDSRYAFATAHIHGAIYKQRGWLTSAGKDIKNKEEILALLEAIHLPKRVAIIHCPGHQKGNDPVATGNRRADEAAKQAALSTRVLAETTKPAGKRTADGSEFEKRTADGSEFESPKKKAKVE

SEQ ID NO: 883 - protein, 2091 aa, synthetic construct
  source 1..2091: note = Description of Artificial Sequence: Synthetic polypeptide
MPAAKRVKLDGGDKKYSIGLDIGTNSVGWAVITDEYKVPSKKFKVLGNTDRHSIKKNLIGALLFDSGETAEATRLKRTARRRYTRRKNRICYLQEIFSNEMAKVDDSFFHRLEESFLVEEDKKHERHPIFGNIVDEVAYHEKYPTIYHLRKKLVDSTDKADLRLIYLALAHMIKFRGHFLIEGDLNPDNSDVDKLFIQLVQTYNQLFEENPINASGVDAKAILSARLSKSRRLENLIAQLPGEKKNGLFGNLIALSLGLTPNFKSNFDLAEDAKLQLSKDTYDDDLDNLLAQIGDQYADLFLAAKNLSDAILLSDILRVNTEITKAPLSASMIKRYDEHHQDLTLLKALVRQQLPEKYKEIFFDQSKNGYAGYIDGGASQEEFYKFIKPILEKMDGTEELLVKLNREDLLRKQRTFDNGSIPHQIHLGELHAILRRQEDFYPFLKDNREKIEKILTFRIPYYVGPLARGNSRFAWMTRKSEETITPWNFEEVVDKGASAQSFIERMTNFDKNLPNEKVLPKHSLLYEYFTVYNELTKVKYVTEGMRKPAFLSGEQKKAIVDLLFKTNRKVTVKQLKEDYFKKIECFDSVEISGVEDRFNASLGTYHDLLKIIKDKDFLDNEENEDILEDIVLTLTLFEDREMIEERLKTYAHLFDDKVMKQLKRRRYTGWGRLSRKLINGIRDKQSGKTILDFLKSDGFANRNFMQLIHDDSLTFKEDIQKAQVSGQGDSLHEHIANLAGSPAIKKGILQTVKVVDELVKVMGRHKPENIVIEMARENQTTQKGQKNSRERMKRIEEGIKELGSQILKEHPVENTQLQNEKLYLYYLQNGRDMYVDQELDINRLSDYDVDHIVPQSFLKDDSIDNKVLTRSDKARGKSDNVPSEEVVKKMKNYWRQLLNAKLITQRKFDNLTKAERGGLSELDKAGFIKRQLVETRQITKHVAQILDSRMNTKYDENDKLIREVKVITLKSKLVSDFRKDFQFYKVREINNYHHAHDAYLNAVVGTALIKKYPKLESEFVYGDYKVYDVRKMIAKSEQEIGKATAKYFFYSNIMNFFKTEITLANGEIRKRPLIETNGETGEIVWDKGRDFATVRKVLSMPQVNIVKKTEVQTGGFSKESILPKRNSDKLIARKKDWDPKKYGGFDSPTVAYSVLVVAKVEKGKSKKLKSVKELLGITIMERSSFEKNPIDFLEAKGYKEVKKDLIIKLPKYSLFELENGRKRMLASAGELQKGNELALPSKYVNFLYLASHYEKLKGSPEDNEQKQLFVEQHKHYLDEIIEQISEFSKRVILADANLDKVLSAYNKHRDKPIREQAENIIHLFTLTNLGAPAAFKYFDTTIDRKRYTSTKEVLDATLIHQSITGLYETRIDLSQLGGDGGGSSEAAAKGGVLNLEEEYRLHEKPVPSSIDPSWLQLFPTVWAERAGMGLANQVPPVVVELRSGASPVAVRQYPMSKEAREGIRPHIQRFLDLGVLVPCQSPWNTPLLPVKKPGTNDYRPVQDLREINKRVQDIHPTVPNPYNLLSSLPPSHTWYSVLDLKDAFFCLKLHPNSQPLFAFEWRDPEKGNTGQLTWTRLPQGFKNSPTLFNEALHRDLAPFRALNPQVVLLQYVDDLLVAAPTYRDCKEGTQKLLQELSKLGYRVSAKKAQLCQKEVTYLGYLLKEGKRWLTPARKATVMKIPPPTTPRQVREFLGKAGFCRLFIPGFASLAAPLYPLTKPSIPFIWTEEHQKAFDRIKEALLSAPALALPDLTKPFTLYVDERAGVARGVLTQTLGPWRRPVAYLSKKLDPVASGWPTCLKAVAAVALLLKDADKLTLGQNVTVIASHSLESIVRQPPDRWMTNARMTHYQSLLLNERVSFAPPAVLNPATLLPVESEATPVHRCSEILAEETGTRRDLKDQPLPGVPAWYTDGSSFIAEGKRRAGAAIVDGKRTVWASSLPEGTSAQKAELVALTQALRLAEGKDINIYTDSRYAFATAHIHGAIYKQRGWLTSAGKDIKNKEEILALLEAIHLPKRVAIIHCPGHQKGNDPVATGNRRADEAAKQAALSTRVLAETTKPAGKRTADGSEFEKRTADGSEFESPKKKAKVE

SEQ ID NO: 884 - protein, 2089 aa, synthetic construct
  source 1..2089: note = Description of Artificial Sequence: Synthetic polypeptide
MPAAKRVKLDGGDKKYSIGLDIGTNSVGWAVITDEYKVPSKKFKVLGNTDRHSIKKNLIGALLFDSGETAEATRLKRTARRRYTRRKNRICYLQEIFSNEMAKVDDSFFHRLEESFLVEEDKKHERHPIFGNIVDEVAYHEKYPTIYHLRKKLVDSTDKADLRLIYLALAHMIKFRGHFLIEGDLNPDNSDVDKLFIQLVQTYNQLFEENPINASGVDAKAILSARLSKSRRLENLIAQLPGEKKNGLFGNLIALSLGLTPNFKSNFDLAEDAKLQLSKDTYDDDLDNLLAQIGDQYADLFLAAKNLSDAILLSDILRVNTEITKAPLSASMIKRYDEHHQDLTLLKALVRQQLPEKYKEIFFDQSKNGYAGYIDGGASQEEFYKFIKPILEKMDGTEELLVKLNREDLLRKQRTFDNGSIPHQIHLGELHAILRRQEDFYPFLKDNREKIEKILTFRIPYYVGPLARGNSRFAWMTRKSEETITPWNFEEVVDKGASAQSFIERMTNFDKNLPNEKVLPKHSLLYEYFTVYNELTKVKYVTEGMRKPAFLSGEQKKAIVDLLFKTNRKVTVKQLKEDYFKKIECFDSVEISGVEDRFNASLGTYHDLLKIIKDKDFLDNEENEDILEDIVLTLTLFEDREMIEERLKTYAHLFDDKVMKQLKRRRYTGWGRLSRKLINGIRDKQSGKTILDFLKSDGFANRNFMQLIHDDSLTFKEDIQKAQVSGQGDSLHEHIANLAGSPAIKKGILQTVKVVDELVKVMGRHKPENIVIEMARENQTTQKGQKNSRERMKRIEEGIKELGSQILKEHPVENTQLQNEKLYLYYLQNGRDMYVDQELDINRLSDYDVDHIVPQSFLKDDSIDNKVLTRSDKARGKSDNVPSEEVVKKMKNYWRQLLNAKLITQRKFDNLTKAERGGLSELDKAGFIKRQLVETRQITKHVAQILDSRMNTKYDENDKLIREVKVITLKSKLVSDFRKDFQFYKVREINNYHHAHDAYLNAVVGTALIKKYPKLESEFVYGDYKVYDVRKMIAKSEQEIGKATAKYFFYSNIMNFFKTEITLANGEIRKRPLIETNGETGEIVWDKGRDFATVRKVLSMPQVNIVKKTEVQTGGFSKESILPKRNSDKLIARKKDWDPKKYGGFDSPTVAYSVLVVAKVEKGKSKKLKSVKELLGITIMERSSFEKNPIDFLEAKGYKEVKKDLIIKLPKYSLFELENGRKRMLASAGELQKGNELALPSKYVNFLYLASHYEKLKGSPEDNEQKQLFVEQHKHYLDEIIEQISEFSKRVILADANLDKVLSAYNKHRDKPIREQAENIIHLFTLTNLGAPAAFKYFDTTIDRKRYTSTKEVLDATLIHQSITGLYETRIDLSQLGGDGGGSSPAPGGVLNLEEEYRLHEKPVPSSIDPSWLQLFPTVWAERAGMGLANQVPPVVVELRSGASPVAVRQYPMSKEAREGIRPHIQRFLDLGVLVPCQSPWNTPLLPVKKPGTNDYRPVQDLREINKRVQDIHPTVPNPYNLLSSLPPSHTWYSVLDLKDAFFCLKLHPNSQPLFAFEWRDPEKGNTGQLTWTRLPQGFKNSPTLFNEALHRDLAPFRALNPQVVLLQYVDDLLVAAPTYRDCKEGTQKLLQELSKLGYRVSAKKAQLCQKEVTYLGYLLKEGKRWLTPARKATVMKIPPPTTPRQVREFLGKAGFCRLFIPGFASLAAPLYPLTKPSIPFIWTEEHQKAFDRIKEALLSAPALALPDLTKPFTLYVDERAGVARGVLTQTLGPWRRPVAYLSKKLDPVASGWPTCLKAVAAVALLLKDADKLTLGQNVTVIASHSLESIVRQPPDRWMTNARMTHYQSLLLNERVSFAPPAVLNPATLLPVESEATPVHRCSEILAEETGTRRDLKDQPLPGVPAWYTDGSSFIAEGKRRAGAAIVDGKRTVWASSLPEGTSAQKAELVALTQALRLAEGKDINIYTDSRYAFATAHIHGAIYKQRGWLTSAGKDIKNKEEILALLEAIHLPKRVAIIHCPGHQKGNDPVATGNRRADEAAKQAALSTRVLAETTKPAGKRTADGSEFEKRTADGSEFESPKKKAKVE

SEQ ID NO: 885 - protein, 2092 aa, synthetic construct
  source 1..2092: note = Description of Artificial Sequence: Synthetic polypeptide
MPAAKRVKLDGGDKKYSIGLDIGTNSVGWAVITDEYKVPSKKFKVLGNTDRHSIKKNLIGALLFDSGETAEATRLKRTARRRYTRRKNRICYLQEIFSNEMAKVDDSFFHRLEESFLVEEDKKHERHPIFGNIVDEVAYHEKYPTIYHLRKKLVDSTDKADLRLIYLALAHMIKFRGHFLIEGDLNPDNSDVDKLFIQLVQTYNQLFEENPINASGVDAKAILSARLSKSRRLENLIAQLPGEKKNGLFGNLIALSLGLTPNFKSNFDLAEDAKLQLSKDTYDDDLDNLLAQIGDQYADLFLAAKNLSDAILLSDILRVNTEITKAPLSASMIKRYDEHHQDLTLLKALVRQQLPEKYKEIFFDQSKNGYAGYIDGGASQEEFYKFIKPILEKMDGTEELLVKLNREDLLRKQRTFDNGSIPHQIHLGELHAILRRQEDFYPFLKDNREKIEKILTFRIPYYVGPLARGNSRFAWMTRKSEETITPWNFEEVVDKGASAQSFIERMTNFDKNLPNEKVLPKHSLLYEYFTVYNELTKVKYVTEGMRKPAFLSGEQKKAIVDLLFKTNRKVTVKQLKEDYFKKIECFDSVEISGVEDRFNASLGTYHDLLKIIKDKDFLDNEENEDILEDIVLTLTLFEDREMIEERLKTYAHLFDDKVMKQLKRRRYTGWGRLSRKLINGIRDKQSGKTILDFLKSDGFANRNFMQLIHDDSLTFKEDIQKAQVSGQGDSLHEHIANLAGSPAIKKGILQTVKVVDELVKVMGRHKPENIVIEMARENQTTQKGQKNSRERMKRIEEGIKELGSQILKEHPVENTQLQNEKLYLYYLQNGRDMYVDQELDINRLSDYDVDHIVPQSFLKDDSIDNKVLTRSDKARGKSDNVPSEEVVKKMKNYWRQLLNAKLITQRKFDNLTKAERGGLSELDKAGFIKRQLVETRQITKHVAQILDSRMNTKYDENDKLIREVKVITLKSKLVSDFRKDFQFYKVREINNYHHAHDAYLNAVVGTALIKKYPKLESEFVYGDYKVYDVRKMIAKSEQEIGKATAKYFFYSNIMNFFKTEITLANGEIRKRPLIETNGETGEIVWDKGRDFATVRKVLSMPQVNIVKKTEVQTGGFSKESILPKRNSDKLIARKKDWDPKKYGGFDSPTVAYSVLVVAKVEKGKSKKLKSVKELLGITIMERSSFEKNPIDFLEAKGYKEVKKDLIIKLPKYSLFELENGRKRMLASAGELQKGNELALPSKYVNFLYLASHYEKLKGSPEDNEQKQLFVEQHKHYLDEIIEQISEFSKRVILADANLDKVLSAYNKHRDKPIREQAENIIHLFTLTNLGAPAAFKYFDTTIDRKRYTSTKEVLDATLIHQSITGLYETRIDLSQLGGDGGGGSGGSGGSGGVLNLEEEYRLHEKPVPSSIDPSWLQLFPTVWAERAGMGLANQVPPVVVELRSGASPVAVRQYPMSKEAREGIRPHIQRFLDLGVLVPCQSPWNTPLLPVKKPGTNDYRPVQDLREINKRVQDIHPTVPNPYNLLSSLPPSHTWYSVLDLKDAFFCLKLHPNSQPLFAFEWRDPEKGNTGQLTWTRLPQGFKNSPTLFNEALHRDLAPFRALNPQVVLLQYVDDLLVAAPTYRDCKEGTQKLLQELSKLGYRVSAKKAQLCQKEVTYLGYLLKEGKRWLTPARKATVMKIPPPTTPRQVREFLGKAGFCRLFIPGFASLAAPLYPLTKPSIPFIWTEEHQKAFDRIKEALLSAPALALPDLTKPFTLYVDERAGVARGVLTQTLGPWRRPVAYLSKKLDPVASGWPTCLKAVAAVALLLKDADKLTLGQNVTVIASHSLESIVRQPPDRWMTNARMTHYQSLLLNERVSFAPPAVLNPATLLPVESEATPVHRCSEILAEETGTRRDLKDQPLPGVPAWYTDGSSFIAEGKRRAGAAIVDGKRTVWASSLPEGTSAQKAELVALTQALRLAEGKDINIYTDSRYAFATAHIHGAIYKQRGWLTSAGKDIKNKEEILALLEAIHLPKRVAIIHCPGHQKGNDPVATGNRRADEAAKQAALSTRVLAETTKPAGKRTADGSEFEKRTADGSEFESPKKKAKVE

SEQ ID NO: 886 - protein, 2095 aa, synthetic construct
  source 1..2095: note = Description of Artificial Sequence: Synthetic polypeptide
MPAAKRVKLDGGDKKYSIGLDIGTNSVGWAVITDEYKVPSKKFKVLGNTDRHSIKKNLIGALLFDSGETAEATRLKRTARRRYTRRKNRICYLQEIFSNEMAKVDDSFFHRLEESFLVEEDKKHERHPIFGNIVDEVAYHEKYPTIYHLRKKLVDSTDKADLRLIYLALAHMIKFRGHFLIEGDLNPDNSDVDKLFIQLVQTYNQLFEENPINASGVDAKAILSARLSKSRRLENLIAQLPGEKKNGLFGNLIALSLGLTPNFKSNFDLAEDAKLQLSKDTYDDDLDNLLAQIGDQYADLFLAAKNLSDAILLSDILRVNTEITKAPLSASMIKRYDEHHQDLTLLKALVRQQLPEKYKEIFFDQSKNGYAGYIDGGASQEEFYKFIKPILEKMDGTEELLVKLNREDLLRKQRTFDNGSIPHQIHLGELHAILRRQEDFYPFLKDNREKIEKILTFRIPYYVGPLARGNSRFAWMTRKSEETITPWNFEEVVDKGASAQSFIERMTNFDKNLPNEKVLPKHSLLYEYFTVYNELTKVKYVTEGMRKPAFLSGEQKKAIVDLLFKTNRKVTVKQLKEDYFKKIECFDSVEISGVEDRFNASLGTYHDLLKIIKDKDFLDNEENEDILEDIVLTLTLFEDREMIEERLKTYAHLFDDKVMKQLKRRRYTGWGRLSRKLINGIRDKQSGKTILDFLKSDGFANRNFMQLIHDDSLTFKEDIQKAQVSGQGDSLHEHIANLAGSPAIKKGILQTVKVVDELVKVMGRHKPENIVIEMARENQTTQKGQKNSRERMKRIEEGIKELGSQILKEHPVENTQLQNEKLYLYYLQNGRDMYVDQELDINRLSDYDVDHIVPQSFLKDDSIDNKVLTRSDKARGKSDNVPSEEVVKKMKNYWRQLLNAKLITQRKFDNLTKAERGGLSELDKAGFIKRQLVETRQITKHVAQILDSRMNTKYDENDKLIREVKVITLKSKLVSDFRKDFQFYKVREINNYHHAHDAYLNAVVGTALIKKYPKLESEFVYGDYKVYDVRKMIAKSEQEIGKATAKYFFYSNIMNFFKTEITLANGEIRKRPLIETNGETGEIVWDKGRDFATVRKVLSMPQVNIVKKTEVQTGGFSKESILPKRNSDKLIARKKDWDPKKYGGFDSPTVAYSVLVVAKVEKGKSKKLKSVKELLGITIMERSSFEKNPIDFLEAKGYKEVKKDLIIKLPKYSLFELENGRKRMLASAGELQKGNELALPSKYVNFLYLASHYEKLKGSPEDNEQKQLFVEQHKHYLDEIIEQISEFSKRVILADANLDKVLSAYNKHRDKPIREQAENIIHLFTLTNLGAPAAFKYFDTTIDRKRYTSTKEVLDATLIHQSITGLYETRIDLSQLGGDGGGGSGGSGGSGGSGGVLNLEEEYRLHEKPVPSSIDPSWLQLFPTVWAERAGMGLANQVPPVVVELRSGASPVAVRQYPMSKEAREGIRPHIQRFLDLGVLVPCQSPWNTPLLPVKKPGTNDYRPVQDLREINKRVQDIHPTVPNPYNLLSSLPPSHTWYSVLDLKDAFFCLKLHPNSQPLFAFEWRDPEKGNTGQLTWTRLPQGFKNSPTLFNEALHRDLAPFRALNPQVVLLQYVDDLLVAAPTYRDCKEGTQKLLQELSKLGYRVSAKKAQLCQKEVTYLGYLLKEGKRWLTPARKATVMKIPPPTTPRQVREFLGKAGFCRLFIPGFASLAAPLYPLTKPSIPFIWTEEHQKAFDRIKEALLSAPALALPDLTKPFTLYVDERAGVARGVLTQTLGPWRRPVAYLSKKLDPVASGWPTCLKAVAAVALLLKDADKLTLGQNVTVIASHSLESIVRQPPDRWMTNARMTHYQSLLLNERVSFAPPAVLNPATLLPVESEATPVHRCSEILAEETGTRRDLKDQPLPGVPAWYTDGSSFIAEGKRRAGAAIVDGKRTVWASSLPEGTSAQKAELVALTQALRLAEGKDINIYTDSRYAFATAHIHGAIYKQRGWLTSAGKDIKNKEEILALLEAIHLPKRVAIIHCPGHQKGNDPVATGNRRADEAAKQAALSTRVLAETTKPAGKRTADGSEFEKRTADGSEFESPKKKAKVE

SEQ ID NO: 887 - protein, 2095 aa, synthetic construct
  source 1..2095: note = Description of Artificial Sequence: Synthetic polypeptide
MPAAKRVKLDGGDKKYSIGLDIGTNSVGWAVITDEYKVPSKKFKVLGNTDRHSIKKNLIGALLFDSGETAEATRLKRTARRRYTRRKNRICYLQEIFSNEMAKVDDSFFHRLEESFLVEEDKKHERHPIFGNIVDEVAYHEKYPTIYHLRKKLVDSTDKADLRLIYLALAHMIKFRGHFLIEGDLNPDNSDVDKLFIQLVQTYNQLFEENPINASGVDAKAILSARLSKSRRLENLIAQLPGEKKNGLFGNLIALSLGLTPNFKSNFDLAEDAKLQLSKDTYDDDLDNLLAQIGDQYADLFLAAKNLSDAILLSDILRVNTEITKAPLSASMIKRYDEHHQDLTLLKALVRQQLPEKYKEIFFDQSKNGYAGYIDGGASQEEFYKFIKPILEKMDGTEELLVKLNREDLLRKQRTFDNGSIPHQIHLGELHAILRRQEDFYPFLKDNREKIEKILTFRIPYYVGPLARGNSRFAWMTRKSEETITPWNFEEVVDKGASAQSFIERMTNFDKNLPNEKVLPKHSLLYEYFTVYNELTKVKYVTEGMRKPAFLSGEQKKAIVDLLFKTNRKVTVKQLKEDYFKKIECFDSVEISGVEDRFNASLGTYHDLLKIIKDKDFLDNEENEDILEDIVLTLTLFEDREMIEERLKTYAHLFDDKVMKQLKRRRYTGWGRLSRKLINGIRDKQSGKTILDFLKSDGFANRNFMQLIHDDSLTFKEDIQKAQVSGQGDSLHEHIANLAGSPAIKKGILQTVKVVDELVKVMGRHKPENIVIEMARENQTTQKGQKNSRERMKRIEEGIKELGSQILKEHPVENTQLQNEKLYLYYLQNGRDMYVDQELDINRLSDYDVDHIVPQSFLKDDSIDNKVLTRSDKARGKSDNVPSEEVVKKMKNYWRQLLNAKLITQRKFDNLTKAERGGLSELDKAGFIKRQLVETRQITKHVAQILDSRMNTKYDENDKLIREVKVITLKSKLVSDFRKDFQFYKVREINNYHHAHDAYLNAVVGTALIKKYPKLESEFVYGDYKVYDVRKMIAKSEQEIGKATAKYFFYSNIMNFFKTEITLANGEIRKRPLIETNGETGEIVWDKGRDFATVRKVLSMPQVNIVKKTEVQTGGFSKESILPKRNSDKLIARKKDWDPKKYGGFDSPTVAYSVLVVAKVEKGKSKKLKSVKELLGITIMERSSFEKNPIDFLEAKGYKEVKKDLIIKLPKYSLFELENGRKRMLASAGELQKGNELALPSKYVNFLYLASHYEKLKGSPEDNEQKQLFVEQHKHYLDEIIEQISEFSKRVILADANLDKVLSAYNKHRDKPIREQAENIIHLFTLTNLGAPAAFKYFDTTIDRKRYTSTKEVLDATLIHQSITGLYETRIDLSQLGGDGGGSSGSSGSSGSSGGVLNLEEEYRLHEKPVPSSIDPSWLQLFPTVWAERAGMGLANQVPPVVVELRSGASPVAVRQYPMSKEAREGIRPHIQRFLDLGVLVPCQSPWNTPLLPVKKPGTNDYRPVQDLREINKRVQDIHPTVPNPYNLLSSLPPSHTWYSVLDLKDAFFCLKLHPNSQPLFAFEWRDPEKGNTGQLTWTRLPQGFKNSPTLFNEALHRDLAPFRALNPQVVLLQYVDDLLVAAPTYRDCKEGTQKLLQELSKLGYRVSAKKAQLCQKEVTYLGYLLKEGKRWLTPARKATVMKIPPPTTPRQVREFLGKAGFCRLFIPGFASLAAPLYPLTKPSIPFIWTEEHQKAFDRIKEALLSAPALALPDLTKPFTLYVDERAGVARGVLTQTLGPWRRPVAYLSKKLDPVASGWPTCLKAVAAVALLLKDADKLTLGQNVTVIASHSLESIVRQPPDRWMTNARMTHYQSLLLNERVSFAPPAVLNPATLLPVESEATPVHRCSEILAEETGTRRDLKDQPLPGVPAWYTDGSSFIAEGKRRAGAAIVDGKRTVWASSLPEGTSAQKAELVALTQALRLAEGKDINIYTDSRYAFATAHIHGAIYKQRGWLTSAGKDIKNKEEILALLEAIHLPKRVAIIHCPGHQKGNDPVATGNRRADEAAKQAALSTRVLAETTKPAGKRTADGSEFEKRTADGSEFESPKKKAKVE

SEQ ID NO: 888 - protein, 2092 aa, synthetic construct
  source 1..2092: note = Description of Artificial Sequence: Synthetic polypeptide
MPAAKRVKLDGGDKKYSIGLDIGTNSVGWAVITDEYKVPSKKFKVLGNTDRHSIKKNLIGALLFDSGETAEATRLKRTARRRYTRRKNRICYLQEIFSNEMAKVDDSFFHRLEESFLVEEDKKHERHPIFGNIVDEVAYHEKYPTIYHLRKKLVDSTDKADLRLIYLALAHMIKFRGHFLIEGDLNPDNSDVDKLFIQLVQTYNQLFEENPINASGVDAKAILSARLSKSRRLENLIAQLPGEKKNGLFGNLIALSLGLTPNFKSNFDLAEDAKLQLSKDTYDDDLDNLLAQIGDQYADLFLAAKNLSDAILLSDILRVNTEITKAPLSASMIKRYDEHHQDLTLLKALVRQQLPEKYKEIFFDQSKNGYAGYIDGGASQEEFYKFIKPILEKMDGTEELLVKLNREDLLRKQRTFDNGSIPHQIHLGELHAILRRQEDFYPFLKDNREKIEKILTFRIPYYVGPLARGNSRFAWMTRKSEETITPWNFEEVVDKGASAQSFIERMTNFDKNLPNEKVLPKHSLLYEYFTVYNELTKVKYVTEGMRKPAFLSGEQKKAIVDLLFKTNRKVTVKQLKEDYFKKIECFDSVEISGVEDRFNASLGTYHDLLKIIKDKDFLDNEENEDILEDIVLTLTLFEDREMIEERLKTYAHLFDDKVMKQLKRRRYTGWGRLSRKLINGIRDKQSGKTILDFLKSDGFANRNFMQLIHDDSLTFKEDIQKAQVSGQGDSLHEHIANLAGSPAIKKGILQTVKVVDELVKVMGRHKPENIVIEMARENQTTQKGQKNSRERMKRIEEGIKELGSQILKEHPVENTQLQNEKLYLYYLQNGRDMYVDQELDINRLSDYDVDHIVPQSFLKDDSIDNKVLTRSDKARGKSDNVPSEEVVKKMKNYWRQLLNAKLITQRKFDNLTKAERGGLSELDKAGFIKRQLVETRQITKHVAQILDSRMNTKYDENDKLIREVKVITLKSKLVSDFRKDFQFYKVREINNYHHAHDAYLNAVVGTALIKKYPKLESEFVYGDYKVYDVRKMIAKSEQEIGKATAKYFFYSNIMNFFKTEITLANGEIRKRPLIETNGETGEIVWDKGRDFATVRKVLSMPQVNIVKKTEVQTGGFSKESILPKRNSDKLIARKKDWDPKKYGGFDSPTVAYSVLVVAKVEKGKSKKLKSVKELLGITIMERSSFEKNPIDFLEAKGYKEVKKDLIIKLPKYSLFELENGRKRMLASAGELQKGNELALPSKYVNFLYLASHYEKLKGSPEDNEQKQLFVEQHKHYLDEIIEQISEFSKRVILADANLDKVLSAYNKHRDKPIREQAENIIHLFTLTNLGAPAAFKYFDTTIDRKRYTSTKEVLDATLIHQSITGLYETRIDLSQLGGDGGGGGGSSPAPGGVLNLEEEYRLHEKPVPSSIDPSWLQLFPTVWAERAGMGLANQVPPVVVELRSGASPVAVRQYPMSKEAREGIRPHIQRFLDLGVLVPCQSPWNTPLLPVKKPGTNDYRPVQDLREINKRVQDIHPTVPNPYNLLSSLPPSHTWYSVLDLKDAFFCLKLHPNSQPLFAFEWRDPEKGNTGQLTWTRLPQGFKNSPTLFNEALHRDLAPFRALNPQVVLLQYVDDLLVAAPTYRDCKEGTQKLLQELSKLGYRVSAKKAQLCQKEVTYLGYLLKEGKRWLTPARKATVMKIPPPTTPRQVREFLGKAGFCRLFIPGFASLAAPLYPLTKPSIPFIWTEEHQKAFDRIKEALLSAPALALPDLTKPFTLYVDERAGVARGVLTQTLGPWRRPVAYLSKKLDPVASGWPTCLKAVAAVALLLKDADKLTLGQNVTVIASHSLESIVRQPPDRWMTNARMTHYQSLLLNERVSFAPPAVLNPATLLPVESEATPVHRCSEILAEETGTRRDLKDQPLPGVPAWYTDGSSFIAEGKRRAGAAIVDGKRTVWASSLPEGTSAQKAELVALTQALRLAEGKDINIYTDSRYAFATAHIHGAIYKQRGWLTSAGKDIKNKEEILALLEAIHLPKRVAIIHCPGHQKGNDPVATGNRRADEAAKQAALSTRVLAETTKPAGKRTADGSEFEKRTADGSEFESPKKKAKVE

SEQ ID NO: 889 - protein, 2092 aa, synthetic construct
  source 1..2092: note = Description of Artificial Sequence: Synthetic polypeptide
MPAAKRVKLDGGDKKYSIGLDIGTNSVGWAVITDEYKVPSKKFKVLGNTDRHSIKKNLIGALLFDSGETAEATRLKRTARRRYTRRKNRICYLQEIFSNEMAKVDDSFFHRLEESFLVEEDKKHERHPIFGNIVDEVAYHEKYPTIYHLRKKLVDSTDKADLRLIYLALAHMIKFRGHFLIEGDLNPDNSDVDKLFIQLVQTYNQLFEENPINASGVDAKAILSARLSKSRRLENLIAQLPGEKKNGLFGNLIALSLGLTPNFKSNFDLAEDAKLQLSKDTYDDDLDNLLAQIGDQYADLFLAAKNLSDAILLSDILRVNTEITKAPLSASMIKRYDEHHQDLTLLKALVRQQLPEKYKEIFFDQSKNGYAGYIDGGASQEEFYKFIKPILEKMDGTEELLVKLNREDLLRKQRTFDNGSIPHQIHLGELHAILRRQEDFYPFLKDNREKIEKILTFRIPYYVGPLARGNSRFAWMTRKSEETITPWNFEEVVDKGASAQSFIERMTNFDKNLPNEKVLPKHSLLYEYFTVYNELTKVKYVTEGMRKPAFLSGEQKKAIVDLLFKTNRKVTVKQLKEDYFKKIECFDSVEISGVEDRFNASLGTYHDLLKIIKDKDFLDNEENEDILEDIVLTLTLFEDREMIEERLKTYAHLFDDKVMKQLKRRRYTGWGRLSRKLINGIRDKQSGKTILDFLKSDGFANRNFMQLIHDDSLTFKEDIQKAQVSGQGDSLHEHIANLAGSPAIKKGILQTVKVVDELVKVMGRHKPENIVIEMARENQTTQKGQKNSRERMKRIEEGIKELGSQILKEHPVENTQLQNEKLYLYYLQNGRDMYVDQELDINRLSDYDVDHIVPQSFLKDDSIDNKVLTRSDKARGKSDNVPSEEVVKKMKNYWRQLLNAKLITQRKFDNLTKAERGGLSELDKAGFIKRQLVETRQITKHVAQILDSRMNTKYDENDKLIREVKVITLKSKLVSDFRKDFQFYKVREINNYHHAHDAYLNAVVGTALIKKYPKLESEFVYGDYKVYDVRKMIAKSEQEIGKATAKYFFYSNIMNFFKTEITLANGEIRKRPLIETNGETGEIVWDKGRDFATVRKVLSMPQVNIVKKTEVQTGGFSKESILPKRNSDKLIARKKDWDPKKYGGFDSPTVAYSVLVVAKVEKGKSKKLKSVKELLGITIMERSSFEKNPIDFLEAKGYKEVKKDLIIKLPKYSLFELENGRKRMLASAGELQKGNELALPSKYVNFLYLASHYEKLKGSPEDNEQKQLFVEQHKHYLDEIIEQISEFSKRVILADANLDKVLSAYNKHRDKPIREQAENIIHLFTLTNLGAPAAFKYFDTTIDRKRYTSTKEVLDATLIHQSITGLYETRIDLSQLGGDGGPAPGGSGGGGGVLNLEEEYRLHEKPVPSSIDPSWLQLFPTVWAERAGMGLANQVPPVVVELRSGASPVAVRQYPMSKEAREGIRPHIQRFLDLGVLVPCQSPWNTPLLPVKKPGTNDYRPVQDLREINKRVQDIHPTVPNPYNLLSSLPPSHTWYSVLDLKDAFFCLKLHPNSQPLFAFEWRDPEKGNTGQLTWTRLPQGFKNSPTLFNEALHRDLAPFRALNPQVVLLQYVDDLLVAAPTYRDCKEGTQKLLQELSKLGYRVSAKKAQLCQKEVTYLGYLLKEGKRWLTPARKATVMKIPPPTTPRQVREFLGKAGFCRLFIPGFASLAAPLYPLTKPSIPFIWTEEHQKAFDRIKEALLSAPALALPDLTKPFTLYVDERAGVARGVLTQTLGPWRRPVAYLSKKLDPVASGWPTCLKAVAAVALLLKDADKLTLGQNVTVIASHSLESIVRQPPDRWMTNARMTHYQSLLLNERVSFAPPAVLNPATLLPVESEATPVHRCSEILAEETGTRRDLKDQPLPGVPAWYTDGSSFIAEGKRRAGAAIVDGKRTVWASSLPEGTSAQKAELVALTQALRLAEGKDINIYTDSRYAFATAHIHGAIYKQRGWLTSAGKDIKNKEEILALLEAIHLPKRVAIIHCPGHQKGNDPVATGNRRADEAAKQAALSTRVLAETTKPAGKRTADGSEFEKRTADGSEFESPKKKAKVE

SEQ ID NO: 890 - protein, 2096 aa, synthetic construct
  source 1..2096: note = Description of Artificial Sequence: Synthetic polypeptide
MPAAKRVKLDGGDKKYSIGLDIGTNSVGWAVITDEYKVPSKKFKVLGNTDRHSIKKNLIGALLFDSGETAEATRLKRTARRRYTRRKNRICYLQEIFSNEMAKVDDSFFHRLEESFLVEEDKKHERHPIFGNIVDEVAYHEKYPTIYHLRKKLVDSTDKADLRLIYLALAHMIKFRGHFLIEGDLNPDNSDVDKLFIQLVQTYNQLFEENPINASGVDAKAILSARLSKSRRLENLIAQLPGEKKNGLFGNLIALSLGLTPNFKSNFDLAEDAKLQLSKDTYDDDLDNLLAQIGDQYADLFLAAKNLSDAILLSDILRVNTEITKAPLSASMIKRYDEHHQDLTLLKALVRQQLPEKYKEIFFDQSKNGYAGYIDGGASQEEFYKFIKPILEKMDGTEELLVKLNREDLLRKQRTFDNGSIPHQIHLGELHAILRRQEDFYPFLKDNREKIEKILTFRIPYYVGPLARGNSRFAWMTRKSEETITPWNFEEVVDKGASAQSFIERMTNFDKNLPNEKVLPKHSLLYEYFTVYNELTKVKYVTEGMRKPAFLSGEQKKAIVDLLFKTNRKVTVKQLKEDYFKKIECFDSVEISGVEDRFNASLGTYHDLLKIIKDKDFLDNEENEDILEDIVLTLTLFEDREMIEERLKTYAHLFDDKVMKQLKRRRYTGWGRLSRKLINGIRDKQSGKTILDFLKSDGFANRNFMQLIHDDSLTFKEDIQKAQVSGQGDSLHEHIANLAGSPAIKKGILQTVKVVDELVKVMGRHKPENIVIEMARENQTTQKGQKNSRERMKRIEEGIKELGSQILKEHPVENTQLQNEKLYLYYLQNGRDMYVDQELDINRLSDYDVDHIVPQSFLKDDSIDNKVLTRSDKARGKSDNVPSEEVVKKMKNYWRQLLNAKLITQRKFDNLTKAERGGLSELDKAGFIKRQLVETRQITKHVAQILDSRMNTKYDENDKLIREVKVITLKSKLVSDFRKDFQFYKVREINNYHHAHDAYLNAVVGTALIKKYPKLESEFVYGDYKVYDVRKMIAKSEQEIGKATAKYFFYSNIMNFFKTEITLANGEIRKRPLIETNGETGEIVWDKGRDFATVRKVLSMPQVNIVKKTEVQTGGFSKESILPKRNSDKLIARKKDWDPKKYGGFDSPTVAYSVLVVAKVEKGKSKKLKSVKELLGITIMERSSFEKNPIDFLEAKGYKEVKKDLIIKLPKYSLFELENGRKRMLASAGELQKGNELALPSKYVNFLYLASHYEKLKGSPEDNEQKQLFVEQHKHYLDEIIEQISEFSKRVILADANLDKVLSAYNKHRDKPIREQAENIIHLFTLTNLGAPAAFKYFDTTIDRKRYTSTKEVLDATLIHQSITGLYETRIDLSQLGGDGGPAPAPAPAPAPAPGGVLNLEEEYRLHEKPVPSSIDPSWLQLFPTVWAERAGMGLANQVPPVVVELRSGASPVAVRQYPMSKEAREGIRPHIQRFLDLGVLVPCQSPWNTPLLPVKKPGTNDYRPVQDLREINKRVQDIHPTVPNPYNLLSSLPPSHTWYSVLDLKDAFFCLKLHPNSQPLFAFEWRDPEKGNTGQLTWTRLPQGFKNSPTLFNEALHRDLAPFRALNPQVVLLQYVDDLLVAAPTYRDCKEGTQKLLQELSKLGYRVSAKKAQLCQKEVTYLGYLLKEGKRWLTPARKATVMKIPPPTTPRQVREFLGKAGFCRLFIPGFASLAAPLYPLTKPSIPFIWTEEHQKAFDRIKEALLSAPALALPDLTKPFTLYVDERAGVARGVLTQTLGPWRRPVAYLSKKLDPVASGWPTCLKAVAAVALLLKDADKLTLGQNVTVIASHSLESIVRQPPDRWMTNARMTHYQSLLLNERVSFAPPAVLNPATLLPVESEATPVHRCSEILAEETGTRRDLKDQPLPGVPAWYTDGSSFIAEGKRRAGAAIVDGKRTVWASSLPEGTSAQKAELVALTQALRLAEGKDINIYTDSRYAFATAHIHGAIYKQRGWLTSAGKDIKNKEEILALLEAIHLPKRVAIIHCPGHQKGNDPVATGNRRADEAAKQAALSTRVLAETTKPAGKRTADGSEFEKRTADGSEFESPKKKAKVE

SEQ ID NO: 891 - protein, 2094 aa, synthetic construct
  source 1..2094: note = Description of Artificial Sequence: Synthetic polypeptide
MPAAKRVKLDGGDKKYSIGLDIGTNSVGWAVITDEYKVPSKKFKVLGNTDRHSIKKNLIGALLFDSGETAEATRLKRTARRRYTRRKNRICYLQEIFSNEMAKVDDSFFHRLEESFLVEEDKKHERHPIFGNIVDEVAYHEKYPTIYHLRKKLVDSTDKADLRLIYLALAHMIKFRGHFLIEGDLNPDNSDVDKLFIQLVQTYNQLFEENPINASGVDAKAILSARLSKSRRLENLIAQLPGEKKNGLFGNLIALSLGLTPNFKSNFDLAEDAKLQLSKDTYDDDLDNLLAQIGDQYADLFLAAKNLSDAILLSDILRVNTEITKAPLSASMIKRYDEHHQDLTLLKALVRQQLPEKYKEIFFDQSKNGYAGYIDGGASQEEFYKFIKPILEKMDGTEELLVKLNREDLLRKQRTFDNGSIPHQIHLGELHAILRRQEDFYPFLKDNREKIEKILTFRIPYYVGPLARGNSRFAWMTRKSEETITPWNFEEVVDKGASAQSFIERMTNFDKNLPNEKVLPKHSLLYEYFTVYNELTKVKYVTEGMRKPAFLSGEQKKAIVDLLFKTNRKVTVKQLKEDYFKKIECFDSVEISGVEDRFNASLGTYHDLLKIIKDKDFLDNEENEDILEDIVLTLTLFEDREMIEERLKTYAHLFDDKVMKQLKRRRYTGWGRLSRKLINGIRDKQSGKTILDFLKSDGFANRNFMQLIHDDSLTFKEDIQKAQVSGQGDSLHEHIANLAGSPAIKKGILQTVKVVDELVKVMGRHKPENIVIEMARENQTTQKGQKNSRERMKRIEEGIKELGSQILKEHPVENTQLQNEKLYLYYLQNGRDMYVDQELDINRLSDYDVDHIVPQSFLKDDSIDNKVLTRSDKARGKSDNVPSEEVVKKMKNYWRQLLNAKLITQRKFDNLTKAERGGLSELDKAGFIKRQLVETRQITKHVAQILDSRMNTKYDENDKLIREVKVITLKSKLVSDFRKDFQFYKVREINNYHHAHDAYLNAVVGTALIKKYPKLESEFVYGDYKVYDVRKMIAKSEQEIGKATAKYFFYSNIMNFFKTEITLANGEIRKRPLIETNGETGEIVWDKGRDFATVRKVLSMPQVNIVKKTEVQTGGFSKESILPKRNSDKLIARKKDWDPKKYGGFDSPTVAYSVLVVAKVEKGKSKKLKSVKELLGITIMERSSFEKNPIDFLEAKGYKEVKKDLIIKLPKYSLFELENGRKRMLASAGELQKGNELALPSKYVNFLYLASHYEKLKGSPEDNEQKQLFVEQHKHYLDEIIEQISEFSKRVILADANLDKVLSAYNKHRDKPIREQAENIIHLFTLTNLGAPAAFKYFDTTIDRKRYTSTKEVLDATLIHQSITGLYETRIDLSQLGGDGGEAAAKGSSGGGGGVLNLEEEYRLHEKPVPSSIDPSWLQLFPTVWAERAGMGLANQVPPVVVELRSGASPVAVRQYPMSKEAREGIRPHIQRFLDLGVLVPCQSPWNTPLLPVKKPGTNDYRPVQDLREINKRVQDIHPTVPNPYNLLSSLPPSHTWYSVLDLKDAFFCLKLHPNSQPLFAFEWRDPEKGNTGQLTWTRLPQGFKNSPTLFNEALHRDLAPFRALNPQVVLLQYVDDLLVAAPTYRDCKEGTQKLLQELSKLGYRVSAKKAQLCQKEVTYLGYLLKEGKRWLTPARKATVMKIPPPTTPRQVREFLGKAGFCRLFIPGFASLAAPLYPLTKPSIPFIWTEEHQKAFDRIKEALLSAPALALPDLTKPFTLYVDERAGVARGVLTQTLGPWRRPVAYLSKKLDPVASGWPTCLKAVAAVALLLKDADKLTLGQNVTVIASHSLESIVRQPPDRWMTNARMTHYQSLLLNERVSFAPPAVLNPATLLPVESEATPVHRCSEILAEETGTRRDLKDQPLPGVPAWYTDGSSFIAEGKRRAGAAIVDGKRTVWASSLPEGTSAQKAELVALTQALRLAEGKDINIYTDSRYAFATAHIHGAIYKQRGWLTSAGKDIKNKEEILALLEAIHLPKRVAIIHCPGHQKGNDPVATGNRRADEAAKQAALSTRVLAETTKPAGKRTADGSEFEKRTADGSEFESPKKKAKVE

SEQ ID NO: 892 - protein, 2094 aa, synthetic construct
  source 1..2094: note = Description of Artificial Sequence: Synthetic polypeptide
MPAAKRVKLDGGDKKYSIGLDIGTNSVGWAVITDEYKVPSKKFKVLGNTDRHSIKKNLIGALLFDSGETAEATRLKRTARRRYTRRKNRICYLQEIFSNEMAKVDDSFFHRLEESFLVEEDKKHERHPIFGNIVDEVAYHEKYPTIYHLRKKLVDSTDKADLRLIYLALAHMIKFRGHFLIEGDLNPDNSDVDKLFIQLVQTYNQLFEENPINASGVDAKAILSARLSKSRRLENLIAQLPGEKKNGLFGNLIALSLGLTPNFKSNFDLAEDAKLQLSKDTYDDDLDNLLAQIGDQYADLFLAAKNLSDAILLSDILRVNTEITKAPLSASMIKRYDEHHQDLTLLKALVRQQLPEKYKEIFFDQSKNGYAGYIDGGASQEEFYKFIKPILEKMDGTEELLVKLNREDLLRKQRTFDNGSIPHQIHLGELHAILRRQEDFYPFLKDNREKIEKILTFRIPYYVGPLARGNSRFAWMTRKSEETITPWNFEEVVDKGASAQSFIERMTNFDKNLPNEKVLPKHSLLYEYFTVYNELTKVKYVTEGMRKPAFLSGEQKKAIVDLLFKTNRKVTVKQLKEDYFKKIECFDSVEISGVEDRFNASLGTYHDLLKIIKDKDFLDNEENEDILEDIVLTLTLFEDREMIEERLKTYAHLFDDKVMKQLKRRRYTGWGRLSRKLINGIRDKQSGKTILDFLKSDGFANRNFMQLIHDDSLTFKEDIQKAQVSGQGDSLHEHIANLAGSPAIKKGILQTVKVVDELVKVMGRHKPENIVIEMARENQTTQKGQKNSRERMKRIEEGIKELGSQILKEHPVENTQLQNEKLYLYYLQNGRDMYVDQELDINRLSDYDVDHIVPQSFLKDDSIDNKVLTRSDKARGKSDNVPSEEVVKKMKNYWRQLLNAKLITQRKFDNLTKAERGGLSELDKAGFIKRQLVETRQITKHVAQILDSRMNTKYDENDKLIREVKVITLKSKLVSDFRKDFQFYKVREINNYHHAHDAYLNAVVGTALIKKYPKLESEFVYGDYKVYDVRKMIAKSEQEIGKATAKYFFYSNIMNFFKTEITLANGEIRKRPLIETNGETGEIVWDKGRDFATVRKVLSMPQVNIVKKTEVQTGGFSKESILPKRNSDKLIARKKDWDPKKYGGFDSPTVAYSVLVVAKVEKGKSKKLKSVKELLGITIMERSSFEKNPIDFLEAKGYKEVKKDLIIKLPKYSLFELENGRKRMLASAGELQKGNELALPSKYVNFLYLASHYEKLKGSPEDNEQKQLFVEQHKHYLDEIIEQISEFSKRVILADANLDKVLSAYNKHRDKPIREQAENIIHLFTLTNLGAPAAFKYFDTTIDRKRYTSTKEVLDATLIHQSITGLYETRIDLSQLGGDGGPAPEAAAKGSSGGVLNLEEEYRLHEKPVPSSIDPSWLQLFPTVWAERAGMGLANQVPPVVVELRSGASPVAVRQYPMSKEAREGIRPHIQRFLDLGVLVPCQSPWNTPLLPVKKPGTNDYRPVQDLREINKRVQDIHPTVPNPYNLLSSLPPSHTWYSVLDLKDAFFCLKLHPNSQPLFAFEWRDPEKGNTGQLTWTRLPQGFKNSPTLFNEALHRDLAPFRALNPQVVLLQYVDDLLVAAPTYRDCKEGTQKLLQELSKLGYRVSAKKAQLCQKEVTYLGYLLKEGKRWLTPARKATVMKIPPPTTPRQVREFLGKAGFCRLFIPGFASLAAPLYPLTKPSIPFIWTEEHQKAFDRIKEALLSAPALALPDLTKPFTLYVDERAGVARGVLTQTLGPWRRPVAYLSKKLDPVASGWPTCLKAVAAVALLLKDADKLTLGQNVTVIASHSLESIVRQPPDRWMTNARMTHYQSLLLNERVSFAPPAVLNPATLLPVESEATPVHRCSEILAEETGTRRDLKDQPLPGVPAWYTDGSSFIAEGKRRAGAAIVDGKRTVWASSLPEGTSAQKAELVALTQALRLAEGKDINIYTDSRYAFATAHIHGAIYKQRGWLTSAGKDIKNKEEILALLEAIHLPKRVAIIHCPGHQKGNDPVATGNRRADEAAKQAALSTRVLAETTKPAGKRTADGSEFEKRTADGSEFESPKKKAKVE

SEQ ID NO: 893 - protein, 2113 aa, synthetic construct
  source 1..2113: note = Description of Artificial Sequence: Synthetic polypeptide
MPAAKRVKLDGGDKKYSIGLDIGTNSVGWAVITDEYKVPSKKFKVLGNTDRHSIKKNLIGALLFDSGETAEATRLKRTARRRYTRRKNRICYLQEIFSNEMAKVDDSFFHRLEESFLVEEDKKHERHPIFGNIVDEVAYHEKYPTIYHLRKKLVDSTDKADLRLIYLALAHMIKFRGHFLIEGDLNPDNSDVDKLFIQLVQTYNQLFEENPINASGVDAKAILSARLSKSRRLENLIAQLPGEKKNGLFGNLIALSLGLTPNFKSNFDLAEDAKLQLSKDTYDDDLDNLLAQIGDQYADLFLAAKNLSDAILLSDILRVNTEITKAPLSASMIKRYDEHHQDLTLLKALVRQQLPEKYKEIFFDQSKNGYAGYIDGGASQEEFYKFIKPILEKMDGTEELLVKLNREDLLRKQRTFDNGSIPHQIHLGELHAILRRQEDFYPFLKDNREKIEKILTFRIPYYVGPLARGNSRFAWMTRKSEETITPWNFEEVVDKGASAQSFIERMTNFDKNLPNEKVLPKHSLLYEYFTVYNELTKVKYVTEGMRKPAFLSGEQKKAIVDLLFKTNRKVTVKQLKEDYFKKIECFDSVEISGVEDRFNASLGTYHDLLKIIKDKDFLDNEENEDILEDIVLTLTLFEDREMIEERLKTYAHLFDDKVMKQLKRRRYTGWGRLSRKLINGIRDKQSGKTILDFLKSDGFANRNFMQLIHDDSLTFKEDIQKAQVSGQGDSLHEHIANLAGSPAIKKGILQTVKVVDELVKVMGRHKPENIVIEMARENQTTQKGQKNSRERMKRIEEGIKELGSQILKEHPVENTQLQNEKLYLYYLQNGRDMYVDQELDINRLSDYDVDHIVPQSFLKDDSIDNKVLTRSDKARGKSDNVPSEEVVKKMKNYWRQLLNAKLITQRKFDNLTKAERGGLSELDKAGFIKRQLVETRQITKHVAQILDSRMNTKYDENDKLIREVKVITLKSKLVSDFRKDFQFYKVREINNYHHAHDAYLNAVVGTALIKKYPKLESEFVYGDYKVYDVRKMIAKSEQEIGKATAKYFFYSNIMNFFKTEITLANGEIRKRPLIETNGETGEIVWDKGRDFATVRKVLSMPQVNIVKKTEVQTGGFSKESILPKRNSDKLIARKKDWDPKKYGGFDSPTVAYSVLVVAKVEKGKSKKLKSVKELLGITIMERSSFEKNPIDFLEAKGYKEVKKDLIIKLPKYSLFELENGRKRMLASAGELQKGNELALPSKYVNFLYLASHYEKLKGSPEDNEQKQLFVEQHKHYLDEIIEQISEFSKRVILADANLDKVLSAYNKHRDKPIREQAENIIHLFTLTNLGAPAAFKYFDTTIDRKRYTSTKEVLDATLIHQSITGLYETRIDLSQLGGDGGEAAAKEAAAKEAAAKEAAAKEAAAKEAAAKGGVLNLEEEYRLHEKPVPSSIDPSWLQLFPTVWAERAGMGLANQVPPVVVELRSGASPVAVRQYPMSKEAREGIRPHIQRFLDLGVLVPCQSPWNTPLLPVKKPGTNDYRPVQDLREINKRVQDIHPTVPNPYNLLSSLPPSHTWYSVLDLKDAFFCLKLHPNSQPLFAFEWRDPEKGNTGQLTWTRLPQGFKNSPTLFNEALHRDLAPFRALNPQVVLLQYVDDLLVAAPTYRDCKEGTQKLLQELSKLGYRVSAKKAQLCQKEVTYLGYLLKEGKRWLTPARKATVMKIPPPTTPRQVREFLGKAGFCRLFIPGFASLAAPLYPLTKPSIPFIWTEEHQKAFDRIKEALLSAPALALPDLTKPFTLYVDERAGVARGVLTQTLGPWRRPVAYLSKKLDPVASGWPTCLKAVAAVALLLKDADKLTLGQNVTVIASHSLESIVRQPPDRWMTNARMTHYQSLLLNERVSFAPPAVLNPATLLPVESEATPVHRCSEILAEETGTRRDLKDQPLPGVPAWYTDGSSFIAEGKRRAGAAIVDGKRTVWASSLPEGTSAQKAELVALTQALRLAEGKDINIYTDSRYAFATAHIHGAIYKQRGWLTSAGKDIKNKEEILALLEAIHLPKRVAIIHCPGHQKGNDPVATGNRRADEAAKQAALSTRVLAETTKPAGKRTADGSEFEKRTADGSEFESPKKKAKVE

SEQ ID NO: 894 - protein, 2088 aa, synthetic construct
  source 1..2088: note = Description of Artificial Sequence: Synthetic polypeptide
MPAAKRVKLDGGDKKYSIGLDIGTNSVGWAVITDEYKVPSKKFKVLGNTDRHSIKKNLIGALLFDSGETAEATRLKRTARRRYTRRKNRICYLQEIFSNEMAKVDDSFFHRLEESFLVEEDKKHERHPIFGNIVDEVAYHEKYPTIYHLRKKLVDSTDKADLRLIYLALAHMIKFRGHFLIEGDLNPDNSDVDKLFIQLVQTYNQLFEENPINASGVDAKAILSARLSKSRRLENLIAQLPGEKKNGLFGNLIALSLGLTPNFKSNFDLAEDAKLQLSKDTYDDDLDNLLAQIGDQYADLFLAAKNLSDAILLSDILRVNTEITKAPLSASMIKRYDEHHQDLTLLKALVRQQLPEKYKEIFFDQSKNGYAGYIDGGASQEEFYKFIKPILEKMDGTEELLVKLNREDLLRKQRTFDNGSIPHQIHLGELHAILRRQEDFYPFLKDNREKIEKILTFRIPYYVGPLARGNSRFAWMTRKSEETITPWNFEEVVDKGASAQSFIERMTNFDKNLPNEKVLPKHSLLYEYFTVYNELTKVKYVTEGMRKPAFLSGEQKKAIVDLLFKTNRKVTVKQLKEDYFKKIECFDSVEISGVEDRFNASLGTYHDLLKIIKDKDFLDNEENEDILEDIVLTLTLFEDREMIEERLKTYAHLFDDKVMKQLKRRRYTGWGRLSRKLINGIRDKQSGKTILDFLKSDGFANRNFMQLIHDDSLTFKEDIQKAQVSGQGDSLHEHIANLAGSPAIKKGILQTVKVVDELVKVMGRHKPENIVIEMARENQTTQKGQKNSRERMKRIEEGIKELGSQILKEHPVENTQLQNEKLYLYYLQNGRDMYVDQELDINRLSDYDVDHIVPQSFLKDDSIDNKVLTRSDKARGKSDNVPSEEVVKKMKNYWRQLLNAKLITQRKFDNLTKAERGGLSELDKAGFIKRQLVETRQITKHVAQILDSRMNTKYDENDKLIREVKVITLKSKLVSDFRKDFQFYKVREINNYHHAHDAYLNAVVGTALIKKYPKLESEFVYGDYKVYDVRKMIAKSEQEIGKATAKYFFYSNIMNFFKTEITLANGEIRKRPLIETNGETGEIVWDKGRDFATVRKVLSMPQVNIVKKTEVQTGGFSKESILPKRNSDKLIARKKDWDPKKYGGFDSPTVAYSVLVVAKVEKGKSKKLKSVKELLGITIMERSSFEKNPIDFLEAKGYKEVKKDLIIKLPKYSLFELENGRKRMLASAGELQKGNELALPSKYVNFLYLASHYEKLKGSPEDNEQKQLFVEQHKHYLDEIIEQISEFSKRVILADANLDKVLSAYNKHRDKPIREQAENIIHLFTLTNLGAPAAFKYFDTTIDRKRYTSTKEVLDATLIHQSITGLYETRIDLSQLGGDGGEAAAKGGVLNLEEEYRLHEKPVPSSIDPSWLQLFPTVWAERAGMGLANQVPPVVVELRSGASPVAVRQYPMSKEAREGIRPHIQRFLDLGVLVPCQSPWNTPLLPVKKPGTNDYRPVQDLREINKRVQDIHPTVPNPYNLLSSLPPSHTWYSVLDLKDAFFCLKLHPNSQPLFAFEWRDPEKGNTGQLTWTRLPQGFKNSPTLFNEALHRDLAPFRALNPQVVLLQYVDDLLVAAPTYRDCKEGTQKLLQELSKLGYRVSAKKAQLCQKEVTYLGYLLKEGKRWLTPARKATVMKIPPPTTPRQVREFLGKAGFCRLFIPGFASLAAPLYPLTKPSIPFIWTEEHQKAFDRIKEALLSAPALALPDLTKPFTLYVDERAGVARGVLTQTLGPWRRPVAYLSKKLDPVASGWPTCLKAVAAVALLLKDADKLTLGQNVTVIASHSLESIVRQPPDRWMTNARMTHYQSLLLNERVSFAPPAVLNPATLLPVESEATPVHRCSEILAEETGTRRDLKDQPLPGVPAWYTDGSSFIAEGKRRAGAAIVDGKRTVWASSLPEGTSAQKAELVALTQALRLAEGKDINIYTDSRYAFATAHIHGAIYKQRGWLTSAGKDIKNKEEILALLEAIHLPKRVAIIHCPGHQKGNDPVATGNRRADEAAKQAALSTRVLAETTKPAGKRTADGSEFEKRTADGSEFESPKKKAKVE

SEQ ID NO: 895 - protein, 2088 aa, synthetic construct
  source 1..2088: note = Description of Artificial Sequence: Synthetic polypeptide
MPAAKRVKLDGGDKKYSIGLDIGTNSVGWAVITDEYKVPSKKFKVLGNTDRHSIKKNLIGALLFDSGETAEATRLKRTARRRYTRRKNRICYLQEIFSNEMAKVDDSFFHRLEESFLVEEDKKHERHPIFGNIVDEVAYHEKYPTIYHLRKKLVDSTDKADLRLIYLALAHMIKFRGHFLIEGDLNPDNSDVDKLFIQLVQTYNQLFEENPINASGVDAKAILSARLSKSRRLENLIAQLPGEKKNGLFGNLIALSLGLTPNFKSNFDLAEDAKLQLSKDTYDDDLDNLLAQIGDQYADLFLAAKNLSDAILLSDILRVNTEITKAPLSASMIKRYDEHHQDLTLLKALVRQQLPEKYKEIFFDQSKNGYAGYIDGGASQEEFYKFIKPILEKMDGTEELLVKLNREDLLRKQRTFDNGSIPHQIHLGELHAILRRQEDFYPFLKDNREKIEKILTFRIPYYVGPLARGNSRFAWMTRKSEETITPWNFEEVVDKGASAQSFIERMTNFDKNLPNEKVLPKHSLLYEYFTVYNELTKVKYVTEGMRKPAFLSGEQKKAIVDLLFKTNRKVTVKQLKEDYFKKIECFDSVEISGVEDRFNASLGTYHDLLKIIKDKDFLDNEENEDILEDIVLTLTLFEDREMIEERLKTYAHLFDDKVMKQLKRRRYTGWGRLSRKLINGIRDKQSGKTILDFLKSDGFANRNFMQLIHDDSLTFKEDIQKAQVSGQGDSLHEHIANLAGSPAIKKGILQTVKVVDELVKVMGRHKPENIVIEMARENQTTQKGQKNSRERMKRIEEGIKELGSQILKEHPVENTQLQNEKLYLYYLQNGRDMYVDQELDINRLSDYDVDHIVPQSFLKDDSIDNKVLTRSDKARGKSDNVPSEEVVKKMKNYWRQLLNAKLITQRKFDNLTKAERGGLSELDKAGFIKRQLVETRQITKHVAQILDSRMNTKYDENDKLIREVKVITLKSKLVSDFRKDFQFYKVREINNYHHAHDAYLNAVVGTALIKKYPKLESEFVYGDYKVYDVRKMIAKSEQEIGKATAKYFFYSNIMNFFKTEITLANGEIRKRPLIETNGETGEIVWDKGRDFATVRKVLSMPQVNIVKKTEVQTGGFSKESILPKRNSDKLIARKKDWDPKKYGGFDSPTVAYSVLVVAKVEKGKSKKLKSVKELLGITIMERSSFEKNPIDFLEAKGYKEVKKDLIIKLPKYSLFELENGRKRMLASAGELQKGNELALPSKYVNFLYLASHYEKLKGSPEDNEQKQLFVEQHKHYLDEIIEQISEFSKRVILADANLDKVLSAYNKHRDKPIREQAENIIHLFTLTNLGAPAAFKYFDTTIDRKRYTSTKEVLDATLIHQSITGLYETRIDLSQLGGDGGGGGGGGGVLNLEEEYRLHEKPVPSSIDPSWLQLFPTVWAERAGMGLANQVPPVVVELRSGASPVAVRQYPMSKEAREGIRPHIQRFLDLGVLVPCQSPWNTPLLPVKKPGTNDYRPVQDLREINKRVQDIHPTVPNPYNLLSSLPPSHTWYSVLDLKDAFFCLKLHPNSQPLFAFEWRDPEKGNTGQLTWTRLPQGFKNSPTLFNEALHRDLAPFRALNPQVVLLQYVDDLLVAAPTYRDCKEGTQKLLQELSKLGYRVSAKKAQLCQKEVTYLGYLLKEGKRWLTPARKATVMKIPPPTTPRQVREFLGKAGFCRLFIPGFASLAAPLYPLTKPSIPFIWTEEHQKAFDRIKEALLSAPALALPDLTKPFTLYVDERAGVARGVLTQTLGPWRRPVAYLSKKLDPVASGWPTCLKAVAAVALLLKDADKLTLGQNVTVIASHSLESIVRQPPDRWMTNARMTHYQSLLLNERVSFAPPAVLNPATLLPVESEATPVHRCSEILAEETGTRRDLKDQPLPGVPAWYTDGSSFIAEGKRRAGAAIVDGKRTVWASSLPEGTSAQKAELVALTQALRLAEGKDINIYTDSRYAFATAHIHGAIYKQRGWLTSAGKDIKNKEEILALLEAIHLPKRVAIIHCPGHQKGNDPVATGNRRADEAAKQAALSTRVLAETTKPAGKRTADGSEFEKRTADGSEFESPKKKAKVE

SEQ ID NO: 896 - protein, 2094 aa, synthetic construct
  source 1..2094: note = Description of Artificial Sequence: Synthetic polypeptide
MPAAKRVKLDGGDKKYSIGLDIGTNSVGWAVITDEYKVPSKKFKVLGNTDRHSIKKNLIGALLFDSGETAEATRLKRTARRRYTRRKNRICYLQEIFSNEMAKVDDSFFHRLEESFLVEEDKKHERHPIFGNIVDEVAYHEKYPTIYHLRKKLVDSTDKADLRLIYLALAHMIKFRGHFLIEGDLNPDNSDVDKLFIQLVQTYNQLFEENPINASGVDAKAILSARLSKSRRLENLIAQLPGEKKNGLFGNLIALSLGLTPNFKSNFDLAEDAKLQLSKDTYDDDLDNLLAQIGDQYADLFLAAKNLSDAILLSDILRVNTEITKAPLSASMIKRYDEHHQDLTLLKALVRQQLPEKYKEIFFDQSKNGYAGYIDGGASQEEFYKFIKPILEKMDGTEELLVKLNREDLLRKQRTFDNGSIPHQIHLGELHAILRRQEDFYPFLKDNREKIEKILTFRIPYYVGPLARGNSRFAWMTRKSEETITPWNFEEVVDKGASAQSFIERMTNFDKNLPNEKVLPKHSLLYEYFTVYNELTKVKYVTEGMRKPAFLSGEQKKAIVDLLFKTNRKVTVKQLKEDYFKKIECFDSVEISGVEDRFNASLGTYHDLLKIIKDKDFLDNEENEDILEDIVLTLTLFEDREMIEERLKTYAHLFDDKVMKQLKRRRYTGWGRLSRKLINGIRDKQSGKTILDFLKSDGFANRNFMQLIHDDSLTFKEDIQKAQVSGQGDSLHEHIANLAGSPAIKKGILQTVKVVDELVKVMGRHKPENIVIEMARENQTTQKGQKNSRERMKRIEEGIKELGSQILKEHPVENTQLQNEKLYLYYLQNGRDMYVDQELDINRLSDYDVDHIVPQSFLKDDSIDNKVLTRSDKARGKSDNVPSEEVVKKMKNYWRQLLNAKLITQRKFDNLTKAERGGLSELDKAGFIKRQLVETRQITKHVAQILDSRMNTKYDENDKLIREVKVITLKSKLVSDFRKDFQFYKVREINNYHHAHDAYLNAVVGTALIKKYPKLESEFVYGDYKVYDVRKMIAKSEQEIGKATAKYFFYSNIMNFFKTEITLANGEIRKRPLIETNGETGEIVWDKGRDFATVRKVLSMPQVNIVKKTEVQTGGFSKESILPKRNSDKLIARKKDWDPKKYGGFDSPTVAYSVLVVAKVEKGKSKKLKSVKELLGITIMERSSFEKNPIDFLEAKGYKEVKKDLIIKLPKYSLFELENGRKRMLASAGELQKGNELALPSKYVNFLYLASHYEKLKGSPEDNEQKQLFVEQHKHYLDEIIEQISEFSKRVILADANLDKVLSAYNKHRDKPIREQAENIIHLFTLTNLGAPAAFKYFDTTIDRKRYTSTKEVLDATLIHQSITGLYETRIDLSQLGGDGGPAPEAAAKGGGGGVLNLEEEYRLHEKPVPSSIDPSWLQLFPTVWAERAGMGLANQVPPVVVELRSGASPVAVRQYPMSKEAREGIRPHIQRFLDLGVLVPCQSPWNTPLLPVKKPGTNDYRPVQDLREINKRVQDIHPTVPNPYNLLSSLPPSHTWYSVLDLKDAFFCLKLHPNSQPLFAFEWRDPEKGNTGQLTWTRLPQGFKNSPTLFNEALHRDLAPFRALNPQVVLLQYVDDLLVAAPTYRDCKEGTQKLLQELSKLGYRVSAKKAQLCQKEVTYLGYLLKEGKRWLTPARKATVMKIPPPTTPRQVREFLGKAGFCRLFIPGFASLAAPLYPLTKPSIPFIWTEEHQKAFDRIKEALLSAPALALPDLTKPFTLYVDERAGVARGVLTQTLGPWRRPVAYLSKKLDPVASGWPTCLKAVAAVALLLKDADKLTLGQNVTVIASHSLESIVRQPPDRWMTNARMTHYQSLLLNERVSFAPPAVLNPATLLPVESEATPVHRCSEILAEETGTRRDLKDQPLPGVPAWYTDGSSFIAEGKRRAGAAIVDGKRTVWASSLPEGTSAQKAELVALTQALRLAEGKDINIYTDSRYAFATAHIHGAIYKQRGWLTSAGKDIKNKEEILALLEAIHLPKRVAIIHCPGHQKGNDPVATGNRRADEAAKQAALSTRVLAETTKPAGKRTADGSEFEKRTADGSEFESPKKKAKVE

SEQ ID NO: 897 - protein, 2091 aa, synthetic construct
  source 1..2091: note = Description of Artificial Sequence: Synthetic polypeptide
MPAAKRVKLDGGDKKYSIGLDIGTNSVGWAVITDEYKVPSKKFKVLGNTDRHSIKKNLIGALLFDSGETAEATRLKRTARRRYTRRKNRICYLQEIFSNEMAKVDDSFFHRLEESFLVEEDKKHERHPIFGNIVDEVAYHEKYPTIYHLRKKLVDSTDKADLRLIYLALAHMIKFRGHFLIEGDLNPDNSDVDKLFIQLVQTYNQLFEENPINASGVDAKAILSARLSKSRRLENLIAQLPGEKKNGLFGNLIALSLGLTPNFKSNFDLAEDAKLQLSKDTYDDDLDNLLAQIGDQYADLFLAAKNLSDAILLSDILRVNTEITKAPLSASMIKRYDEHHQDLTLLKALVRQQLPEKYKEIFFDQSKNGYAGYIDGGASQEEFYKFIKPILEKMDGTEELLVKLNREDLLRKQRTFDNGSIPHQIHLGELHAILRRQEDFYPFLKDNREKIEKILTFRIPYYVGPLARGNSRFAWMTRKSEETITPWNFEEVVDKGASAQSFIERMTNFDKNLPNEKVLPKHSLLYEYFTVYNELTKVKYVTEGMRKPAFLSGEQKKAIVDLLFKTNRKVTVKQLKEDYFKKIECFDSVEISGVEDRFNASLGTYHDLLKIIKDKDFLDNEENEDILEDIVLTLTLFEDREMIEERLKTYAHLFDDKVMKQLKRRRYTGWGRLSRKLINGIRDKQSGKTILDFLKSDGFANRNFMQLIHDDSLTFKEDIQKAQVSGQGDSLHEHIANLAGSPAIKKGILQTVKVVDELVKVMGRHKPENIVIEMARENQTTQKGQKNSRERMKRIEEGIKELGSQILKEHPVENTQLQNEKLYLYYLQNGRDMYVDQELDINRLSDYDVDHIVPQSFLKDDSIDNKVLTRSDKARGKSDNVPSEEVVKKMKNYWRQLLNAKLITQRKFDNLTKAERGGLSELDKAGFIKRQLVETRQITKHVAQILDSRMNTKYDENDKLIREVKVITLKSKLVSDFRKDFQFYKVREINNYHHAHDAYLNAVVGTALIKKYPKLESEFVYGDYKVYDVRKMIAKSEQEIGKATAKYFFYSNIMNFFKTEITLANGEIRKRPLIETNGETGEIVWDKGRDFATVRKVLSMPQVNIVKKTEVQTGGFSKESILPKRNSDKLIARKKDWDPKKYGGFDSPTVAYSVLVVAKVEKGKSKKLKSVKELLGITIMERSSFEKNPIDFLEAKGYKEVKKDLIIKLPKYSLFELENGRKRMLASAGELQKGNELALPSKYVNFLYLASHYEKLKGSPEDNEQKQLFVEQHKHYLDEIIEQISEFSKRVILADANLDKVLSAYNKHRDKPIREQAENIIHLFTLTNLGAPAAFKYFDTTIDRKRYTSTKEVLDATLIHQSITGLYETRIDLSQLGGDGGEAAAKGGSGGVLNLEEEYRLHEKPVPSSIDPSWLQLFPTVWAERAGMGLANQVPPVVVELRSGASPVAVRQYPMSKEAREGIRPHIQRFLDLGVLVPCQSPWNTPLLPVKKPGTNDYRPVQDLREINKRVQDIHPTVPNPYNLLSSLPPSHTWYSVLDLKDAFFCLKLHPNSQPLFAFEWRDPEKGNTGQLTWTRLPQGFKNSPTLFNEALHRDLAPFRALNPQVVLLQYVDDLLVAAPTYRDCKEGTQKLLQELSKLGYRVSAKKAQLCQKEVTYLGYLLKEGKRWLTPARKATVMKIPPPTTPRQVREFLGKAGFCRLFIPGFASLAAPLYPLTKPSIPFIWTEEHQKAFDRIKEALLSAPALALPDLTKPFTLYVDERAGVARGVLTQTLGPWRRPVAYLSKKLDPVASGWPTCLKAVAAVALLLKDADKLTLGQNVTVIASHSLESIVRQPPDRWMTNARMTHYQSLLLNERVSFAPPAVLNPATLLPVESEATPVHRCSEILAEETGTRRDLKDQPLPGVPAWYTDGSSFIAEGKRRAGAAIVDGKRTVWASSLPEGTSAQKAELVALTQALRLAEGKDINIYTDSRYAFATAHIHGAIYKQRGWLTSAGKDIKNKEEILALLEAIHLPKRVAIIHCPGHQKGNDPVATGNRRADEAAKQAALSTRVLAETTKPAGKRTADGSEFEKRTADGSEFESPKKKAKVE

SEQ ID NO: 898 - protein, 2094 aa, synthetic construct
  source 1..2094: note = Description of Artificial Sequence: Synthetic polypeptide
MPAAKRVKLDGGDKKYSIGLDIGTNSVGWAVITDEYKVPSKKFKVLGNTDRHSIKKNLIGALLFDSGETAEATRLKRTARRRYTRRKNRICYLQEIFSNEMAKVDDSFFHRLEESFLVEEDKKHERHPIFGNIVDEVAYHEKYPTIYHLRKKLVDSTDKADLRLIYLALAHMIKFRGHFLIEGDLNPDNSDVDKLFIQLVQTYNQLFEENPINASGVDAKAILSARLSKSRRLENLIAQLPGEKKNGLFGNLIALSLGLTPNFKSNFDLAEDAKLQLSKDTYDDDLDNLLAQIGDQYADLFLAAKNLSDAILLSDILRVNTEITKAPLSASMIKRYDEHHQDLTLLKALVRQQLPEKYKEIFFDQSKNGYAGYIDGGASQEEFYKFIKPILEKMDGTEELLVKLNREDLLRKQRTFDNGSIPHQIHLGELHAILRRQEDFYPFLKDNREKIEKILTFRIPYYVGPLARGNSRFAWMTRKSEETITPWNFEEVVDKGASAQSFIERMTNFDKNLPNEKVLPKHSLLYEYFTVYNELTKVKYVTEGMRKPAFLSGEQKKAIVDLLFKTNRKVTVKQLKEDYFKKIECFDSVEISGVEDRFNASLGTYHDLLKIIKDKDFLDNEENEDILEDIVLTLTLFEDREMIEERLKTYAHLFDDKVMKQLKRRRYTGWGRLSRKLINGIRDKQSGKTILDFLKSDGFANRNFMQLIHDDSLTFKEDIQKAQVSGQGDSLHEHIANLAGSPAIKKGILQTVKVVDELVKVMGRHKPENIVIEMARENQTTQKGQKNSRERMKRIEEGIKELGSQILKEHPVENTQLQNEKLYLYYLQNGRDMYVDQELDINRLSDYDVDHIVPQSFLKDDSIDNKVLTRSDKARGKSDNVPSEEVVKKMKNYWRQLLNAKLITQRKFDNLTKAERGGLSELDKAGFIKRQLVETRQITKHVAQILDSRMNTKYDENDKLIREVKVITLKSKLVSDFRKDFQFYKVREINNYHHAHDAYLNAVVGTALIKKYPKLESEFVYGDYKVYDVRKMIAKSEQEIGKATAKYFFYSNIMNFFKTEITLANGEIRKRPLIETNGETGEIVWDKGRDFATVRKVLSMPQVNIVKKTEVQTGGFSKESILPKRNSDKLIARKKDWDPKKYGGFDSPTVAYSVLVVAKVEKGKSKKLKSVKELLGITIMERSSFEKNPIDFLEAKGYKEVKKDLIIKLPKYSLFELENGRKRMLASAGELQKGNELALPSKYVNFLYLASHYEKLKGSPEDNEQKQLFVEQHKHYLDEIIEQISEFSKRVILADANLDKVLSAYNKHRDKPIREQAENIIHLFTLTNLGAPAAFKYFDTTIDRKRYTSTKEVLDATLIHQSITGLYETRIDLSQLGGDGGGGSPAPEAAAKGGVLNLEEEYRLHEKPVPSSIDPSWLQLFPTVWAERAGMGLANQVPPVVVELRSGASPVAVRQYPMSKEAREGIRPHIQRFLDLGVLVPCQSPWNTPLLPVKKPGTNDYRPVQDLREINKRVQDIHPTVPNPYNLLSSLPPSHTWYSVLDLKDAFFCLKLHPNSQPLFAFEWRDPEKGNTGQLTWTRLPQGFKNSPTLFNEALHRDLAPFRALNPQVVLLQYVDDLLVAAPTYRDCKEGTQKLLQELSKLGYRVSAKKAQLCQKEVTYLGYLLKEGKRWLTPARKATVMKIPPPTTPRQVREFLGKAGFCRLFIPGFASLAAPLYPLTKPSIPFIWTEEHQKAFDRIKEALLSAPALALPDLTKPFTLYVDERAGVARGVLTQTLGPWRRPVAYLSKKLDPVASGWPTCLKAVAAVALLLKDADKLTLGQNVTVIASHSLESIVRQPPDRWMTNARMTHYQSLLLNERVSFAPPAVLNPATLLPVESEATPVHRCSEILAEETGTRRDLKDQPLPGVPAWYTDGSSFIAEGKRRAGAAIVDGKRTVWASSLPEGTSAQKAELVALTQALRLAEGKDINIYTDSRYAFATAHIHGAIYKQRGWLTSAGKDIKNKEEILALLEAIHLPKRVAIIHCPGHQKGNDPVATGNRRADEAAKQAALSTRVLAETTKPAGKRTADGSEFEKRTADGSEFESPKKKAKVE

SEQ ID NO: 899 - protein, 2101 aa, synthetic construct
  source 1..2101: note = Description of Artificial Sequence: Synthetic polypeptide
MPAAKRVKLDGGDKKYSIGLDIGTNSVGWAVITDEYKVPSKKFKVLGNTDRHSIKKNLIGALLFDSGETAEATRLKRTARRRYTRRKNRICYLQEIFSNEMAKVDDSFFHRLEESFLVEEDKKHERHPIFGNIVDEVAYHEKYPTIYHLRKKLVDSTDKADLRLIYLALAHMIKFRGHFLIEGDLNPDNSDVDKLFIQLVQTYNQLFEENPINASGVDAKAILSARLSKSRRLENLIAQLPGEKKNGLFGNLIALSLGLTPNFKSNFDLAEDAKLQLSKDTYDDDLDNLLAQIGDQYADLFLAAKNLSDAILLSDILRVNTEITKAPLSASMIKRYDEHHQDLTLLKALVRQQLPEKYKEIFFDQSKNGYAGYIDGGASQEEFYKFIKPILEKMDGTEELLVKLNREDLLRKQRTFDNGSIPHQIHLGELHAILRRQEDFYPFLKDNREKIEKILTFRIPYYVGPLARGNSRFAWMTRKSEETITPWNFEEVVDKGASAQSFIERMTNFDKNLPNEKVLPKHSLLYEYFTVYNELTKVKYVTEGMRKPAFLSGEQKKAIVDLLFKTNRKVTVKQLKEDYFKKIECFDSVEISGVEDRFNASLGTYHDLLKIIKDKDFLDNEENEDILEDIVLTLTLFEDREMIEERLKTYAHLFDDKVMKQLKRRRYTGWGRLSRKLINGIRDKQSGKTILDFLKSDGFANRNFMQLIHDDSLTFKEDIQKAQVSGQGDSLHEHIANLAGSPAIKKGILQTVKVVDELVKVMGRHKPENIVIEMARENQTTQKGQKNSRERMKRIEEGIKELGSQILKEHPVENTQLQNEKLYLYYLQNGRDMYVDQELDINRLSDYDVDHIVPQSFLKDDSIDNKVLTRSDKARGKSDNVPSEEVVKKMKNYWRQLLNAKLITQRKFDNLTKAERGGLSELDKAGFIKRQLVETRQITKHVAQILDSRMNTKYDENDKLIREVKVITLKSKLVSDFRKDFQFYKVREINNYHHAHDAYLNAVVGTALIKKYPKLESEFVYGDYKVYDVRKMIAKSEQEIGKATAKYFFYSNIMNFFKTEITLANGEIRKRPLIETNGETGEIVWDKGRDFATVRKVLSMPQVNIVKKTEVQTGGFSKESILPKRNSDKLIARKKDWDPKKYGGFDSPTVAYSVLVVAKVEKGKSKKLKSVKELLGITIMERSSFEKNPIDFLEAKGYKEVKKDLIIKLPKYSLFELENGRKRMLASAGELQKGNELALPSKYVNFLYLASHYEKLKGSPEDNEQKQLFVEQHKHYLDEIIEQISEFSKRVILADANLDKVLSAYNKHRDKPIREQAENIIHLFTLTNLGAPAAFKYFDTTIDRKRYTSTKEVLDATLIHQSITGLYETRIDLSQLGGDGGGGSGGSGGSGGSGGSGGSGGVLNLEEEYRLHEKPVPSSIDPSWLQLFPTVWAERAGMGLANQVPPVVVELRSGASPVAVRQYPMSKEAREGIRPHIQRFLDLGVLVPCQSPWNTPLLPVKKPGTNDYRPVQDLREINKRVQDIHPTVPNPYNLLSSLPPSHTWYSVLDLKDAFFCLKLHPNSQPLFAFEWRDPEKGNTGQLTWTRLPQGFKNSPTLFNEALHRDLAPFRALNPQVVLLQYVDDLLVAAPTYRDCKEGTQKLLQELSKLGYRVSAKKAQLCQKEVTYLGYLLKEGKRWLTPARKATVMKIPPPTTPRQVREFLGKAGFCRLFIPGFASLAAPLYPLTKPSIPFIWTEEHQKAFDRIKEALLSAPALALPDLTKPFTLYVDERAGVARGVLTQTLGPWRRPVAYLSKKLDPVASGWPTCLKAVAAVALLLKDADKLTLGQNVTVIASHSLESIVRQPPDRWMTNARMTHYQSLLLNERVSFAPPAVLNPATLLPVESEATPVHRCSEILAEETGTRRDLKDQPLPGVPAWYTDGSSFIAEGKRRAGAAIVDGKRTVWASSLPEGTSAQKAELVALTQALRLAEGKDINIYTDSRYAFATAHIHGAIYKQRGWLTSAGKDIKNKEEILALLEAIHLPKRVAIIHCPGHQKGNDPVATGNRRADEAAKQAALSTRVLAETTKPAGKRTADGSEFEKRTADGSEFESPKKKAKVE

SEQ ID NO: 900 - protein, 2098 aa, synthetic construct
  source 1..2098: note = Description of Artificial Sequence: Synthetic polypeptide
MPAAKRVKLDGGDKKYSIGLDIGTNSVGWAVITDEYKVPSKKFKVLGNTDRHSIKKNLIGALLFDSGETAEATRLKRTARRRYTRRKNRICYLQEIFSNEMAKVDDSFFHRLEESFLVEEDKKHERHPIFGNIVDEVAYHEKYPTIYHLRKKLVDSTDKADLRLIYLALAHMIKFRGHFLIEGDLNPDNSDVDKLFIQLVQTYNQLFEENPINASGVDAKAILSARLSKSRRLENLIAQLPGEKKNGLFGNLIALSLGLTPNFKSNFDLAEDAKLQLSKDTYDDDLDNLLAQIGDQYADLFLAAKNLSDAILLSDILRVNTEITKAPLSASMIKRYDEHHQDLTLLKALVRQQLPEKYKEIFFDQSKNGYAGYIDGGASQEEFYKFIKPILEKMDGTEELLVKLNREDLLRKQRTFDNGSIPHQIHLGELHAILRRQEDFYPFLKDNREKIEKILTFRIPYYVGPLARGNSRFAWMTRKSEETITPWNFEEVVDKGASAQSFIERMTNFDKNLPNEKVLPKHSLLYEYFTVYNELTKVKYVTEGMRKPAFLSGEQKKAIVDLLFKTNRKVTVKQLKEDYFKKIECFDSVEISGVEDRFNASLGTYHDLLKIIKDKDFLDNEENEDILEDIVLTLTLFEDREMIEERLKTYAHLFDDKVMKQLKRRRYTGWGRLSRKLINGIRDKQSGKTILDFLKSDGFANRNFMQLIHDDSLTFKEDIQKAQVSGQGDSLHEHIANLAGSPAIKKGILQTVKVVDELVKVMGRHKPENIVIEMARENQTTQKGQKNSRERMKRIEEGIKELGSQILKEHPVENTQLQNEKLYLYYLQNGRDMYVDQELDINRLSDYDVDHIVPQSFLKDDSIDNKVLTRSDKARGKSDNVPSEEVVKKMKNYWRQLLNAKLITQRKFDNLTKAERGGLSELDKAGFIKRQLVETRQITKHVAQILDSRMNTKYDENDKLIREVKVITLKSKLVSDFRKDFQFYKVREINNYHHAHDAYLNAVVGTALIKKYPKLESEFVYGDYKVYDVRKMIAKSEQEIGKATAKYFFYSNIMNFFKTEITLANGEIRKRPLIETNGETGEIVWDKGRDFATVRKVLSMPQVNIVKKTEVQTGGFSKESILPKRNSDKLIARKKDWDPKKYGGFDSPTVAYSVLVVAKVEKGKSKKLKSVKELLGITIMERSSFEKNPIDFLEAKGYKEVKKDLIIKLPKYSLFELENGRKRMLASAGELQKGNELALPSKYVNFLYLASHYEKLKGSPEDNEQKQLFVEQHKHYLDEIIEQISEFSKRVILADANLDKVLSAYNKHRDKPIREQAENIIHLFTLTNLGAPAAFKYFDTTIDRKRYTSTKEVLDATLIHQSITGLYETRIDLSQLGGDGGEAAAKGGGGSEAAAKGGVLNLEEEYRLHEKPVPSSIDPSWLQLFPTVWAERAGMGLANQVPPVVVELRSGASPVAVRQYPMSKEAREGIRPHIQRFLDLGVLVPCQSPWNTPLLPVKKPGTNDYRPVQDLREINKRVQDIHPTVPNPYNLLSSLPPSHTWYSVLDLKDAFFCLKLHPNSQPLFAFEWRDPEKGNTGQLTWTRLPQGFKNSPTLFNEALHRDLAPFRALNPQVVLLQYVDDLLVAAPTYRDCKEGTQKLLQELSKLGYRVSAKKAQLCQKEVTYLGYLLKEGKRWLTPARKATVMKIPPPTTPRQVREFLGKAGFCRLFIPGFASLAAPLYPLTKPSIPFIWTEEHQKAFDRIKEALLSAPALALPDLTKPFTLYVDERAGVARGVLTQTLGPWRRPVAYLSKKLDPVASGWPTCLKAVAAVALLLKDADKLTLGQNVTVIASHSLESIVRQPPDRWMTNARMTHYQSLLLNERVSFAPPAVLNPATLLPVESEATPVHRCSEILAEETGTRRDLKDQPLPGVPAWYTDGSSFIAEGKRRAGAAIVDGKRTVWASSLPEGTSAQKAELVALTQALRLAEGKDINIYTDSRYAFATAHIHGAIYKQRGWLTSAGKDIKNKEEILALLEAIHLPKRVAIIHCPGHQKGNDPVATGNRRADEAAKQAALSTRVLAETTKPAGKRTADGSEFEKRTADGSEFESPKKKAKVE

SEQ ID NO: 901 - protein, 2094 aa, synthetic construct
  source 1..2094: note = Description of Artificial Sequence: Synthetic polypeptide
MPAAKRVKLDGGDKKYSIGLDIGTNSVGWAVITDEYKVPSKKFKVLGNTDRHSIKKNLIGALLFDSGETAEATRLKRTARRRYTRRKNRICYLQEIFSNEMAKVDDSFFHRLEESFLVEEDKKHERHPIFGNIVDEVAYHEKYPTIYHLRKKLVDSTDKADLRLIYLALAHMIKFRGHFLIEGDLNPDNSDVDKLFIQLVQTYNQLFEENPINASGVDAKAILSARLSKSRRLENLIAQLPGEKKNGLFGNLIALSLGLTPNFKSNFDLAEDAKLQLSKDTYDDDLDNLLAQIGDQYADLFLAAKNLSDAILLSDILRVNTEITKAPLSASMIKRYDEHHQDLTLLKALVRQQLPEKYKEIFFDQSKNGYAGYIDGGASQEEFYKFIKPILEKMDGTEELLVKLNREDLLRKQRTFDNGSIPHQIHLGELHAILRRQEDFYPFLKDNREKIEKILTFRIPYYVGPLARGNSRFAWMTRKSEETITPWNFEEVVDKGASAQSFIERMTNFDKNLPNEKVLPKHSLLYEYFTVYNELTKVKYVTEGMRKPAFLSGEQKKAIVDLLFKTNRKVTVKQLKEDYFKKIECFDSVEISGVEDRFNASLGTYHDLLKIIKDKDFLDNEENEDILEDIVLTLTLFEDREMIEERLKTYAHLFDDKVMKQLKRRRYTGWGRLSRKLINGIRDKQSGKTILDFLKSDGFANRNFMQLIHDDSLTFKEDIQKAQVSGQGDSLHEHIANLAGSPAIKKGILQTVKVVDELVKVMGRHKPENIVIEMARENQTTQKGQKNSRERMKRIEEGIKELGSQILKEHPVENTQLQNEKLYLYYLQNGRDMYVDQELDINRLSDYDVDHIVPQSFLKDDSIDNKVLTRSDKARGKSDNVPSEEVVKKMKNYWRQLLNAKLITQRKFDNLTKAERGGLSELDKAGFIKRQLVETRQITKHVAQILDSRMNTKYDENDKLIREVKVITLKSKLVSDFRKDFQFYKVREINNYHHAHDAYLNAVVGTALIKKYPKLESEFVYGDYKVYDVRKMIAKSEQEIGKATAKYFFYSNIMNFFKTEITLANGEIRKRPLIETNGETGEIVWDKGRDFATVRKVLSMPQVNIVKKTEVQTGGFSKESILPKRNSDKLIARKKDWDPKKYGGFDSPTVAYSVLVVAKVEKGKSKKLKSVKELLGITIMERSSFEKNPIDFLEAKGYKEVKKDLIIKLPKYSLFELENGRKRMLASAGELQKGNELALPSKYVNFLYLASHYEKLKGSPEDNEQKQLFVEQHKHYLDEIIEQISEFSKRVILADANLDKVLSAYNKHRDKPIREQAENIIHLFTLTNLGAPAAFKYFDTTIDRKRYTSTKEVLDATLIHQSITGLYETRIDLSQLGGDGGGGGEAAAKGGSGGVLNLEEEYRLHEKPVPSSIDPSWLQLFPTVWAERAGMGLANQVPPVVVELRSGASPVAVRQYPMSKEAREGIRPHIQRFLDLGVLVPCQSPWNTPLLPVKKPGTNDYRPVQDLREINKRVQDIHPTVPNPYNLLSSLPPSHTWYSVLDLKDAFFCLKLHPNSQPLFAFEWRDPEKGNTGQLTWTRLPQGFKNSPTLFNEALHRDLAPFRALNPQVVLLQYVDDLLVAAPTYRDCKEGTQKLLQELSKLGYRVSAKKAQLCQKEVTYLGYLLKEGKRWLTPARKATVMKIPPPTTPRQVREFLGKAGFCRLFIPGFASLAAPLYPLTKPSIPFIWTEEHQKAFDRIKEALLSAPALALPDLTKPFTLYVDERAGVARGVLTQTLGPWRRPVAYLSKKLDPVASGWPTCLKAVAAVALLLKDADKLTLGQNVTVIASHSLESIVRQPPDRWMTNARMTHYQSLLLNERVSFAPPAVLNPATLLPVESEATPVHRCSEILAEETGTRRDLKDQPLPGVPAWYTDGSSFIAEGKRRAGAAIVDGKRTVWASSLPEGTSAQKAELVALTQALRLAEGKDINIYTDSRYAFATAHIHGAIYKQRGWLTSAGKDIKNKEEILALLEAIHLPKRVAIIHCPGHQKGNDPVATGNRRADEAAKQAALSTRVLAETTKPAGKRTADGSEFEKRTADGSEFESPKKKAKVE

SEQ ID NO: 902 - protein, 2094 aa, synthetic construct
  source 1..2094: note = Description of Artificial Sequence: Synthetic polypeptide
MPAAKRVKLDGGDKKYSIGLDIGTNSVGWAVITDEYKVPSKKFKVLGNTDRHSIKKNLIGALLFDSGETAEATRLKRTARRRYTRRKNRICYLQEIFSNEMAKVDDSFFHRLEESFLVEEDKKHERHPIFGNIVDEVAYHEKYPTIYHLRKKLVDSTDKADLRLIYLALAHMIKFRGHFLIEGDLNPDNSDVDKLFIQLVQTYNQLFEENPINASGVDAKAILSARLSKSRRLENLIAQLPGEKKNGLFGNLIALSLGLTPNFKSNFDLAEDAKLQLSKDTYDDDLDNLLAQIGDQYADLFLAAKNLSDAILLSDILRVNTEITKAPLSASMIKRYDEHHQDLTLLKALVRQQLPEKYKEIFFDQSKNGYAGYIDGGASQEEFYKFIKPILEKMDGTEELLVKLNREDLLRKQRTFDNGSIPHQIHLGELHAILRRQEDFYPFLKDNREKIEKILTFRIPYYVGPLARGNSRFAWMTRKSEETITPWNFEEVVDKGASAQSFIERMTNFDKNLPNEKVLPKHSLLYEYFTVYNELTKVKYVTEGMRKPAFLSGEQKKAIVDLLFKTNRKVTVKQLKEDYFKKIECFDSVEISGVEDRFNASLGTYHDLLKIIKDKDFLDNEENEDILEDIVLTLTLFEDREMIEERLKTYAHLFDDKVMKQLKRRRYTGWGRLSRKLINGIRDKQSGKTILDFLKSDGFANRNFMQLIHDDSLTFKEDIQKAQVSGQGDSLHEHIANLAGSPAIKKGILQTVKVVDELVKVMGRHKPENIVIEMARENQTTQKGQKNSRERMKRIEEGIKELGSQILKEHPVENTQLQNEKLYLYYLQNGRDMYVDQELDINRLSDYDVDHIVPQSFLKDDSIDNKVLTRSDKARGKSDNVPSEEVVKKMKNYWRQLLNAKLITQRKFDNLTKAERGGLSELDKAGFIKRQLVETRQITKHVAQILDSRMNTKYDENDKLIREVKVITLKSKLVSDFRKDFQFYKVREINNYHHAHDAYLNAVVGTALIKKYPKLESEFVYGDYKVYDVRKMIAKSEQEIGKATAKYFFYSNIMNFFKTEITLANGEIRKRPLIETNGETGEIVWDKGRDFATVRKVLSMPQVNIVKKTEVQTGGFSKESILPKRNSDKLIARKKDWDPKKYGGFDSPTVAYSVLVVAKVEKGKSKKLKSVKELLGITIMERSSFEKNPIDFLEAKGYKEVKKDLIIKLPKYSLFELENGRKRMLASAGELQKGNELALPSKYVNFLYLASHYEKLKGSPEDNEQKQLFVEQHKHYLDEIIEQISEFSKRVILADANLDKVLSAYNKHRDKPIREQAENIIHLFTLTNLGAPAAFKYFDTTIDRKRYTSTKEVLDATLIHQSITGLYETRIDLSQLGGDGGGGSEAAAKGGGGGVLNLEEEYRLHEKPVPSSIDPSWLQLFPTVWAERAGMGLANQVPPVVVELRSGASPVAVRQYPMSKEAREGIRPHIQRFLDLGVLVPCQSPWNTPLLPVKKPGTNDYRPVQDLREINKRVQDIHPTVPNPYNLLSSLPPSHTWYSVLDLKDAFFCLKLHPNSQPLFAFEWRDPEKGNTGQLTWTRLPQGFKNSPTLFNEALHRDLAPFRALNPQVVLLQYVDDLLVAAPTYRDCKEGTQKLLQELSKLGYRVSAKKAQLCQKEVTYLGYLLKEGKRWLTPARKATVMKIPPPTTPRQVREFLGKAGFCRLFIPGFASLAAPLYPLTKPSIPFIWTEEHQKAFDRIKEALLSAPALALPDLTKPFTLYVDERAGVARGVLTQTLGPWRRPVAYLSKKLDPVASGWPTCLKAVAAVALLLKDADKLTLGQNVTVIASHSLESIVRQPPDRWMTNARMTHYQSLLLNERVSFAPPAVLNPATLLPVESEATPVHRCSEILAEETGTRRDLKDQPLPGVPAWYTDGSSFIAEGKRRAGAAIVDGKRTVWASSLPEGTSAQKAELVALTQALRLAEGKDINIYTDSRYAFATAHIHGAIYKQRGWLTSAGKDIKNKEEILALLEAIHLPKRVAIIHCPGHQKGNDPVATGNRRADEAAKQAALSTRVLAETTKPAGKRTADGSEFEKRTADGSEFESPKKKAKVE

SEQ ID NO: 903 - protein, 2092 aa, synthetic construct
  source 1..2092: note = Description of Artificial Sequence: Synthetic polypeptide
MPAAKRVKLDGGDKKYSIGLDIGTNSVGWAVITDEYKVPSKKFKVLGNTDRHSIKKNLIGALLFDSGETAEATRLKRTARRRYTRRKNRICYLQEIFSNEMAKVDDSFFHRLEESFLVEEDKKHERHPIFGNIVDEVAYHEKYPTIYHLRKKLVDSTDKADLRLIYLALAHMIKFRGHFLIEGDLNPDNSDVDKLFIQLVQTYNQLFEENPINASGVDAKAILSARLSKSRRLENLIAQLPGEKKNGLFGNLIALSLGLTPNFKSNFDLAEDAKLQLSKDTYDDDLDNLLAQIGDQYADLFLAAKNLSDAILLSDILRVNTEITKAPLSASMIKRYDEHHQDLTLLKALVRQQLPEKYKEIFFDQSKNGYAGYIDGGASQEEFYKFIKPILEKMDGTEELLVKLNREDLLRKQRTFDNGSIPHQIHLGELHAILRRQEDFYPFLKDNREKIEKILTFRIPYYVGPLARGNSRFAWMTRKSEETITPWNFEEVVDKGASAQSFIERMTNFDKNLPNEKVLPKHSLLYEYFTVYNELTKVKYVTEGMRKPAFLSGEQKKAIVDLLFKTNRKVTVKQLKEDYFKKIECFDSVEISGVEDRFNASLGTYHDLLKIIKDKDFLDNEENEDILEDIVLTLTLFEDREMIEERLKTYAHLFDDKVMKQLKRRRYTGWGRLSRKLINGIRDKQSGKTILDFLKSDGFANRNFMQLIHDDSLTFKEDIQKAQVSGQGDSLHEHIANLAGSPAIKKGILQTVKVVDELVKVMGRHKPENIVIEMARENQTTQKGQKNSRERMKRIEEGIKELGSQILKEHPVENTQLQNEKLYLYYLQNGRDMYVDQELDINRLSDYDVDHIVPQSFLKDDSIDNKVLTRSDKARGKSDNVPSEEVVKKMKNYWRQLLNAKLITQRKFDNLTKAERGGLSELDKAGFIKRQLVETRQITKHVAQILDSRMNTKYDENDKLIREVKVITLKSKLVSDFRKDFQFYKVREINNYHHAHDAYLNAVVGTALIKKYPKLESEFVYGDYKVYDVRKMIAKSEQEIGKATAKYFFYSNIMNFFKTEITLANGEIRKRPLIETNGETGEIVWDKGRDFATVRKVLSMPQVNIVKKTEVQTGGFSKESILPKRNSDKLIARKKDWDPKKYGGFDSPTVAYSVLVVAKVEKGKSKKLKSVKELLGITIMERSSFEKNPIDFLEAKGYKEVKKDLIIKLPKYSLFELENGRKRMLASAGELQKGNELALPSKYVNFLYLASHYEKLKGSPEDNEQKQLFVEQHKHYLDEIIEQISEFSKRVILADANLDKVLSAYNKHRDKPIREQAENIIHLFTLTNLGAPAAFKYFDTTIDRKRYTSTKEVLDATLIHQSITGLYETRIDLSQLGGDGGGGSGGGGSSGGVLNLEEEYRLHEKPVPSSIDPSWLQLFPTVWAERAGMGLANQVPPVVVELRSGASPVAVRQYPMSKEAREGIRPHIQRFLDLGVLVPCQSPWNTPLLPVKKPGTNDYRPVQDLREINKRVQDIHPTVPNPYNLLSSLPPSHTWYSVLDLKDAFFCLKLHPNSQPLFAFEWRDPEKGNTGQLTWTRLPQGFKNSPTLFNEALHRDLAPFRALNPQVVLLQYVDDLLVAAPTYRDCKEGTQKLLQELSKLGYRVSAKKAQLCQKEVTYLGYLLKEGKRWLTPARKATVMKIPPPTTPRQVREFLGKAGFCRLFIPGFASLAAPLYPLTKPSIPFIWTEEHQKAFDRIKEALLSAPALALPDLTKPFTLYVDERAGVARGVLTQTLGPWRRPVAYLSKKLDPVASGWPTCLKAVAAVALLLKDADKLTLGQNVTVIASHSLESIVRQPPDRWMTNARMTHYQSLLLNERVSFAPPAVLNPATLLPVESEATPVHRCSEILAEETGTRRDLKDQPLPGVPAWYTDGSSFIAEGKRRAGAAIVDGKRTVWASSLPEGTSAQKAELVALTQALRLAEGKDINIYTDSRYAFATAHIHGAIYKQRGWLTSAGKDIKNKEEILALLEAIHLPKRVAIIHCPGHQKGNDPVATGNRRADEAAKQAALSTRVLAETTKPAGKRTADGSEFEKRTADGSEFESPKKKAKVE

SEQ ID NO: 904 - protein, 2088 aa, synthetic construct
  source 1..2088: note = Description of Artificial Sequence: Synthetic polypeptide
MPAAKRVKLDGGDKKYSIGLDIGTNSVGWAVITDEYKVPSKKFKVLGNTDRHSIKKNLIGALLFDSGETAEATRLKRTARRRYTRRKNRICYLQEIFSNEMAKVDDSFFHRLEESFLVEEDKKHERHPIFGNIVDEVAYHEKYPTIYHLRKKLVDSTDKADLRLIYLALAHMIKFRGHFLIEGDLNPDNSDVDKLFIQLVQTYNQLFEENPINASGVDAKAILSARLSKSRRLENLIAQLPGEKKNGLFGNLIALSLGLTPNFKSNFDLAEDAKLQLSKDTYDDDLDNLLAQIGDQYADLFLAAKNLSDAILLSDILRVNTEITKAPLSASMIKRYDEHHQDLTLLKALVRQQLPEKYKEIFFDQSKNGYAGYIDGGASQEEFYKFIKPILEKMDGTEELLVKLNREDLLRKQRTFDNGSIPHQIHLGELHAILRRQEDFYPFLKDNREKIEKILTFRIPYYVGPLARGNSRFAWMTRKSEETITPWNFEEVVDKGASAQSFIERMTNFDKNLPNEKVLPKHSLLYEYFTVYNELTKVKYVTEGMRKPAFLSGEQKKAIVDLLFKTNRKVTVKQLKEDYFKKIECFDSVEISGVEDRFNASLGTYHDLLKIIKDKDFLDNEENEDILEDIVLTLTLFEDREMIEERLKTYAHLFDDKVMKQLKRRRYTGWGRLSRKLINGIRDKQSGKTILDFLKSDGFANRNFMQLIHDDSLTFKEDIQKAQVSGQGDSLHEHIANLAGSPAIKKGILQTVKVVDELVKVMGRHKPENIVIEMARENQTTQKGQKNSRERMKRIEEGIKELGSQILKEHPVENTQLQNEKLYLYYLQNGRDMYVDQELDINRLSDYDVDHIVPQSFLKDDSIDNKVLTRSDKARGKSDNVPSEEVVKKMKNYWRQLLNAKLITQRKFDNLTKAERGGLSELDKAGFIKRQLVETRQITKHVAQILDSRMNTKYDENDKLIREVKVITLKSKLVSDFRKDFQFYKVREINNYHHAHDAYLNAVVGTALIKKYPKLESEFVYGDYKVYDVRKMIAKSEQEIGKATAKYFFYSNIMNFFKTEITLANGEIRKRPLIETNGETGEIVWDKGRDFATVRKVLSMPQVNIVKKTEVQTGGFSKESILPKRNSDKLIARKKDWDPKKYGGFDSPTVAYSVLVVAKVEKGKSKKLKSVKELLGITIMERSSFEKNPIDFLEAKGYKEVKKDLIIKLPKYSLFELENGRKRMLASAGELQKGNELALPSKYVNFLYLASHYEKLKGSPEDNEQKQLFVEQHKHYLDEIIEQISEFSKRVILADANLDKVLSAYNKHRDKPIREQAENIIHLFTLTNLGAPAAFKYFDTTIDRKRYTSTKEVLDATLIHQSITGLYETRIDLSQLGGDGGPAPAPGGVLNLEEEYRLHEKPVPSSIDPSWLQLFPTVWAERAGMGLANQVPPVVVELRSGASPVAVRQYPMSKEAREGIRPHIQRFLDLGVLVPCQSPWNTPLLPVKKPGTNDYRPVQDLREINKRVQDIHPTVPNPYNLLSSLPPSHTWYSVLDLKDAFFCLKLHPNSQPLFAFEWRDPEKGNTGQLTWTRLPQGFKNSPTLFNEALHRDLAPFRALNPQVVLLQYVDDLLVAAPTYRDCKEGTQKLLQELSKLGYRVSAKKAQLCQKEVTYLGYLLKEGKRWLTPARKATVMKIPPPTTPRQVREFLGKAGFCRLFIPGFASLAAPLYPLTKPSIPFIWTEEHQKAFDRIKEALLSAPALALPDLTKPFTLYVDERAGVARGVLTQTLGPWRRPVAYLSKKLDPVASGWPTCLKAVAAVALLLKDADKLTLGQNVTVIASHSLESIVRQPPDRWMTNARMTHYQSLLLNERVSFAPPAVLNPATLLPVESEATPVHRCSEILAEETGTRRDLKDQPLPGVPAWYTDGSSFIAEGKRRAGAAIVDGKRTVWASSLPEGTSAQKAELVALTQALRLAEGKDINIYTDSRYAFATAHIHGAIYKQRGWLTSAGKDIKNKEEILALLEAIHLPKRVAIIHCPGHQKGNDPVATGNRRADEAAKQAALSTRVLAETTKPAGKRTADGSEFEKRTADGSEFESPKKKAKVE

SEQ ID NO: 905 - protein, 2094 aa, synthetic construct
  source 1..2094: note = Description of Artificial Sequence: Synthetic polypeptide
MPAAKRVKLDGGDKKYSIGLDIGTNSVGWAVITDEYKVPSKKFKVLGNTDRHSIKKNLIGALLFDSGETAEATRLKRTARRRYTRRKNRICYLQEIFSNEMAKVDDSFFHRLEESFLVEEDKKHERHPIFGNIVDEVAYHEKYPTIYHLRKKLVDSTDKADLRLIYLALAHMIKFRGHFLIEGDLNPDNSDVDKLFIQLVQTYNQLFEENPINASGVDAKAILSARLSKSRRLENLIAQLPGEKKNGLFGNLIALSLGLTPNFKSNFDLAEDAKLQLSKDTYDDDLDNLLAQIGDQYADLFLAAKNLSDAILLSDILRVNTEITKAPLSASMIKRYDEHHQDLTLLKALVRQQLPEKYKEIFFDQSKNGYAGYIDGGASQEEFYKFIKPILEKMDGTEELLVKLNREDLLRKQRTFDNGSIPHQIHLGELHAILRRQEDFYPFLKDNREKIEKILTFRIPYYVGPLARGNSRFAWMTRKSEETITPWNFEEVVDKGASAQSFIERMTNFDKNLPNEKVLPKHSLLYEYFTVYNELTKVKYVTEGMRKPAFLSGEQKKAIVDLLFKTNRKVTVKQLKEDYFKKIECFDSVEISGVEDRFNASLGTYHDLLKIIKDKDFLDNEENEDILEDIVLTLTLFEDREMIEERLKTYAHLFDDKVMKQLKRRRYTGWGRLSRKLINGIRDKQSGKTILDFLKSDGFANRNFMQLIHDDSLTFKEDIQKAQVSGQGDSLHEHIANLAGSPAIKKGILQTVKVVDELVKVMGRHKPENIVIEMARENQTTQKGQKNSRERMKRIEEGIKELGSQILKEHPVENTQLQNEKLYLYYLQNGRDMYVDQELDINRLSDYDVDHIVPQSFLKDDSIDNKVLTRSDKARGKSDNVPSEEVVKKMKNYWRQLLNAKLITQRKFDNLTKAERGGLSELDKAGFIKRQLVETRQITKHVAQILDSRMNTKYDENDKLIREVKVITLKSKLVSDFRKDFQFYKVREINNYHHAHDAYLNAVVGTALIKKYPKLESEFVYGDYKVYDVRKMIAKSEQEIGKATAKYFFYSNIMNFFKTEITLANGEIRKRPLIETNGETGEIVWDKGRDFATVRKVLSMPQVNIVKKTEVQTGGFSKESILPKRNSDKLIARKKDWDPKKYGGFDSPTVAYSVLVVAKVEKGKSKKLKSVKELLGITIMERSSFEKNPIDFLEAKGYKEVKKDLIIKLPKYSLFELENGRKRMLASAGELQKGNELALPSKYVNFLYLASHYEKLKGSPEDNEQKQLFVEQHKHYLDEIIEQISEFSKRVILADANLDKVLSAYNKHRDKPIREQAENIIHLFTLTNLGAPAAFKYFDTTIDRKRYTSTKEVLDATLIHQSITGLYETRIDLSQLGGDGGEAAAKGGSGSSGGVLNLEEEYRLHEKPVPSSIDPSWLQLFPTVWAERAGMGLANQVPPVVVELRSGASPVAVRQYPMSKEAREGIRPHIQRFLDLGVLVPCQSPWNTPLLPVKKPGTNDYRPVQDLREINKRVQDIHPTVPNPYNLLSSLPPSHTWYSVLDLKDAFFCLKLHPNSQPLFAFEWRDPEKGNTGQLTWTRLPQGFKNSPTLFNEALHRDLAPFRALNPQVVLLQYVDDLLVAAPTYRDCKEGTQKLLQELSKLGYRVSAKKAQLCQKEVTYLGYLLKEGKRWLTPARKATVMKIPPPTTPRQVREFLGKAGFCRLFIPGFASLAAPLYPLTKPSIPFIWTEEHQKAFDRIKEALLSAPALALPDLTKPFTLYVDERAGVARGVLTQTLGPWRRPVAYLSKKLDPVASGWPTCLKAVAAVALLLKDADKLTLGQNVTVIASHSLESIVRQPPDRWMTNARMTHYQSLLLNERVSFAPPAVLNPATLLPVESEATPVHRCSEILAEETGTRRDLKDQPLPGVPAWYTDGSSFIAEGKRRAGAAIVDGKRTVWASSLPEGTSAQKAELVALTQALRLAEGKDINIYTDSRYAFATAHIHGAIYKQRGWLTSAGKDIKNKEEILALLEAIHLPKRVAIIHCPGHQKGNDPVATGNRRADEAAKQAALSTRVLAETTKPAGKRTADGSEFEKRTADGSEFESPKKKAKVE

SEQ ID NO: 906 - protein, 2089 aa, synthetic construct
  source 1..2089: note = Description of Artificial Sequence: Synthetic polypeptide
MPAAKRVKLDGGDKKYSIGLDIGTNSVGWAVITDEYKVPSKKFKVLGNTDRHSIKKNLIGALLFDSGETAEATRLKRTARRRYTRRKNRICYLQEIFSNEMAKVDDSFFHRLEESFLVEEDKKHERHPIFGNIVDEVAYHEKYPTIYHLRKKLVDSTDKADLRLIYLALAHMIKFRGHFLIEGDLNPDNSDVDKLFIQLVQTYNQLFEENPINASGVDAKAILSARLSKSRRLENLIAQLPGEKKNGLFGNLIALSLGLTPNFKSNFDLAEDAKLQLSKDTYDDDLDNLLAQIGDQYADLFLAAKNLSDAILLSDILRVNTEITKAPLSASMIKRYDEHHQDLTLLKALVRQQLPEKYKEIFFDQSKNGYAGYIDGGASQEEFYKFIKPILEKMDGTEELLVKLNREDLLRKQRTFDNGSIPHQIHLGELHAILRRQEDFYPFLKDNREKIEKILTFRIPYYVGPLARGNSRFAWMTRKSEETITPWNFEEVVDKGASAQSFIERMTNFDKNLPNEKVLPKHSLLYEYFTVYNELTKVKYVTEGMRKPAFLSGEQKKAIVDLLFKTNRKVTVKQLKEDYFKKIECFDSVEISGVEDRFNASLGTYHDLLKIIKDKDFLDNEENEDILEDIVLTLTLFEDREMIEERLKTYAHLFDDKVMKQLKRRRYTGWGRLSRKLINGIRDKQSGKTILDFLKSDGFANRNFMQLIHDDSLTFKEDIQKAQVSGQGDSLHEHIANLAGSPAIKKGILQTVKVVDELVKVMGRHKPENIVIEMARENQTTQKGQKNSRERMKRIEEGIKELGSQILKEHPVENTQLQNEKLYLYYLQNGRDMYVDQELDINRLSDYDVDHIVPQSFLKDDSIDNKVLTRSDKARGKSDNVPSEEVVKKMKNYWRQLLNAKLITQRKFDNLTKAERGGLSELDKAGFIKRQLVETRQITKHVAQILDSRMNTKYDENDKLIREVKVITLKSKLVSDFRKDFQFYKVREINNYHHAHDAYLNAVVGTALIKKYPKLESEFVYGDYKVYDVRKMIAKSEQEIGKATAKYFFYSNIMNFFKTEITLANGEIRKRPLIETNGETGEIVWDKGRDFATVRKVLSMPQVNIVKKTEVQTGGFSKESILPKRNSDKLIARKKDWDPKKYGGFDSPTVAYSVLVVAKVEKGKSKKLKSVKELLGITIMERSSFEKNPIDFLEAKGYKEVKKDLIIKLPKYSLFELENGRKRMLASAGELQKGNELALPSKYVNFLYLASHYEKLKGSPEDNEQKQLFVEQHKHYLDEIIEQISEFSKRVILADANLDKVLSAYNKHRDKPIREQAENIIHLFTLTNLGAPAAFKYFDTTIDRKRYTSTKEVLDATLIHQSITGLYETRIDLSQLGGDGGGGSGGSGGVLNLEEEYRLHEKPVPSSIDPSWLQLFPTVWAERAGMGLANQVPPVVVELRSGASPVAVRQYPMSKEAREGIRPHIQRFLDLGVLVPCQSPWNTPLLPVKKPGTNDYRPVQDLREINKRVQDIHPTVPNPYNLLSSLPPSHTWYSVLDLKDAFFCLKLHPNSQPLFAFEWRDPEKGNTGQLTWTRLPQGFKNSPTLFNEALHRDLAPFRALNPQVVLLQYVDDLLVAAPTYRDCKEGTQKLLQELSKLGYRVSAKKAQLCQKEVTYLGYLLKEGKRWLTPARKATVMKIPPPTTPRQVREFLGKAGFCRLFIPGFASLAAPLYPLTKPSIPFIWTEEHQKAFDRIKEALLSAPALALPDLTKPFTLYVDERAGVARGVLTQTLGPWRRPVAYLSKKLDPVASGWPTCLKAVAAVALLLKDADKLTLGQNVTVIASHSLESIVRQPPDRWMTNARMTHYQSLLLNERVSFAPPAVLNPATLLPVESEATPVHRCSEILAEETGTRRDLKDQPLPGVPAWYTDGSSFIAEGKRRAGAAIVDGKRTVWASSLPEGTSAQKAELVALTQALRLAEGKDINIYTDSRYAFATAHIHGAIYKQRGWLTSAGKDIKNKEEILALLEAIHLPKRVAIIHCPGHQKGNDPVATGNRRADEAAKQAALSTRVLAETTKPAGKRTADGSEFEKRTADGSEFESPKKKAKVE

SEQ ID NO: 907 - protein, 2095 aa, synthetic construct
  source 1..2095: note = Description of Artificial Sequence: Synthetic polypeptide
MPAAKRVKLDGGDKKYSIGLDIGTNSVGWAVITDEYKVPSKKFKVLGNTDRHSIKKNLIGALLFDSGETAEATRLKRTARRRYTRRKNRICYLQEIFSNEMAKVDDSFFHRLEESFLVEEDKKHERHPIFGNIVDEVAYHEKYPTIYHLRKKLVDSTDKADLRLIYLALAHMIKFRGHFLIEGDLNPDNSDVDKLFIQLVQTYNQLFEENPINASGVDAKAILSARLSKSRRLENLIAQLPGEKKNGLFGNLIALSLGLTPNFKSNFDLAEDAKLQLSKDTYDDDLDNLLAQIGDQYADLFLAAKNLSDAILLSDILRVNTEITKAPLSASMIKRYDEHHQDLTLLKALVRQQLPEKYKEIFFDQSKNGYAGYIDGGASQEEFYKFIKPILEKMDGTEELLVKLNREDLLRKQRTFDNGSIPHQIHLGELHAILRRQEDFYPFLKDNREKIEKILTFRIPYYVGPLARGNSRFAWMTRKSEETITPWNFEEVVDKGASAQSFIERMTNFDKNLPNEKVLPKHSLLYEYFTVYNELTKVKYVTEGMRKPAFLSGEQKKAIVDLLFKTNRKVTVKQLKEDYFKKIECFDSVEISGVEDRFNASLGTYHDLLKIIKDKDFLDNEENEDILEDIVLTLTLFEDREMIEERLKTYAHLFDDKVMKQLKRRRYTGWGRLSRKLINGIRDKQSGKTILDFLKSDGFANRNFMQLIHDDSLTFKEDIQKAQVSGQGDSLHEHIANLAGSPAIKKGILQTVKVVDELVKVMGRHKPENIVIEMARENQTTQKGQKNSRERMKRIEEGIKELGSQILKEHPVENTQLQNEKLYLYYLQNGRDMYVDQELDINRLSDYDVDHIVPQSFLKDDSIDNKVLTRSDKARGKSDNVPSEEVVKKMKNYWRQLLNAKLITQRKFDNLTKAERGGLSELDKAGFIKRQLVETRQITKHVAQILDSRMNTKYDENDKLIREVKVITLKSKLVSDFRKDFQFYKVREINNYHHAHDAYLNAVVGTALIKKYPKLESEFVYGDYKVYDVRKMIAKSEQEIGKATAKYFFYSNIMNFFKTEITLANGEIRKRPLIETNGETGEIVWDKGRDFATVRKVLSMPQVNIVKKTEVQTGGFSKESILPKRNSDKLIARKKDWDPKKYGGFDSPTVAYSVLVVAKVEKGKSKKLKSVKELLGITIMERSSFEKNPIDFLEAKGYKEVKKDLIIKLPKYSLFELENGRKRMLASAGELQKGNELALPSKYVNFLYLASHYEKLKGSPEDNEQKQLFVEQHKHYLDEIIEQISEFSKRVILADANLDKVLSAYNKHRDKPIREQAENIIHLFTLTNLGAPAAFKYFDTTIDRKRYTSTKEVLDATLIHQSITGLYETRIDLSQLGGDGGGSAGSAAGSGEFGGVLNLEEEYRLHEKPVPSSIDPSWLQLFPTVWAERAGMGLANQVPPVVVELRSGASPVAVRQYPMSKEAREGIRPHIQRFLDLGVLVPCQSPWNTPLLPVKKPGTNDYRPVQDLREINKRVQDIHPTVPNPYNLLSSLPPSHTWYSVLDLKDAFFCLKLHPNSQPLFAFEWRDPEKGNTGQLTWTRLPQGFKNSPTLFNEALHRDLAPFRALNPQVVLLQYVDDLLVAAPTYRDCKEGTQKLLQELSKLGYRVSAKKAQLCQKEVTYLGYLLKEGKRWLTPARKATVMKIPPPTTPRQVREFLGKAGFCRLFIPGFASLAAPLYPLTKPSIPFIWTEEHQKAFDRIKEALLSAPALALPDLTKPFTLYVDERAGVARGVLTQTLGPWRRPVAYLSKKLDPVASGWPTCLKAVAAVALLLKDADKLTLGQNVTVIASHSLESIVRQPPDRWMTNARMTHYQSLLLNERVSFAPPAVLNPATLLPVESEATPVHRCSEILAEETGTRRDLKDQPLPGVPAWYTDGSSFIAEGKRRAGAAIVDGKRTVWASSLPEGTSAQKAELVALTQALRLAEGKDINIYTDSRYAFATAHIHGAIYKQRGWLTSAGKDIKNKEEILALLEAIHLPKRVAIIHCPGHQKGNDPVATGNRRADEAAKQAALSTRVLAETTKPAGKRTADGSEFEKRTADGSEFESPKKKAKVE

SEQ ID NO: 908 - protein, 2092 aa, synthetic construct
  source 1..2092: note = Description of Artificial Sequence: Synthetic polypeptide
MPAAKRVKLDGGDKKYSIGLDIGTNSVGWAVITDEYKVPSKKFKVLGNTDRHSIKKNLIGALLFDSGETAEATRLKRTARRRYTRRKNRICYLQEIFSNEMAKVDDSFFHRLEESFLVEEDKKHERHPIFGNIVDEVAYHEKYPTIYHLRKKLVDSTDKADLRLIYLALAHMIKFRGHFLIEGDLNPDNSDVDKLFIQLVQTYNQLFEENPINASGVDAKAILSARLSKSRRLENLIAQLPGEKKNGLFGNLIALSLGLTPNFKSNFDLAEDAKLQLSKDTYDDDLDNLLAQIGDQYADLFLAAKNLSDAILLSDILRVNTEITKAPLSASMIKRYDEHHQDLTLLKALVRQQLPEKYKEIFFDQSKNGYAGYIDGGASQEEFYKFIKPILEKMDGTEELLVKLNREDLLRKQRTFDNGSIPHQIHLGELHAILRRQEDFYPFLKDNREKIEKILTFRIPYYVGPLARGNSRFAWMTRKSEETITPWNFEEVVDKGASAQSFIERMTNFDKNLPNEKVLPKHSLLYEYFTVYNELTKVKYVTEGMRKPAFLSGEQKKAIVDLLFKTNRKVTVKQLKEDYFKKIECFDSVEISGVEDRFNASLGTYHDLLKIIKDKDFLDNEENEDILEDIVLTLTLFEDREMIEERLKTYAHLFDDKVMKQLKRRRYTGWGRLSRKLINGIRDKQSGKTILDFLKSDGFANRNFMQLIHDDSLTFKEDIQKAQVSGQGDSLHEHIANLAGSPAIKKGILQTVKVVDELVKVMGRHKPENIVIEMARENQTTQKGQKNSRERMKRIEEGIKELGSQILKEHPVENTQLQNEKLYLYYLQNGRDMYVDQELDINRLSDYDVDHIVPQSFLKDDSIDNKVLTRSDKARGKSDNVPSEEVVKKMKNYWRQLLNAKLITQRKFDNLTKAERGGLSELDKAGFIKRQLVETRQITKHVAQILDSRMNTKYDENDKLIREVKVITLKSKLVSDFRKDFQFYKVREINNYHHAHDAYLNAVVGTALIKKYPKLESEFVYGDYKVYDVRKMIAKSEQEIGKATAKYFFYSNIMNFFKTEITLANGEIRKRPLIETNGETGEIVWDKGRDFATVRKVLSMPQVNIVKKTEVQTGGFSKESILPKRNSDKLIARKKDWDPKKYGGFDSPTVAYSVLVVAKVEKGKSKKLKSVKELLGITIMERSSFEKNPIDFLEAKGYKEVKKDLIIKLPKYSLFELENGRKRMLASAGELQKGNELALPSKYVNFLYLASHYEKLKGSPEDNEQKQLFVEQHKHYLDEIIEQISEFSKRVILADANLDKVLSAYNKHRDKPIREQAENIIHLFTLTNLGAPAAFKYFDTTIDRKRYTSTKEVLDATLIHQSITGLYETRIDLSQLGGDGGGGSGGGPAPGGVLNLEEEYRLHEKPVPSSIDPSWLQLFPTVWAERAGMGLANQVPPVVVELRSGASPVAVRQYPMSKEAREGIRPHIQRFLDLGVLVPCQSPWNTPLLPVKKPGTNDYRPVQDLREINKRVQDIHPTVPNPYNLLSSLPPSHTWYSVLDLKDAFFCLKLHPNSQPLFAFEWRDPEKGNTGQLTWTRLPQGFKNSPTLFNEALHRDLAPFRALNPQVVLLQYVDDLLVAAPTYRDCKEGTQKLLQELSKLGYRVSAKKAQLCQKEVTYLGYLLKEGKRWLTPARKATVMKIPPPTTPRQVREFLGKAGFCRLFIPGFASLAAPLYPLTKPSIPFIWTEEHQKAFDRIKEALLSAPALALPDLTKPFTLYVDERAGVARGVLTQTLGPWRRPVAYLSKKLDPVASGWPTCLKAVAAVALLLKDADKLTLGQNVTVIASHSLESIVRQPPDRWMTNARMTHYQSLLLNERVSFAPPAVLNPATLLPVESEATPVHRCSEILAEETGTRRDLKDQPLPGVPAWYTDGSSFIAEGKRRAGAAIVDGKRTVWASSLPEGTSAQKAELVALTQALRLAEGKDINIYTDSRYAFATAHIHGAIYKQRGWLTSAGKDIKNKEEILALLEAIHLPKRVAIIHCPGHQKGNDPVATGNRRADEAAKQAALSTRVLAETTKPAGKRTADGSEFEKRTADGSEFESPKKKAKVE

SEQ ID NO: 909 - protein, 2092 aa, synthetic construct
  source 1..2092: note = Description of Artificial Sequence: Synthetic polypeptide
MPAAKRVKLDGGDKKYSIGLDIGTNSVGWAVITDEYKVPSKKFKVLGNTDRHSIKKNLIGALLFDSGETAEATRLKRTARRRYTRRKNRICYLQEIFSNEMAKVDDSFFHRLEESFLVEEDKKHERHPIFGNIVDEVAYHEKYPTIYHLRKKLVDSTDKADLRLIYLALAHMIKFRGHFLIEGDLNPDNSDVDKLFIQLVQTYNQLFEENPINASGVDAKAILSARLSKSRRLENLIAQLPGEKKNGLFGNLIALSLGLTPNFKSNFDLAEDAKLQLSKDTYDDDLDNLLAQIGDQYADLFLAAKNLSDAILLSDILRVNTEITKAPLSASMIKRYDEHHQDLTLLKALVRQQLPEKYKEIFFDQSKNGYAGYIDGGASQEEFYKFIKPILEKMDGTEELLVKLNREDLLRKQRTFDNGSIPHQIHLGELHAILRRQEDFYPFLKDNREKIEKILTFRIPYYVGPLARGNSRFAWMTRKSEETITPWNFEEVVDKGASAQSFIERMTNFDKNLPNEKVLPKHSLLYEYFTVYNELTKVKYVTEGMRKPAFLSGEQKKAIVDLLFKTNRKVTVKQLKEDYFKKIECFDSVEISGVEDRFNASLGTYHDLLKIIKDKDFLDNEENEDILEDIVLTLTLFEDREMIEERLKTYAHLFDDKVMKQLKRRRYTGWGRLSRKLINGIRDKQSGKTILDFLKSDGFANRNFMQLIHDDSLTFKEDIQKAQVSGQGDSLHEHIANLAGSPAIKKGILQTVKVVDELVKVMGRHKPENIVIEMARENQTTQKGQKNSRERMKRIEEGIKELGSQILKEHPVENTQLQNEKLYLYYLQNGRDMYVDQELDINRLSDYDVDHIVPQSFLKDDSIDNKVLTRSDKARGKSDNVPSEEVVKKMKNYWRQLLNAKLITQRKFDNLTKAERGGLSELDKAGFIKRQLVETRQITKHVAQILDSRMNTKYDENDKLIREVKVITLKSKLVSDFRKDFQFYKVREINNYHHAHDAYLNAVVGTALIKKYPKLESEFVYGDYKVYDVRKMIAKSEQEIGKATAKYFFYSNIMNFFKTEITLANGEIRKRPLIETNGETGEIVWDKGRDFATVRKVLSMPQVNIVKKTEVQTGGFSKESILPKRNSDKLIARKKDWDPKKYGGFDSPTVAYSVLVVAKVEKGKSKKLKSVKELLGITIMERSSFEKNPIDFLEAKGYKEVKKDLIIKLPKYSLFELENGRKRMLASAGELQKGNELALPSKYVNFLYLASHYEKLKGSPEDNEQKQLFVEQHKHYLDEIIEQISEFSKRVILADANLDKVLSAYNKHRDKPIREQAENIIHLFTLTNLGAPAAFKYFDTTIDRKRYTSTKEVLDATLIHQSITGLYETRIDLSQLGGDGGGGSGSSGGGGGVLNLEEEYRLHEKPVPSSIDPSWLQLFPTVWAERAGMGLANQVPPVVVELRSGASPVAVRQYPMSKEAREGIRPHIQRFLDLGVLVPCQSPWNTPLLPVKKPGTNDYRPVQDLREINKRVQDIHPTVPNPYNLLSSLPPSHTWYSVLDLKDAFFCLKLHPNSQPLFAFEWRDPEKGNTGQLTWTRLPQGFKNSPTLFNEALHRDLAPFRALNPQVVLLQYVDDLLVAAPTYRDCKEGTQKLLQELSKLGYRVSAKKAQLCQKEVTYLGYLLKEGKRWLTPARKATVMKIPPPTTPRQVREFLGKAGFCRLFIPGFASLAAPLYPLTKPSIPFIWTEEHQKAFDRIKEALLSAPALALPDLTKPFTLYVDERAGVARGVLTQTLGPWRRPVAYLSKKLDPVASGWPTCLKAVAAVALLLKDADKLTLGQNVTVIASHSLESIVRQPPDRWMTNARMTHYQSLLLNERVSFAPPAVLNPATLLPVESEATPVHRCSEILAEETGTRRDLKDQPLPGVPAWYTDGSSFIAEGKRRAGAAIVDGKRTVWASSLPEGTSAQKAELVALTQALRLAEGKDINIYTDSRYAFATAHIHGAIYKQRGWLTSAGKDIKNKEEILALLEAIHLPKRVAIIHCPGHQKGNDPVATGNRRADEAAKQAALSTRVLAETTKPAGKRTADGSEFEKRTADGSEFESPKKKAKVE

SEQ ID NO: 910 - protein, 2094 aa, synthetic construct
  source 1..2094: note = Description of Artificial Sequence: Synthetic polypeptide
MPAAKRVKLDGGDKKYSIGLDIGTNSVGWAVITDEYKVPSKKFKVLGNTDRHSIKKNLIGALLFDSGETAEATRLKRTARRRYTRRKNRICYLQEIFSNEMAKVDDSFFHRLEESFLVEEDKKHERHPIFGNIVDEVAYHEKYPTIYHLRKKLVDSTDKADLRLIYLALAHMIKFRGHFLIEGDLNPDNSDVDKLFIQLVQTYNQLFEENPINASGVDAKAILSARLSKSRRLENLIAQLPGEKKNGLFGNLIALSLGLTPNFKSNFDLAEDAKLQLSKDTYDDDLDNLLAQIGDQYADLFLAAKNLSDAILLSDILRVNTEITKAPLSASMIKRYDEHHQDLTLLKALVRQQLPEKYKEIFFDQSKNGYAGYIDGGASQEEFYKFIKPILEKMDGTEELLVKLNREDLLRKQRTFDNGSIPHQIHLGELHAILRRQEDFYPFLKDNREKIEKILTFRIPYYVGPLARGNSRFAWMTRKSEETITPWNFEEVVDKGASAQSFIERMTNFDKNLPNEKVLPKHSLLYEYFTVYNELTKVKYVTEGMRKPAFLSGEQKKAIVDLLFKTNRKVTVKQLKEDYFKKIECFDSVEISGVEDRFNASLGTYHDLLKIIKDKDFLDNEENEDILEDIVLTLTLFEDREMIEERLKTYAHLFDDKVMKQLKRRRYTGWGRLSRKLINGIRDKQSGKTILDFLKSDGFANRNFMQLIHDDSLTFKEDIQKAQVSGQGDSLHEHIANLAGSPAIKKGILQTVKVVDELVKVMGRHKPENIVIEMARENQTTQKGQKNSRERMKRIEEGIKELGSQILKEHPVENTQLQNEKLYLYYLQNGRDMYVDQELDINRLSDYDVDHIVPQSFLKDDSIDNKVLTRSDKARGKSDNVPSEEVVKKMKNYWRQLLNAKLITQRKFDNLTKAERGGLSELDKAGFIKRQLVETRQITKHVAQILDSRMNTKYDENDKLIREVKVITLKSKLVSDFRKDFQFYKVREINNYHHAHDAYLNAVVGTALIKKYPKLESEFVYGDYKVYDVRKMIAKSEQEIGKATAKYFFYSNIMNFFKTEITLANGEIRKRPLIETNGETGEIVWDKGRDFATVRKVLSMPQVNIVKKTEVQTGGFSKESILPKRNSDKLIARKKDWDPKKYGGFDSPTVAYSVLVVAKVEKGKSKKLKSVKELLGITIMERSSFEKNPIDFLEAKGYKEVKKDLIIKLPKYSLFELENGRKRMLASAGELQKGNELALPSKYVNFLYLASHYEKLKGSPEDNEQKQLFVEQHKHYLDEIIEQISEFSKRVILADANLDKVLSAYNKHRDKPIREQAENIIHLFTLTNLGAPAAFKYFDTTIDRKRYTSTKEVLDATLIHQSITGLYETRIDLSQLGGDGGGSSEAAAKGGGGGVLNLEEEYRLHEKPVPSSIDPSWLQLFPTVWAERAGMGLANQVPPVVVELRSGASPVAVRQYPMSKEAREGIRPHIQRFLDLGVLVPCQSPWNTPLLPVKKPGTNDYRPVQDLREINKRVQDIHPTVPNPYNLLSSLPPSHTWYSVLDLKDAFFCLKLHPNSQPLFAFEWRDPEKGNTGQLTWTRLPQGFKNSPTLFNEALHRDLAPFRALNPQVVLLQYVDDLLVAAPTYRDCKEGTQKLLQELSKLGYRVSAKKAQLCQKEVTYLGYLLKEGKRWLTPARKATVMKIPPPTTPRQVREFLGKAGFCRLFIPGFASLAAPLYPLTKPSIPFIWTEEHQKAFDRIKEALLSAPALALPDLTKPFTLYVDERAGVARGVLTQTLGPWRRPVAYLSKKLDPVASGWPTCLKAVAAVALLLKDADKLTLGQNVTVIASHSLESIVRQPPDRWMTNARMTHYQSLLLNERVSFAPPAVLNPATLLPVESEATPVHRCSEILAEETGTRRDLKDQPLPGVPAWYTDGSSFIAEGKRRAGAAIVDGKRTVWASSLPEGTSAQKAELVALTQALRLAEGKDINIYTDSRYAFATAHIHGAIYKQRGWLTSAGKDIKNKEEILALLEAIHLPKRVAIIHCPGHQKGNDPVATGNRRADEAAKQAALSTRVLAETTKPAGKRTADGSEFEKRTADGSEFESPKKKAKVE

SEQ ID NO: 911 - protein, 2098 aa, synthetic construct
  source 1..2098: note = Description of Artificial Sequence: Synthetic polypeptide
MPAAKRVKLDGGDKKYSIGLDIGTNSVGWAVITDEYKVPSKKFKVLGNTDRHSIKKNLIGALLFDSGETAEATRLKRTARRRYTRRKNRICYLQEIFSNEMAKVDDSFFHRLEESFLVEEDKKHERHPIFGNIVDEVAYHEKYPTIYHLRKKLVDSTDKADLRLIYLALAHMIKFRGHFLIEGDLNPDNSDVDKLFIQLVQTYNQLFEENPINASGVDAKAILSARLSKSRRLENLIAQLPGEKKNGLFGNLIALSLGLTPNFKSNFDLAEDAKLQLSKDTYDDDLDNLLAQIGDQYADLFLAAKNLSDAILLSDILRVNTEITKAPLSASMIKRYDEHHQDLTLLKALVRQQLPEKYKEIFFDQSKNGYAGYIDGGASQEEFYKFIKPILEKMDGTEELLVKLNREDLLRKQRTFDNGSIPHQIHLGELHAILRRQEDFYPFLKDNREKIEKILTFRIPYYVGPLARGNSRFAWMTRKSEETITPWNFEEVVDKGASAQSFIERMTNFDKNLPNEKVLPKHSLLYEYFTVYNELTKVKYVTEGMRKPAFLSGEQKKAIVDLLFKTNRKVTVKQLKEDYFKKIECFDSVEISGVEDRFNASLGTYHDLLKIIKDKDFLDNEENEDILEDIVLTLTLFEDREMIEERLKTYAHLFDDKVMKQLKRRRYTGWGRLSRKLINGIRDKQSGKTILDFLKSDGFANRNFMQLIHDDSLTFKEDIQKAQVSGQGDSLHEHIANLAGSPAIKKGILQTVKVVDELVKVMGRHKPENIVIEMARENQTTQKGQKNSRERMKRIEEGIKELGSQILKEHPVENTQLQNEKLYLYYLQNGRDMYVDQELDINRLSDYDVDHIVPQSFLKDDSIDNKVLTRSDKARGKSDNVPSEEVVKKMKNYWRQLLNAKLITQRKFDNLTKAERGGLSELDKAGFIKRQLVETRQITKHVAQILDSRMNTKYDENDKLIREVKVITLKSKLVSDFRKDFQFYKVREINNYHHAHDAYLNAVVGTALIKKYPKLESEFVYGDYKVYDVRKMIAKSEQEIGKATAKYFFYSNIMNFFKTEITLANGEIRKRPLIETNGETGEIVWDKGRDFATVRKVLSMPQVNIVKKTEVQTGGFSKESILPKRNSDKLIARKKDWDPKKYGGFDSPTVAYSVLVVAKVEKGKSKKLKSVKELLGITIMERSSFEKNPIDFLEAKGYKEVKKDLIIKLPKYSLFELENGRKRMLASAGELQKGNELALPSKYVNFLYLASHYEKLKGSPEDNEQKQLFVEQHKHYLDEIIEQISEFSKRVILADANLDKVLSAYNKHRDKPIREQAENIIHLFTLTNLGAPAAFKYFDTTIDRKRYTSTKEVLDATLIHQSITGLYETRIDLSQLGGDGGGGGGSEAAAKGGGGSGGVLNLEEEYRLHEKPVPSSIDPSWLQLFPTVWAERAGMGLANQVPPVVVELRSGASPVAVRQYPMSKEAREGIRPHIQRFLDLGVLVPCQSPWNTPLLPVKKPGTNDYRPVQDLREINKRVQDIHPTVPNPYNLLSSLPPSHTWYSVLDLKDAFFCLKLHPNSQPLFAFEWRDPEKGNTGQLTWTRLPQGFKNSPTLFNEALHRDLAPFRALNPQVVLLQYVDDLLVAAPTYRDCKEGTQKLLQELSKLGYRVSAKKAQLCQKEVTYLGYLLKEGKRWLTPARKATVMKIPPPTTPRQVREFLGKAGFCRLFIPGFASLAAPLYPLTKPSIPFIWTEEHQKAFDRIKEALLSAPALALPDLTKPFTLYVDERAGVARGVLTQTLGPWRRPVAYLSKKLDPVASGWPTCLKAVAAVALLLKDADKLTLGQNVTVIASHSLESIVRQPPDRWMTNARMTHYQSLLLNERVSFAPPAVLNPATLLPVESEATPVHRCSEILAEETGTRRDLKDQPLPGVPAWYTDGSSFIAEGKRRAGAAIVDGKRTVWASSLPEGTSAQKAELVALTQALRLAEGKDINIYTDSRYAFATAHIHGAIYKQRGWLTSAGKDIKNKEEILALLEAIHLPKRVAIIHCPGHQKGNDPVATGNRRADEAAKQAALSTRVLAETTKPAGKRTADGSEFEKRTADGSEFESPKKKAKVE

SEQ ID NO: 912 - protein, 2094 aa, synthetic construct
  source 1..2094: note = Description of Artificial Sequence: Synthetic polypeptide
MPAAKRVKLDGGDKKYSIGLDIGTNSVGWAVITDEYKVPSKKFKVLGNTDRHSIKKNLIGALLFDSGETAEATRLKRTARRRYTRRKNRICYLQEIFSNEMAKVDDSFFHRLEESFLVEEDKKHERHPIFGNIVDEVAYHEKYPTIYHLRKKLVDSTDKADLRLIYLALAHMIKFRGHFLIEGDLNPDNSDVDKLFIQLVQTYNQLFEENPINASGVDAKAILSARLSKSRRLENLIAQLPGEKKNGLFGNLIALSLGLTPNFKSNFDLAEDAKLQLSKDTYDDDLDNLLAQIGDQYADLFLAAKNLSDAILLSDILRVNTEITKAPLSASMIKRYDEHHQDLTLLKALVRQQLPEKYKEIFFDQSKNGYAGYIDGGASQEEFYKFIKPILEKMDGTEELLVKLNREDLLRKQRTFDNGSIPHQIHLGELHAILRRQEDFYPFLKDNREKIEKILTFRIPYYVGPLARGNSRFAWMTRKSEETITPWNFEEVVDKGASAQSFIERMTNFDKNLPNEKVLPKHSLLYEYFTVYNELTKVKYVTEGMRKPAFLSGEQKKAIVDLLFKTNRKVTVKQLKEDYFKKIECFDSVEISGVEDRFNASLGTYHDLLKIIKDKDFLDNEENEDILEDIVLTLTLFEDREMIEERLKTYAHLFDDKVMKQLKRRRYTGWGRLSRKLINGIRDKQSGKTILDFLKSDGFANRNFMQLIHDDSLTFKEDIQKAQVSGQGDSLHEHIANLAGSPAIKKGILQTVKVVDELVKVMGRHKPENIVIEMARENQTTQKGQKNSRERMKRIEEGIKELGSQILKEHPVENTQLQNEKLYLYYLQNGRDMYVDQELDINRLSDYDVDHIVPQSFLKDDSIDNKVLTRSDKARGKSDNVPSEEVVKKMKNYWRQLLNAKLITQRKFDNLTKAERGGLSELDKAGFIKRQLVETRQITKHVAQILDSRMNTKYDENDKLIREVKVITLKSKLVSDFRKDFQFYKVREINNYHHAHDAYLNAVVGTALIKKYPKLESEFVYGDYKVYDVRKMIAKSEQEIGKATAKYFFYSNIMNFFKTEITLANGEIRKRPLIETNGETGEIVWDKGRDFATVRKVLSMPQVNIVKKTEVQTGGFSKESILPKRNSDKLIARKKDWDPKKYGGFDSPTVAYSVLVVAKVEKGKSKKLKSVKELLGITIMERSSFEKNPIDFLEAKGYKEVKKDLIIKLPKYSLFELENGRKRMLASAGELQKGNELALPSKYVNFLYLASHYEKLKGSPEDNEQKQLFVEQHKHYLDEIIEQISEFSKRVILADANLDKVLSAYNKHRDKPIREQAENIIHLFTLTNLGAPAAFKYFDTTIDRKRYTSTKEVLDATLIHQSITGLYETRIDLSQLGGDGGGGSEAAAKPAPGGVLNLEEEYRLHEKPVPSSIDPSWLQLFPTVWAERAGMGLANQVPPVVVELRSGASPVAVRQYPMSKEAREGIRPHIQRFLDLGVLVPCQSPWNTPLLPVKKPGTNDYRPVQDLREINKRVQDIHPTVPNPYNLLSSLPPSHTWYSVLDLKDAFFCLKLHPNSQPLFAFEWRDPEKGNTGQLTWTRLPQGFKNSPTLFNEALHRDLAPFRALNPQVVLLQYVDDLLVAAPTYRDCKEGTQKLLQELSKLGYRVSAKKAQLCQKEVTYLGYLLKEGKRWLTPARKATVMKIPPPTTPRQVREFLGKAGFCRLFIPGFASLAAPLYPLTKPSIPFIWTEEHQKAFDRIKEALLSAPALALPDLTKPFTLYVDERAGVARGVLTQTLGPWRRPVAYLSKKLDPVASGWPTCLKAVAAVALLLKDADKLTLGQNVTVIASHSLESIVRQPPDRWMTNARMTHYQSLLLNERVSFAPPAVLNPATLLPVESEATPVHRCSEILAEETGTRRDLKDQPLPGVPAWYTDGSSFIAEGKRRAGAAIVDGKRTVWASSLPEGTSAQKAELVALTQALRLAEGKDINIYTDSRYAFATAHIHGAIYKQRGWLTSAGKDIKNKEEILALLEAIHLPKRVAIIHCPGHQKGNDPVATGNRRADEAAKQAALSTRVLAETTKPAGKRTADGSEFEKRTADGSEFESPKKKAKVE

SEQ ID NO: 913 - protein, 2092 aa, synthetic construct
  source 1..2092: note = Description of Artificial Sequence: Synthetic polypeptide
MPAAKRVKLDGGDKKYSIGLDIGTNSVGWAVITDEYKVPSKKFKVLGNTDRHSIKKNLIGALLFDSGETAEATRLKRTARRRYTRRKNRICYLQEIFSNEMAKVDDSFFHRLEESFLVEEDKKHERHPIFGNIVDEVAYHEKYPTIYHLRKKLVDSTDKADLRLIYLALAHMIKFRGHFLIEGDLNPDNSDVDKLFIQLVQTYNQLFEENPINASGVDAKAILSARLSKSRRLENLIAQLPGEKKNGLFGNLIALSLGLTPNFKSNFDLAEDAKLQLSKDTYDDDLDNLLAQIGDQYADLFLAAKNLSDAILLSDILRVNTEITKAPLSASMIKRYDEHHQDLTLLKALVRQQLPEKYKEIFFDQSKNGYAGYIDGGASQEEFYKFIKPILEKMDGTEELLVKLNREDLLRKQRTFDNGSIPHQIHLGELHAILRRQEDFYPFLKDNREKIEKILTFRIPYYVGPLARGNSRFAWMTRKSEETITPWNFEEVVDKGASAQSFIERMTNFDKNLPNEKVLPKHSLLYEYFTVYNELTKVKYVTEGMRKPAFLSGEQKKAIVDLLFKTNRKVTVKQLKEDYFKKIECFDSVEISGVEDRFNASLGTYHDLLKIIKDKDFLDNEENEDILEDIVLTLTLFEDREMIEERLKTYAHLFDDKVMKQLKRRRYTGWGRLSRKLINGIRDKQSGKTILDFLKSDGFANRNFMQLIHDDSLTFKEDIQKAQVSGQGDSLHEHIANLAGSPAIKKGILQTVKVVDELVKVMGRHKPENIVIEMARENQTTQKGQKNSRERMKRIEEGIKELGSQILKEHPVENTQLQNEKLYLYYLQNGRDMYVDQELDINRLSDYDVDHIVPQSFLKDDSIDNKVLTRSDKARGKSDNVPSEEVVKKMKNYWRQLLNAKLITQRKFDNLTKAERGGLSELDKAGFIKRQLVETRQITKHVAQILDSRMNTKYDENDKLIREVKVITLKSKLVSDFRKDFQFYKVREINNYHHAHDAYLNAVVGTALIKKYPKLESEFVYGDYKVYDVRKMIAKSEQEIGKATAKYFFYSNIMNFFKTEITLANGEIRKRPLIETNGETGEIVWDKGRDFATVRKVLSMPQVNIVKKTEVQTGGFSKESILPKRNSDKLIARKKDWDPKKYGGFDSPTVAYSVLVVAKVEKGKSKKLKSVKELLGITIMERSSFEKNPIDFLEAKGYKEVKKDLIIKLPKYSLFELENGRKRMLASAGELQKGNELALPSKYVNFLYLASHYEKLKGSPEDNEQKQLFVEQHKHYLDEIIEQISEFSKRVILADANLDKVLSAYNKHRDKPIREQAENIIHLFTLTNLGAPAAFKYFDTTIDRKRYTSTKEVLDATLIHQSITGLYETRIDLSQLGGDGGGGGPAPGSSGGVLNLEEEYRLHEKPVPSSIDPSWLQLFPTVWAERAGMGLANQVPPVVVELRSGASPVAVRQYPMSKEAREGIRPHIQRFLDLGVLVPCQSPWNTPLLPVKKPGTNDYRPVQDLREINKRVQDIHPTVPNPYNLLSSLPPSHTWYSVLDLKDAFFCLKLHPNSQPLFAFEWRDPEKGNTGQLTWTRLPQGFKNSPTLFNEALHRDLAPFRALNPQVVLLQYVDDLLVAAPTYRDCKEGTQKLLQELSKLGYRVSAKKAQLCQKEVTYLGYLLKEGKRWLTPARKATVMKIPPPTTPRQVREFLGKAGFCRLFIPGFASLAAPLYPLTKPSIPFIWTEEHQKAFDRIKEALLSAPALALPDLTKPFTLYVDERAGVARGVLTQTLGPWRRPVAYLSKKLDPVASGWPTCLKAVAAVALLLKDADKLTLGQNVTVIASHSLESIVRQPPDRWMTNARMTHYQSLLLNERVSFAPPAVLNPATLLPVESEATPVHRCSEILAEETGTRRDLKDQPLPGVPAWYTDGSSFIAEGKRRAGAAIVDGKRTVWASSLPEGTSAQKAELVALTQALRLAEGKDINIYTDSRYAFATAHIHGAIYKQRGWLTSAGKDIKNKEEILALLEAIHLPKRVAIIHCPGHQKGNDPVATGNRRADEAAKQAALSTRVLAETTKPAGKRTADGSEFEKRTADGSEFESPKKKAKVE

SEQ ID NO: 914 - protein, 2089 aa, synthetic construct
  source 1..2089: note = Description of Artificial Sequence: Synthetic polypeptide
MPAAKRVKLDGGDKKYSIGLDIGTNSVGWAVITDEYKVPSKKFKVLGNTDRHSIKKNLIGALLFDSGETAEATRLKRTARRRYTRRKNRICYLQEIFSNEMAKVDDSFFHRLEESFLVEEDKKHERHPIFGNIVDEVAYHEKYPTIYHLRKKLVDSTDKADLRLIYLALAHMIKFRGHFLIEGDLNPDNSDVDKLFIQLVQTYNQLFEENPINASGVDAKAILSARLSKSRRLENLIAQLPGEKKNGLFGNLIALSLGLTPNFKSNFDLAEDAKLQLSKDTYDDDLDNLLAQIGDQYADLFLAAKNLSDAILLSDILRVNTEITKAPLSASMIKRYDEHHQDLTLLKALVRQQLPEKYKEIFFDQSKNGYAGYIDGGASQEEFYKFIKPILEKMDGTEELLVKLNREDLLRKQRTFDNGSIPHQIHLGELHAILRRQEDFYPFLKDNREKIEKILTFRIPYYVGPLARGNSRFAWMTRKSEETITPWNFEEVVDKGASAQSFIERMTNFDKNLPNEKVLPKHSLLYEYFTVYNELTKVKYVTEGMRKPAFLSGEQKKAIVDLLFKTNRKVTVKQLKEDYFKKIECFDSVEISGVEDRFNASLGTYHDLLKIIKDKDFLDNEENEDILEDIVLTLTLFEDREMIEERLKTYAHLFDDKVMKQLKRRRYTGWGRLSRKLINGIRDKQSGKTILDFLKSDGFANRNFMQLIHDDSLTFKEDIQKAQVSGQGDSLHEHIANLAGSPAIKKGILQTVKVVDELVKVMGRHKPENIVIEMARENQTTQKGQKNSRERMKRIEEGIKELGSQILKEHPVENTQLQNEKLYLYYLQNGRDMYVDQELDINRLSDYDVDHIVPQSFLKDDSIDNKVLTRSDKARGKSDNVPSEEVVKKMKNYWRQLLNAKLITQRKFDNLTKAERGGLSELDKAGFIKRQLVETRQITKHVAQILDSRMNTKYDENDKLIREVKVITLKSKLVSDFRKDFQFYKVREINNYHHAHDAYLNAVVGTALIKKYPKLESEFVYGDYKVYDVRKMIAKSEQEIGKATAKYFFYSNIMNFFKTEITLANGEIRKRPLIETNGETGEIVWDKGRDFATVRKVLSMPQVNIVKKTEVQTGGFSKESILPKRNSDKLIARKKDWDPKKYGGFDSPTVAYSVLVVAKVEKGKSKKLKSVKELLGITIMERSSFEKNPIDFLEAKGYKEVKKDLIIKLPKYSLFELENGRKRMLASAGELQKGNELALPSKYVNFLYLASHYEKLKGSPEDNEQKQLFVEQHKHYLDEIIEQISEFSKRVILADANLDKVLSAYNKHRDKPIREQAENIIHLFTLTNLGAPAAFKYFDTTIDRKRYTSTKEVLDATLIHQSITGLYETRIDLSQLGGDGGPAPGGGGGVLNLEEEYRLHEKPVPSSIDPSWLQLFPTVWAERAGMGLANQVPPVVVELRSGASPVAVRQYPMSKEAREGIRPHIQRFLDLGVLVPCQSPWNTPLLPVKKPGTNDYRPVQDLREINKRVQDIHPTVPNPYNLLSSLPPSHTWYSVLDLKDAFFCLKLHPNSQPLFAFEWRDPEKGNTGQLTWTRLPQGFKNSPTLFNEALHRDLAPFRALNPQVVLLQYVDDLLVAAPTYRDCKEGTQKLLQELSKLGYRVSAKKAQLCQKEVTYLGYLLKEGKRWLTPARKATVMKIPPPTTPRQVREFLGKAGFCRLFIPGFASLAAPLYPLTKPSIPFIWTEEHQKAFDRIKEALLSAPALALPDLTKPFTLYVDERAGVARGVLTQTLGPWRRPVAYLSKKLDPVASGWPTCLKAVAAVALLLKDADKLTLGQNVTVIASHSLESIVRQPPDRWMTNARMTHYQSLLLNERVSFAPPAVLNPATLLPVESEATPVHRCSEILAEETGTRRDLKDQPLPGVPAWYTDGSSFIAEGKRRAGAAIVDGKRTVWASSLPEGTSAQKAELVALTQALRLAEGKDINIYTDSRYAFATAHIHGAIYKQRGWLTSAGKDIKNKEEILALLEAIHLPKRVAIIHCPGHQKGNDPVATGNRRADEAAKQAALSTRVLAETTKPAGKRTADGSEFEKRTADGSEFESPKKKAKVE

SEQ ID NO: 915 - protein, 2094 aa, synthetic construct
  source 1..2094: note = Description of Artificial Sequence: Synthetic polypeptide
MPAAKRVKLDGGDKKYSIGLDIGTNSVGWAVITDEYKVPSKKFKVLGNTDRHSIKKNLIGALLFDSGETAEATRLKRTARRRYTRRKNRICYLQEIFSNEMAKVDDSFFHRLEESFLVEEDKKHERHPIFGNIVDEVAYHEKYPTIYHLRKKLVDSTDKADLRLIYLALAHMIKFRGHFLIEGDLNPDNSDVDKLFIQLVQTYNQLFEENPINASGVDAKAILSARLSKSRRLENLIAQLPGEKKNGLFGNLIALSLGLTPNFKSNFDLAEDAKLQLSKDTYDDDLDNLLAQIGDQYADLFLAAKNLSDAILLSDILRVNTEITKAPLSASMIKRYDEHHQDLTLLKALVRQQLPEKYKEIFFDQSKNGYAGYIDGGASQEEFYKFIKPILEKMDGTEELLVKLNREDLLRKQRTFDNGSIPHQIHLGELHAILRRQEDFYPFLKDNREKIEKILTFRIPYYVGPLARGNSRFAWMTRKSEETITPWNFEEVVDKGASAQSFIERMTNFDKNLPNEKVLPKHSLLYEYFTVYNELTKVKYVTEGMRKPAFLSGEQKKAIVDLLFKTNRKVTVKQLKEDYFKKIECFDSVEISGVEDRFNASLGTYHDLLKIIKDKDFLDNEENEDILEDIVLTLTLFEDREMIEERLKTYAHLFDDKVMKQLKRRRYTGWGRLSRKLINGIRDKQSGKTILDFLKSDGFANRNFMQLIHDDSLTFKEDIQKAQVSGQGDSLHEHIANLAGSPAIKKGILQTVKVVDELVKVMGRHKPENIVIEMARENQTTQKGQKNSRERMKRIEEGIKELGSQILKEHPVENTQLQNEKLYLYYLQNGRDMYVDQELDINRLSDYDVDHIVPQSFLKDDSIDNKVLTRSDKARGKSDNVPSEEVVKKMKNYWRQLLNAKLITQRKFDNLTKAERGGLSELDKAGFIKRQLVETRQITKHVAQILDSRMNTKYDENDKLIREVKVITLKSKLVSDFRKDFQFYKVREINNYHHAHDAYLNAVVGTALIKKYPKLESEFVYGDYKVYDVRKMIAKSEQEIGKATAKYFFYSNIMNFFKTEITLANGEIRKRPLIETNGETGEIVWDKGRDFATVRKVLSMPQVNIVKKTEVQTGGFSKESILPKRNSDKLIARKKDWDPKKYGGFDSPTVAYSVLVVAKVEKGKSKKLKSVKELLGITIMERSSFEKNPIDFLEAKGYKEVKKDLIIKLPKYSLFELENGRKRMLASAGELQKGNELALPSKYVNFLYLASHYEKLKGSPEDNEQKQLFVEQHKHYLDEIIEQISEFSKRVILADANLDKVLSAYNKHRDKPIREQAENIIHLFTLTNLGAPAAFKYFDTTIDRKRYTSTKEVLDATLIHQSITGLYETRIDLSQLGGDGGGSSGGSEAAAKGGVLNLEEEYRLHEKPVPSSIDPSWLQLFPTVWAERAGMGLANQVPPVVVELRSGASPVAVRQYPMSKEAREGIRPHIQRFLDLGVLVPCQSPWNTPLLPVKKPGTNDYRPVQDLREINKRVQDIHPTVPNPYNLLSSLPPSHTWYSVLDLKDAFFCLKLHPNSQPLFAFEWRDPEKGNTGQLTWTRLPQGFKNSPTLFNEALHRDLAPFRALNPQVVLLQYVDDLLVAAPTYRDCKEGTQKLLQELSKLGYRVSAKKAQLCQKEVTYLGYLLKEGKRWLTPARKATVMKIPPPTTPRQVREFLGKAGFCRLFIPGFASLAAPLYPLTKPSIPFIWTEEHQKAFDRIKEALLSAPALALPDLTKPFTLYVDERAGVARGVLTQTLGPWRRPVAYLSKKLDPVASGWPTCLKAVAAVALLLKDADKLTLGQNVTVIASHSLESIVRQPPDRWMTNARMTHYQSLLLNERVSFAPPAVLNPATLLPVESEATPVHRCSEILAEETGTRRDLKDQPLPGVPAWYTDGSSFIAEGKRRAGAAIVDGKRTVWASSLPEGTSAQKAELVALTQALRLAEGKDINIYTDSRYAFATAHIHGAIYKQRGWLTSAGKDIKNKEEILALLEAIHLPKRVAIIHCPGHQKGNDPVATGNRRADEAAKQAALSTRVLAETTKPAGKRTADGSEFEKRTADGSEFESPKKKAKVE

SEQ ID NO: 916 - protein, 2092 aa, synthetic construct
  source 1..2092: note = Description of Artificial Sequence: Synthetic polypeptide
MPAAKRVKLDGGDKKYSIGLDIGTNSVGWAVITDEYKVPSKKFKVLGNTDRHSIKKNLIGALLFDSGETAEATRLKRTARRRYTRRKNRICYLQEIFSNEMAKVDDSFFHRLEESFLVEEDKKHERHPIFGNIVDEVAYHEKYPTIYHLRKKLVDSTDKADLRLIYLALAHMIKFRGHFLIEGDLNPDNSDVDKLFIQLVQTYNQLFEENPINASGVDAKAILSARLSKSRRLENLIAQLPGEKKNGLFGNLIALSLGLTPNFKSNFDLAEDAKLQLSKDTYDDDLDNLLAQIGDQYADLFLAAKNLSDAILLSDILRVNTEITKAPLSASMIKRYDEHHQDLTLLKALVRQQLPEKYKEIFFDQSKNGYAGYIDGGASQEEFYKFIKPILEKMDGTEELLVKLNREDLLRKQRTFDNGSIPHQIHLGELHAILRRQEDFYPFLKDNREKIEKILTFRIPYYVGPLARGNSRFAWMTRKSEETITPWNFEEVVDKGASAQSFIERMTNFDKNLPNEKVLPKHSLLYEYFTVYNELTKVKYVTEGMRKPAFLSGEQKKAIVDLLFKTNRKVTVKQLKEDYFKKIECFDSVEISGVEDRFNASLGTYHDLLKIIKDKDFLDNEENEDILEDIVLTLTLFEDREMIEERLKTYAHLFDDKVMKQLKRRRYTGWGRLSRKLINGIRDKQSGKTILDFLKSDGFANRNFMQLIHDDSLTFKEDIQKAQVSGQGDSLHEHIANLAGSPAIKKGILQTVKVVDELVKVMGRHKPENIVIEMARENQTTQKGQKNSRERMKRIEEGIKELGSQILKEHPVENTQLQNEKLYLYYLQNGRDMYVDQELDINRLSDYDVDHIVPQSFLKDDSIDNKVLTRSDKARGKSDNVPSEEVVKKMKNYWRQLLNAKLITQRKFDNLTKAERGGLSELDKAGFIKRQLVETRQITKHVAQILDSRMNTKYDENDKLIREVKVITLKSKLVSDFRKDFQFYKVREINNYHHAHDAYLNAVVGTALIKKYPKLESEFVYGDYKVYDVRKMIAKSEQEIGKATAKYFFYSNIMNFFKTEITLANGEIRKRPLIETNGETGEIVWDKGRDFATVRKVLSMPQVNIVKKTEVQTGGFSKESILPKRNSDKLIARKKDWDPKKYGGFDSPTVAYSVLVVAKVEKGKSKKLKSVKELLGITIMERSSFEKNPIDFLEAKGYKEVKKDLIIKLPKYSLFELENGRKRMLASAGELQKGNELALPSKYVNFLYLASHYEKLKGSPEDNEQKQLFVEQHKHYLDEIIEQISEFSKRVILADANLDKVLSAYNKHRDKPIREQAENIIHLFTLTNLGAPAAFKYFDTTIDRKRYTSTKEVLDATLIHQSITGLYETRIDLSQLGGDGGPAPAPAPAPGGVLNLEEEYRLHEKPVPSSIDPSWLQLFPTVWAERAGMGLANQVPPVVVELRSGASPVAVRQYPMSKEAREGIRPHIQRFLDLGVLVPCQSPWNTPLLPVKKPGTNDYRPVQDLREINKRVQDIHPTVPNPYNLLSSLPPSHTWYSVLDLKDAFFCLKLHPNSQPLFAFEWRDPEKGNTGQLTWTRLPQGFKNSPTLFNEALHRDLAPFRALNPQVVLLQYVDDLLVAAPTYRDCKEGTQKLLQELSKLGYRVSAKKAQLCQKEVTYLGYLLKEGKRWLTPARKATVMKIPPPTTPRQVREFLGKAGFCRLFIPGFASLAAPLYPLTKPSIPFIWTEEHQKAFDRIKEALLSAPALALPDLTKPFTLYVDERAGVARGVLTQTLGPWRRPVAYLSKKLDPVASGWPTCLKAVAAVALLLKDADKLTLGQNVTVIASHSLESIVRQPPDRWMTNARMTHYQSLLLNERVSFAPPAVLNPATLLPVESEATPVHRCSEILAEETGTRRDLKDQPLPGVPAWYTDGSSFIAEGKRRAGAAIVDGKRTVWASSLPEGTSAQKAELVALTQALRLAEGKDINIYTDSRYAFATAHIHGAIYKQRGWLTSAGKDIKNKEEILALLEAIHLPKRVAIIHCPGHQKGNDPVATGNRRADEAAKQAALSTRVLAETTKPAGKRTADGSEFEKRTADGSEFESPKKKAKVE

SEQ ID NO: 917 - protein, 2093 aa, synthetic construct
  source 1..2093: note = Description of Artificial Sequence: Synthetic polypeptide
MPAAKRVKLDGGDKKYSIGLDIGTNSVGWAVITDEYKVPSKKFKVLGNTDRHSIKKNLIGALLFDSGETAEATRLKRTARRRYTRRKNRICYLQEIFSNEMAKVDDSFFHRLEESFLVEEDKKHERHPIFGNIVDEVAYHEKYPTIYHLRKKLVDSTDKADLRLIYLALAHMIKFRGHFLIEGDLNPDNSDVDKLFIQLVQTYNQLFEENPINASGVDAKAILSARLSKSRRLENLIAQLPGEKKNGLFGNLIALSLGLTPNFKSNFDLAEDAKLQLSKDTYDDDLDNLLAQIGDQYADLFLAAKNLSDAILLSDILRVNTEITKAPLSASMIKRYDEHHQDLTLLKALVRQQLPEKYKEIFFDQSKNGYAGYIDGGASQEEFYKFIKPILEKMDGTEELLVKLNREDLLRKQRTFDNGSIPHQIHLGELHAILRRQEDFYPFLKDNREKIEKILTFRIPYYVGPLARGNSRFAWMTRKSEETITPWNFEEVVDKGASAQSFIERMTNFDKNLPNEKVLPKHSLLYEYFTVYNELTKVKYVTEGMRKPAFLSGEQKKAIVDLLFKTNRKVTVKQLKEDYFKKIECFDSVEISGVEDRFNASLGTYHDLLKIIKDKDFLDNEENEDILEDIVLTLTLFEDREMIEERLKTYAHLFDDKVMKQLKRRRYTGWGRLSRKLINGIRDKQSGKTILDFLKSDGFANRNFMQLIHDDSLTFKEDIQKAQVSGQGDSLHEHIANLAGSPAIKKGILQTVKVVDELVKVMGRHKPENIVIEMARENQTTQKGQKNSRERMKRIEEGIKELGSQILKEHPVENTQLQNEKLYLYYLQNGRDMYVDQELDINRLSDYDVDHIVPQSFLKDDSIDNKVLTRSDKARGKSDNVPSEEVVKKMKNYWRQLLNAKLITQRKFDNLTKAERGGLSELDKAGFIKRQLVETRQITKHVAQILDSRMNTKYDENDKLIREVKVITLKSKLVSDFRKDFQFYKVREINNYHHAHDAYLNAVVGTALIKKYPKLESEFVYGDYKVYDVRKMIAKSEQEIGKATAKYFFYSNIMNFFKTEITLANGEIRKRPLIETNGETGEIVWDKGRDFATVRKVLSMPQVNIVKKTEVQTGGFSKESILPKRNSDKLIARKKDWDPKKYGGFDSPTVAYSVLVVAKVEKGKSKKLKSVKELLGITIMERSSFEKNPIDFLEAKGYKEVKKDLIIKLPKYSLFELENGRKRMLASAGELQKGNELALPSKYVNFLYLASHYEKLKGSPEDNEQKQLFVEQHKHYLDEIIEQISEFSKRVILADANLDKVLSAYNKHRDKPIREQAENIIHLFTLTNLGAPAAFKYFDTTIDRKRYTSTKEVLDATLIHQSITGLYETRIDLSQLGGDGGEAAAKEAAAKGGVLNLEEEYRLHEKPVPSSIDPSWLQLFPTVWAERAGMGLANQVPPVVVELRSGASPVAVRQYPMSKEAREGIRPHIQRFLDLGVLVPCQSPWNTPLLPVKKPGTNDYRPVQDLREINKRVQDIHPTVPNPYNLLSSLPPSHTWYSVLDLKDAFFCLKLHPNSQPLFAFEWRDPEKGNTGQLTWTRLPQGFKNSPTLFNEALHRDLAPFRALNPQVVLLQYVDDLLVAAPTYRDCKEGTQKLLQELSKLGYRVSAKKAQLCQKEVTYLGYLLKEGKRWLTPARKATVMKIPPPTTPRQVREFLGKAGFCRLFIPGFASLAAPLYPLTKPSIPFIWTEEHQKAFDRIKEALLSAPALALPDLTKPFTLYVDERAGVARGVLTQTLGPWRRPVAYLSKKLDPVASGWPTCLKAVAAVALLLKDADKLTLGQNVTVIASHSLESIVRQPPDRWMTNARMTHYQSLLLNERVSFAPPAVLNPATLLPVESEATPVHRCSEILAEETGTRRDLKDQPLPGVPAWYTDGSSFIAEGKRRAGAAIVDGKRTVWASSLPEGTSAQKAELVALTQALRLAEGKDINIYTDSRYAFATAHIHGAIYKQRGWLTSAGKDIKNKEEILALLEAIHLPKRVAIIHCPGHQKGNDPVATGNRRADEAAKQAALSTRVLAETTKPAGKRTADGSEFEKRTADGSEFESPKKKAKVE

SEQ ID NO: 918 - protein, 2092 aa, synthetic construct
  source 1..2092: note = Description of Artificial Sequence: Synthetic polypeptide
MPAAKRVKLDGGDKKYSIGLDIGTNSVGWAVITDEYKVPSKKFKVLGNTDRHSIKKNLIGALLFDSGETAEATRLKRTARRRYTRRKNRICYLQEIFSNEMAKVDDSFFHRLEESFLVEEDKKHERHPIFGNIVDEVAYHEKYPTIYHLRKKLVDSTDKADLRLIYLALAHMIKFRGHFLIEGDLNPDNSDVDKLFIQLVQTYNQLFEENPINASGVDAKAILSARLSKSRRLENLIAQLPGEKKNGLFGNLIALSLGLTPNFKSNFDLAEDAKLQLSKDTYDDDLDNLLAQIGDQYADLFLAAKNLSDAILLSDILRVNTEITKAPLSASMIKRYDEHHQDLTLLKALVRQQLPEKYKEIFFDQSKNGYAGYIDGGASQEEFYKFIKPILEKMDGTEELLVKLNREDLLRKQRTFDNGSIPHQIHLGELHAILRRQEDFYPFLKDNREKIEKILTFRIPYYVGPLARGNSRFAWMTRKSEETITPWNFEEVVDKGASAQSFIERMTNFDKNLPNEKVLPKHSLLYEYFTVYNELTKVKYVTEGMRKPAFLSGEQKKAIVDLLFKTNRKVTVKQLKEDYFKKIECFDSVEISGVEDRFNASLGTYHDLLKIIKDKDFLDNEENEDILEDIVLTLTLFEDREMIEERLKTYAHLFDDKVMKQLKRRRYTGWGRLSRKLINGIRDKQSGKTILDFLKSDGFANRNFMQLIHDDSLTFKEDIQKAQVSGQGDSLHEHIANLAGSPAIKKGILQTVKVVDELVKVMGRHKPENIVIEMARENQTTQKGQKNSRERMKRIEEGIKELGSQILKEHPVENTQLQNEKLYLYYLQNGRDMYVDQELDINRLSDYDVDHIVPQSFLKDDSIDNKVLTRSDKARGKSDNVPSEEVVKKMKNYWRQLLNAKLITQRKFDNLTKAERGGLSELDKAGFIKRQLVETRQITKHVAQILDSRMNTKYDENDKLIREVKVITLKSKLVSDFRKDFQFYKVREINNYHHAHDAYLNAVVGTALIKKYPKLESEFVYGDYKVYDVRKMIAKSEQEIGKATAKYFFYSNIMNFFKTEITLANGEIRKRPLIETNGETGEIVWDKGRDFATVRKVLSMPQVNIVKKTEVQTGGFSKESILPKRNSDKLIARKKDWDPKKYGGFDSPTVAYSVLVVAKVEKGKSKKLKSVKELLGITIMERSSFEKNPIDFLEAKGYKEVKKDLIIKLPKYSLFELENGRKRMLASAGELQKGNELALPSKYVNFLYLASHYEKLKGSPEDNEQKQLFVEQHKHYLDEIIEQISEFSKRVILADANLDKVLSAYNKHRDKPIREQAENIIHLFTLTNLGAPAAFKYFDTTIDRKRYTSTKEVLDATLIHQSITGLYETRIDLSQLGGDGGGSSGGGGGSGGVLNLEEEYRLHEKPVPSSIDPSWLQLFPTVWAERAGMGLANQVPPVVVELRSGASPVAVRQYPMSKEAREGIRPHIQRFLDLGVLVPCQSPWNTPLLPVKKPGTNDYRPVQDLREINKRVQDIHPTVPNPYNLLSSLPPSHTWYSVLDLKDAFFCLKLHPNSQPLFAFEWRDPEKGNTGQLTWTRLPQGFKNSPTLFNEALHRDLAPFRALNPQVVLLQYVDDLLVAAPTYRDCKEGTQKLLQELSKLGYRVSAKKAQLCQKEVTYLGYLLKEGKRWLTPARKATVMKIPPPTTPRQVREFLGKAGFCRLFIPGFASLAAPLYPLTKPSIPFIWTEEHQKAFDRIKEALLSAPALALPDLTKPFTLYVDERAGVARGVLTQTLGPWRRPVAYLSKKLDPVASGWPTCLKAVAAVALLLKDADKLTLGQNVTVIASHSLESIVRQPPDRWMTNARMTHYQSLLLNERVSFAPPAVLNPATLLPVESEATPVHRCSEILAEETGTRRDLKDQPLPGVPAWYTDGSSFIAEGKRRAGAAIVDGKRTVWASSLPEGTSAQKAELVALTQALRLAEGKDINIYTDSRYAFATAHIHGAIYKQRGWLTSAGKDIKNKEEILALLEAIHLPKRVAIIHCPGHQKGNDPVATGNRRADEAAKQAALSTRVLAETTKPAGKRTADGSEFEKRTADGSEFESPKKKAKVE

SEQ ID NO: 919 - protein, 2094 aa, synthetic construct
  source 1..2094: note = Description of Artificial Sequence: Synthetic polypeptide
MPAAKRVKLDGGDKKYSIGLDIGTNSVGWAVITDEYKVPSKKFKVLGNTDRHSIKKNLIGALLFDSGETAEATRLKRTARRRYTRRKNRICYLQEIFSNEMAKVDDSFFHRLEESFLVEEDKKHERHPIFGNIVDEVAYHEKYPTIYHLRKKLVDSTDKADLRLIYLALAHMIKFRGHFLIEGDLNPDNSDVDKLFIQLVQTYNQLFEENPINASGVDAKAILSARLSKSRRLENLIAQLPGEKKNGLFGNLIALSLGLTPNFKSNFDLAEDAKLQLSKDTYDDDLDNLLAQIGDQYADLFLAAKNLSDAILLSDILRVNTEITKAPLSASMIKRYDEHHQDLTLLKALVRQQLPEKYKEIFFDQSKNGYAGYIDGGASQEEFYKFIKPILEKMDGTEELLVKLNREDLLRKQRTFDNGSIPHQIHLGELHAILRRQEDFYPFLKDNREKIEKILTFRIPYYVGPLARGNSRFAWMTRKSEETITPWNFEEVVDKGASAQSFIERMTNFDKNLPNEKVLPKHSLLYEYFTVYNELTKVKYVTEGMRKPAFLSGEQKKAIVDLLFKTNRKVTVKQLKEDYFKKIECFDSVEISGVEDRFNASLGTYHDLLKIIKDKDFLDNEENEDILEDIVLTLTLFEDREMIEERLKTYAHLFDDKVMKQLKRRRYTGWGRLSRKLINGIRDKQSGKTILDFLKSDGFANRNFMQLIHDDSLTFKEDIQKAQVSGQGDSLHEHIANLAGSPAIKKGILQTVKVVDELVKVMGRHKPENIVIEMARENQTTQKGQKNSRERMKRIEEGIKELGSQILKEHPVENTQLQNEKLYLYYLQNGRDMYVDQELDINRLSDYDVDHIVPQSFLKDDSIDNKVLTRSDKARGKSDNVPSEEVVKKMKNYWRQLLNAKLITQRKFDNLTKAERGGLSELDKAGFIKRQLVETRQITKHVAQILDSRMNTKYDENDKLIREVKVITLKSKLVSDFRKDFQFYKVREINNYHHAHDAYLNAVVGTALIKKYPKLESEFVYGDYKVYDVRKMIAKSEQEIGKATAKYFFYSNIMNFFKTEITLANGEIRKRPLIETNGETGEIVWDKGRDFATVRKVLSMPQVNIVKKTEVQTGGFSKESILPKRNSDKLIARKKDWDPKKYGGFDSPTVAYSVLVVAKVEKGKSKKLKSVKELLGITIMERSSFEKNPIDFLEAKGYKEVKKDLIIKLPKYSLFELENGRKRMLASAGELQKGNELALPSKYVNFLYLASHYEKLKGSPEDNEQKQLFVEQHKHYLDEIIEQISEFSKRVILADANLDKVLSAYNKHRDKPIREQAENIIHLFTLTNLGAPAAFKYFDTTIDRKRYTSTKEVLDATLIHQSITGLYETRIDLSQLGGDGGEAAAKGSSPAPGGVLNLEEEYRLHEKPVPSSIDPSWLQLFPTVWAERAGMGLANQVPPVVVELRSGASPVAVRQYPMSKEAREGIRPHIQRFLDLGVLVPCQSPWNTPLLPVKKPGTNDYRPVQDLREINKRVQDIHPTVPNPYNLLSSLPPSHTWYSVLDLKDAFFCLKLHPNSQPLFAFEWRDPEKGNTGQLTWTRLPQGFKNSPTLFNEALHRDLAPFRALNPQVVLLQYVDDLLVAAPTYRDCKEGTQKLLQELSKLGYRVSAKKAQLCQKEVTYLGYLLKEGKRWLTPARKATVMKIPPPTTPRQVREFLGKAGFCRLFIPGFASLAAPLYPLTKPSIPFIWTEEHQKAFDRIKEALLSAPALALPDLTKPFTLYVDERAGVARGVLTQTLGPWRRPVAYLSKKLDPVASGWPTCLKAVAAVALLLKDADKLTLGQNVTVIASHSLESIVRQPPDRWMTNARMTHYQSLLLNERVSFAPPAVLNPATLLPVESEATPVHRCSEILAEETGTRRDLKDQPLPGVPAWYTDGSSFIAEGKRRAGAAIVDGKRTVWASSLPEGTSAQKAELVALTQALRLAEGKDINIYTDSRYAFATAHIHGAIYKQRGWLTSAGKDIKNKEEILALLEAIHLPKRVAIIHCPGHQKGNDPVATGNRRADEAAKQAALSTRVLAETTKPAGKRTADGSEFEKRTADGSEFESPKKKAKVE

SEQ ID NO: 920 - protein, 2094 aa, synthetic construct
  source 1..2094: note = Description of Artificial Sequence: Synthetic polypeptide
MPAAKRVKLDGGDKKYSIGLDIGTNSVGWAVITDEYKVPSKKFKVLGNTDRHSIKKNLIGALLFDSGETAEATRLKRTARRRYTRRKNRICYLQEIFSNEMAKVDDSFFHRLEESFLVEEDKKHERHPIFGNIVDEVAYHEKYPTIYHLRKKLVDSTDKADLRLIYLALAHMIKFRGHFLIEGDLNPDNSDVDKLFIQLVQTYNQLFEENPINASGVDAKAILSARLSKSRRLENLIAQLPGEKKNGLFGNLIALSLGLTPNFKSNFDLAEDAKLQLSKDTYDDDLDNLLAQIGDQYADLFLAAKNLSDAILLSDILRVNTEITKAPLSASMIKRYDEHHQDLTLLKALVRQQLPEKYKEIFFDQSKNGYAGYIDGGASQEEFYKFIKPILEKMDGTEELLVKLNREDLLRKQRTFDNGSIPHQIHLGELHAILRRQEDFYPFLKDNREKIEKILTFRIPYYVGPLARGNSRFAWMTRKSEETITPWNFEEVVDKGASAQSFIERMTNFDKNLPNEKVLPKHSLLYEYFTVYNELTKVKYVTEGMRKPAFLSGEQKKAIVDLLFKTNRKVTVKQLKEDYFKKIECFDSVEISGVEDRFNASLGTYHDLLKIIKDKDFLDNEENEDILEDIVLTLTLFEDREMIEERLKTYAHLFDDKVMKQLKRRRYTGWGRLSRKLINGIRDKQSGKTILDFLKSDGFANRNFMQLIHDDSLTFKEDIQKAQVSGQGDSLHEHIANLAGSPAIKKGILQTVKVVDELVKVMGRHKPENIVIEMARENQTTQKGQKNSRERMKRIEEGIKELGSQILKEHPVENTQLQNEKLYLYYLQNGRDMYVDQELDINRLSDYDVDHIVPQSFLKDDSIDNKVLTRSDKARGKSDNVPSEEVVKKMKNYWRQLLNAKLITQRKFDNLTKAERGGLSELDKAGFIKRQLVETRQITKHVAQILDSRMNTKYDENDKLIREVKVITLKSKLVSDFRKDFQFYKVREINNYHHAHDAYLNAVVGTALIKKYPKLESEFVYGDYKVYDVRKMIAKSEQEIGKATAKYFFYSNIMNFFKTEITLANGEIRKRPLIETNGETGEIVWDKGRDFATVRKVLSMPQVNIVKKTEVQTGGFSKESILPKRNSDKLIARKKDWDPKKYGGFDSPTVAYSVLVVAKVEKGKSKKLKSVKELLGITIMERSSFEKNPIDFLEAKGYKEVKKDLIIKLPKYSLFELENGRKRMLASAGELQKGNELALPSKYVNFLYLASHYEKLKGSPEDNEQKQLFVEQHKHYLDEIIEQISEFSKRVILADANLDKVLSAYNKHRDKPIREQAENIIHLFTLTNLGAPAAFKYFDTTIDRKRYTSTKEVLDATLIHQSITGLYETRIDLSQLGGDGGGSSGGGEAAAKGGVLNLEEEYRLHEKPVPSSIDPSWLQLFPTVWAERAGMGLANQVPPVVVELRSGASPVAVRQYPMSKEAREGIRPHIQRFLDLGVLVPCQSPWNTPLLPVKKPGTNDYRPVQDLREINKRVQDIHPTVPNPYNLLSSLPPSHTWYSVLDLKDAFFCLKLHPNSQPLFAFEWRDPEKGNTGQLTWTRLPQGFKNSPTLFNEALHRDLAPFRALNPQVVLLQYVDDLLVAAPTYRDCKEGTQKLLQELSKLGYRVSAKKAQLCQKEVTYLGYLLKEGKRWLTPARKATVMKIPPPTTPRQVREFLGKAGFCRLFIPGFASLAAPLYPLTKPSIPFIWTEEHQKAFDRIKEALLSAPALALPDLTKPFTLYVDERAGVARGVLTQTLGPWRRPVAYLSKKLDPVASGWPTCLKAVAAVALLLKDADKLTLGQNVTVIASHSLESIVRQPPDRWMTNARMTHYQSLLLNERVSFAPPAVLNPATLLPVESEATPVHRCSEILAEETGTRRDLKDQPLPGVPAWYTDGSSFIAEGKRRAGAAIVDGKRTVWASSLPEGTSAQKAELVALTQALRLAEGKDINIYTDSRYAFATAHIHGAIYKQRGWLTSAGKDIKNKEEILALLEAIHLPKRVAIIHCPGHQKGNDPVATGNRRADEAAKQAALSTRVLAETTKPAGKRTADGSEFEKRTADGSEFESPKKKAKVE

SEQ ID NO: 921 - protein, 2094 aa, synthetic construct
  source 1..2094: note = Description of Artificial Sequence: Synthetic polypeptide
MPAAKRVKLDGGDKKYSIGLDIGTNSVGWAVITDEYKVPSKKFKVLGNTDRHSIKKNLIGALLFDSGETAEATRLKRTARRRYTRRKNRICYLQEIFSNEMAKVDDSFFHRLEESFLVEEDKKHERHPIFGNIVDEVAYHEKYPTIYHLRKKLVDSTDKADLRLIYLALAHMIKFRGHFLIEGDLNPDNSDVDKLFIQLVQTYNQLFEENPINASGVDAKAILSARLSKSRRLENLIAQLPGEKKNGLFGNLIALSLGLTPNFKSNFDLAEDAKLQLSKDTYDDDLDNLLAQIGDQYADLFLAAKNLSDAILLSDILRVNTEITKAPLSASMIKRYDEHHQDLTLLKALVRQQLPEKYKEIFFDQSKNGYAGYIDGGASQEEFYKFIKPILEKMDGTEELLVKLNREDLLRKQRTFDNGSIPHQIHLGELHAILRRQEDFYPFLKDNREKIEKILTFRIPYYVGPLARGNSRFAWMTRKSEETITPWNFEEVVDKGASAQSFIERMTNFDKNLPNEKVLPKHSLLYEYFTVYNELTKVKYVTEGMRKPAFLSGEQKKAIVDLLFKTNRKVTVKQLKEDYFKKIECFDSVEISGVEDRFNASLGTYHDLLKIIKDKDFLDNEENEDILEDIVLTLTLFEDREMIEERLKTYAHLFDDKVMKQLKRRRYTGWGRLSRKLINGIRDKQSGKTILDFLKSDGFANRNFMQLIHDDSLTFKEDIQKAQVSGQGDSLHEHIANLAGSPAIKKGILQTVKVVDELVKVMGRHKPENIVIEMARENQTTQKGQKNSRERMKRIEEGIKELGSQILKEHPVENTQLQNEKLYLYYLQNGRDMYVDQELDINRLSDYDVDHIVPQSFLKDDSIDNKVLTRSDKARGKSDNVPSEEVVKKMKNYWRQLLNAKLITQRKFDNLTKAERGGLSELDKAGFIKRQLVETRQITKHVAQILDSRMNTKYDENDKLIREVKVITLKSKLVSDFRKDFQFYKVREINNYHHAHDAYLNAVVGTALIKKYPKLESEFVYGDYKVYDVRKMIAKSEQEIGKATAKYFFYSNIMNFFKTEITLANGEIRKRPLIETNGETGEIVWDKGRDFATVRKVLSMPQVNIVKKTEVQTGGFSKESILPKRNSDKLIARKKDWDPKKYGGFDSPTVAYSVLVVAKVEKGKSKKLKSVKELLGITIMERSSFEKNPIDFLEAKGYKEVKKDLIIKLPKYSLFELENGRKRMLASAGELQKGNELALPSKYVNFLYLASHYEKLKGSPEDNEQKQLFVEQHKHYLDEIIEQISEFSKRVILADANLDKVLSAYNKHRDKPIREQAENIIHLFTLTNLGAPAAFKYFDTTIDRKRYTSTKEVLDATLIHQSITGLYETRIDLSQLGGDGGEAAAKPAPGGSGGVLNLEEEYRLHEKPVPSSIDPSWLQLFPTVWAERAGMGLANQVPPVVVELRSGASPVAVRQYPMSKEAREGIRPHIQRFLDLGVLVPCQSPWNTPLLPVKKPGTNDYRPVQDLREINKRVQDIHPTVPNPYNLLSSLPPSHTWYSVLDLKDAFFCLKLHPNSQPLFAFEWRDPEKGNTGQLTWTRLPQGFKNSPTLFNEALHRDLAPFRALNPQVVLLQYVDDLLVAAPTYRDCKEGTQKLLQELSKLGYRVSAKKAQLCQKEVTYLGYLLKEGKRWLTPARKATVMKIPPPTTPRQVREFLGKAGFCRLFIPGFASLAAPLYPLTKPSIPFIWTEEHQKAFDRIKEALLSAPALALPDLTKPFTLYVDERAGVARGVLTQTLGPWRRPVAYLSKKLDPVASGWPTCLKAVAAVALLLKDADKLTLGQNVTVIASHSLESIVRQPPDRWMTNARMTHYQSLLLNERVSFAPPAVLNPATLLPVESEATPVHRCSEILAEETGTRRDLKDQPLPGVPAWYTDGSSFIAEGKRRAGAAIVDGKRTVWASSLPEGTSAQKAELVALTQALRLAEGKDINIYTDSRYAFATAHIHGAIYKQRGWLTSAGKDIKNKEEILALLEAIHLPKRVAIIHCPGHQKGNDPVATGNRRADEAAKQAALSTRVLAETTKPAGKRTADGSEFEKRTADGSEFESPKKKAKVE

SEQ ID NO: 922 - protein, 2092 aa, synthetic construct
  source 1..2092: note = Description of Artificial Sequence: Synthetic polypeptide
MPAAKRVKLDGGDKKYSIGLDIGTNSVGWAVITDEYKVPSKKFKVLGNTDRHSIKKNLIGALLFDSGETAEATRLKRTARRRYTRRKNRICYLQEIFSNEMAKVDDSFFHRLEESFLVEEDKKHERHPIFGNIVDEVAYHEKYPTIYHLRKKLVDSTDKADLRLIYLALAHMIKFRGHFLIEGDLNPDNSDVDKLFIQLVQTYNQLFEENPINASGVDAKAILSARLSKSRRLENLIAQLPGEKKNGLFGNLIALSLGLTPNFKSNFDLAEDAKLQLSKDTYDDDLDNLLAQIGDQYADLFLAAKNLSDAILLSDILRVNTEITKAPLSASMIKRYDEHHQDLTLLKALVRQQLPEKYKEIFFDQSKNGYAGYIDGGASQEEFYKFIKPILEKMDGTEELLVKLNREDLLRKQRTFDNGSIPHQIHLGELHAILRRQEDFYPFLKDNREKIEKILTFRIPYYVGPLARGNSRFAWMTRKSEETITPWNFEEVVDKGASAQSFIERMTNFDKNLPNEKVLPKHSLLYEYFTVYNELTKVKYVTEGMRKPAFLSGEQKKAIVDLLFKTNRKVTVKQLKEDYFKKIECFDSVEISGVEDRFNASLGTYHDLLKIIKDKDFLDNEENEDILEDIVLTLTLFEDREMIEERLKTYAHLFDDKVMKQLKRRRYTGWGRLSRKLINGIRDKQSGKTILDFLKSDGFANRNFMQLIHDDSLTFKEDIQKAQVSGQGDSLHEHIANLAGSPAIKKGILQTVKVVDELVKVMGRHKPENIVIEMARENQTTQKGQKNSRERMKRIEEGIKELGSQILKEHPVENTQLQNEKLYLYYLQNGRDMYVDQELDINRLSDYDVDHIVPQSFLKDDSIDNKVLTRSDKARGKSDNVPSEEVVKKMKNYWRQLLNAKLITQRKFDNLTKAERGGLSELDKAGFIKRQLVETRQITKHVAQILDSRMNTKYDENDKLIREVKVITLKSKLVSDFRKDFQFYKVREINNYHHAHDAYLNAVVGTALIKKYPKLESEFVYGDYKVYDVRKMIAKSEQEIGKATAKYFFYSNIMNFFKTEITLANGEIRKRPLIETNGETGEIVWDKGRDFATVRKVLSMPQVNIVKKTEVQTGGFSKESILPKRNSDKLIARKKDWDPKKYGGFDSPTVAYSVLVVAKVEKGKSKKLKSVKELLGITIMERSSFEKNPIDFLEAKGYKEVKKDLIIKLPKYSLFELENGRKRMLASAGELQKGNELALPSKYVNFLYLASHYEKLKGSPEDNEQKQLFVEQHKHYLDEIIEQISEFSKRVILADANLDKVLSAYNKHRDKPIREQAENIIHLFTLTNLGAPAAFKYFDTTIDRKRYTSTKEVLDATLIHQSITGLYETRIDLSQLGGDGGGSSPAPGGGGGVLNLEEEYRLHEKPVPSSIDPSWLQLFPTVWAERAGMGLANQVPPVVVELRSGASPVAVRQYPMSKEAREGIRPHIQRFLDLGVLVPCQSPWNTPLLPVKKPGTNDYRPVQDLREINKRVQDIHPTVPNPYNLLSSLPPSHTWYSVLDLKDAFFCLKLHPNSQPLFAFEWRDPEKGNTGQLTWTRLPQGFKNSPTLFNEALHRDLAPFRALNPQVVLLQYVDDLLVAAPTYRDCKEGTQKLLQELSKLGYRVSAKKAQLCQKEVTYLGYLLKEGKRWLTPARKATVMKIPPPTTPRQVREFLGKAGFCRLFIPGFASLAAPLYPLTKPSIPFIWTEEHQKAFDRIKEALLSAPALALPDLTKPFTLYVDERAGVARGVLTQTLGPWRRPVAYLSKKLDPVASGWPTCLKAVAAVALLLKDADKLTLGQNVTVIASHSLESIVRQPPDRWMTNARMTHYQSLLLNERVSFAPPAVLNPATLLPVESEATPVHRCSEILAEETGTRRDLKDQPLPGVPAWYTDGSSFIAEGKRRAGAAIVDGKRTVWASSLPEGTSAQKAELVALTQALRLAEGKDINIYTDSRYAFATAHIHGAIYKQRGWLTSAGKDIKNKEEILALLEAIHLPKRVAIIHCPGHQKGNDPVATGNRRADEAAKQAALSTRVLAETTKPAGKRTADGSEFEKRTADGSEFESPKKKAKVE

SEQ ID NO: 923 - protein, 2101 aa, synthetic construct
  source 1..2101: note = Description of Artificial Sequence: Synthetic polypeptide
MPAAKRVKLDGGDKKYSIGLDIGTNSVGWAVITDEYKVPSKKFKVLGNTDRHSIKKNLIGALLFDSGETAEATRLKRTARRRYTRRKNRICYLQEIFSNEMAKVDDSFFHRLEESFLVEEDKKHERHPIFGNIVDEVAYHEKYPTIYHLRKKLVDSTDKADLRLIYLALAHMIKFRGHFLIEGDLNPDNSDVDKLFIQLVQTYNQLFEENPINASGVDAKAILSARLSKSRRLENLIAQLPGEKKNGLFGNLIALSLGLTPNFKSNFDLAEDAKLQLSKDTYDDDLDNLLAQIGDQYADLFLAAKNLSDAILLSDILRVNTEITKAPLSASMIKRYDEHHQDLTLLKALVRQQLPEKYKEIFFDQSKNGYAGYIDGGASQEEFYKFIKPILEKMDGTEELLVKLNREDLLRKQRTFDNGSIPHQIHLGELHAILRRQEDFYPFLKDNREKIEKILTFRIPYYVGPLARGNSRFAWMTRKSEETITPWNFEEVVDKGASAQSFIERMTNFDKNLPNEKVLPKHSLLYEYFTVYNELTKVKYVTEGMRKPAFLSGEQKKAIVDLLFKTNRKVTVKQLKEDYFKKIECFDSVEISGVEDRFNASLGTYHDLLKIIKDKDFLDNEENEDILEDIVLTLTLFEDREMIEERLKTYAHLFDDKVMKQLKRRRYTGWGRLSRKLINGIRDKQSGKTILDFLKSDGFANRNFMQLIHDDSLTFKEDIQKAQVSGQGDSLHEHIANLAGSPAIKKGILQTVKVVDELVKVMGRHKPENIVIEMARENQTTQKGQKNSRERMKRIEEGIKELGSQILKEHPVENTQLQNEKLYLYYLQNGRDMYVDQELDINRLSDYDVDHIVPQSFLKDDSIDNKVLTRSDKARGKSDNVPSEEVVKKMKNYWRQLLNAKLITQRKFDNLTKAERGGLSELDKAGFIKRQLVETRQITKHVAQILDSRMNTKYDENDKLIREVKVITLKSKLVSDFRKDFQFYKVREINNYHHAHDAYLNAVVGTALIKKYPKLESEFVYGDYKVYDVRKMIAKSEQEIGKATAKYFFYSNIMNFFKTEITLANGEIRKRPLIETNGETGEIVWDKGRDFATVRKVLSMPQVNIVKKTEVQTGGFSKESILPKRNSDKLIARKKDWDPKKYGGFDSPTVAYSVLVVAKVEKGKSKKLKSVKELLGITIMERSSFEKNPIDFLEAKGYKEVKKDLIIKLPKYSLFELENGRKRMLASAGELQKGNELALPSKYVNFLYLASHYEKLKGSPEDNEQKQLFVEQHKHYLDEIIEQISEFSKRVILADANLDKVLSAYNKHRDKPIREQAENIIHLFTLTNLGAPAAFKYFDTTIDRKRYTSTKEVLDATLIHQSITGLYETRIDLSQLGGDGGGSSGSSGSSGSSGSSGSSGGVLNLEEEYRLHEKPVPSSIDPSWLQLFPTVWAERAGMGLANQVPPVVVELRSGASPVAVRQYPMSKEAREGIRPHIQRFLDLGVLVPCQSPWNTPLLPVKKPGTNDYRPVQDLREINKRVQDIHPTVPNPYNLLSSLPPSHTWYSVLDLKDAFFCLKLHPNSQPLFAFEWRDPEKGNTGQLTWTRLPQGFKNSPTLFNEALHRDLAPFRALNPQVVLLQYVDDLLVAAPTYRDCKEGTQKLLQELSKLGYRVSAKKAQLCQKEVTYLGYLLKEGKRWLTPARKATVMKIPPPTTPRQVREFLGKAGFCRLFIPGFASLAAPLYPLTKPSIPFIWTEEHQKAFDRIKEALLSAPALALPDLTKPFTLYVDERAGVARGVLTQTLGPWRRPVAYLSKKLDPVASGWPTCLKAVAAVALLLKDADKLTLGQNVTVIASHSLESIVRQPPDRWMTNARMTHYQSLLLNERVSFAPPAVLNPATLLPVESEATPVHRCSEILAEETGTRRDLKDQPLPGVPAWYTDGSSFIAEGKRRAGAAIVDGKRTVWASSLPEGTSAQKAELVALTQALRLAEGKDINIYTDSRYAFATAHIHGAIYKQRGWLTSAGKDIKNKEEILALLEAIHLPKRVAIIHCPGHQKGNDPVATGNRRADEAAKQAALSTRVLAETTKPAGKRTADGSEFEKRTADGSEFESPKKKAKVE

SEQ ID NO: 924 - protein, 2092 aa, synthetic construct
  source 1..2092: note = Description of Artificial Sequence: Synthetic polypeptide
MPAAKRVKLDGGDKKYSIGLDIGTNSVGWAVITDEYKVPSKKFKVLGNTDRHSIKKNLIGALLFDSGETAEATRLKRTARRRYTRRKNRICYLQEIFSNEMAKVDDSFFHRLEESFLVEEDKKHERHPIFGNIVDEVAYHEKYPTIYHLRKKLVDSTDKADLRLIYLALAHMIKFRGHFLIEGDLNPDNSDVDKLFIQLVQTYNQLFEENPINASGVDAKAILSARLSKSRRLENLIAQLPGEKKNGLFGNLIALSLGLTPNFKSNFDLAEDAKLQLSKDTYDDDLDNLLAQIGDQYADLFLAAKNLSDAILLSDILRVNTEITKAPLSASMIKRYDEHHQDLTLLKALVRQQLPEKYKEIFFDQSKNGYAGYIDGGASQEEFYKFIKPILEKMDGTEELLVKLNREDLLRKQRTFDNGSIPHQIHLGELHAILRRQEDFYPFLKDNREKIEKILTFRIPYYVGPLARGNSRFAWMTRKSEETITPWNFEEVVDKGASAQSFIERMTNFDKNLPNEKVLPKHSLLYEYFTVYNELTKVKYVTEGMRKPAFLSGEQKKAIVDLLFKTNRKVTVKQLKEDYFKKIECFDSVEISGVEDRFNASLGTYHDLLKIIKDKDFLDNEENEDILEDIVLTLTLFEDREMIEERLKTYAHLFDDKVMKQLKRRRYTGWGRLSRKLINGIRDKQSGKTILDFLKSDGFANRNFMQLIHDDSLTFKEDIQKAQVSGQGDSLHEHIANLAGSPAIKKGILQTVKVVDELVKVMGRHKPENIVIEMARENQTTQKGQKNSRERMKRIEEGIKELGSQILKEHPVENTQLQNEKLYLYYLQNGRDMYVDQELDINRLSDYDVDHIVPQSFLKDDSIDNKVLTRSDKARGKSDNVPSEEVVKKMKNYWRQLLNAKLITQRKFDNLTKAERGGLSELDKAGFIKRQLVETRQITKHVAQILDSRMNTKYDENDKLIREVKVITLKSKLVSDFRKDFQFYKVREINNYHHAHDAYLNAVVGTALIKKYPKLESEFVYGDYKVYDVRKMIAKSEQEIGKATAKYFFYSNIMNFFKTEITLANGEIRKRPLIETNGETGEIVWDKGRDFATVRKVLSMPQVNIVKKTEVQTGGFSKESILPKRNSDKLIARKKDWDPKKYGGFDSPTVAYSVLVVAKVEKGKSKKLKSVKELLGITIMERSSFEKNPIDFLEAKGYKEVKKDLIIKLPKYSLFELENGRKRMLASAGELQKGNELALPSKYVNFLYLASHYEKLKGSPEDNEQKQLFVEQHKHYLDEIIEQISEFSKRVILADANLDKVLSAYNKHRDKPIREQAENIIHLFTLTNLGAPAAFKYFDTTIDRKRYTSTKEVLDATLIHQSITGLYETRIDLSQLGGDGGGGSGSSPAPGGVLNLEEEYRLHEKPVPSSIDPSWLQLFPTVWAERAGMGLANQVPPVVVELRSGASPVAVRQYPMSKEAREGIRPHIQRFLDLGVLVPCQSPWNTPLLPVKKPGTNDYRPVQDLREINKRVQDIHPTVPNPYNLLSSLPPSHTWYSVLDLKDAFFCLKLHPNSQPLFAFEWRDPEKGNTGQLTWTRLPQGFKNSPTLFNEALHRDLAPFRALNPQVVLLQYVDDLLVAAPTYRDCKEGTQKLLQELSKLGYRVSAKKAQLCQKEVTYLGYLLKEGKRWLTPARKATVMKIPPPTTPRQVREFLGKAGFCRLFIPGFASLAAPLYPLTKPSIPFIWTEEHQKAFDRIKEALLSAPALALPDLTKPFTLYVDERAGVARGVLTQTLGPWRRPVAYLSKKLDPVASGWPTCLKAVAAVALLLKDADKLTLGQNVTVIASHSLESIVRQPPDRWMTNARMTHYQSLLLNERVSFAPPAVLNPATLLPVESEATPVHRCSEILAEETGTRRDLKDQPLPGVPAWYTDGSSFIAEGKRRAGAAIVDGKRTVWASSLPEGTSAQKAELVALTQALRLAEGKDINIYTDSRYAFATAHIHGAIYKQRGWLTSAGKDIKNKEEILALLEAIHLPKRVAIIHCPGHQKGNDPVATGNRRADEAAKQAALSTRVLAETTKPAGKRTADGSEFEKRTADGSEFESPKKKAKVE

SEQ ID NO: 925 - protein, 2094 aa, synthetic construct
  source 1..2094: note = Description of Artificial Sequence: Synthetic polypeptide
MPAAKRVKLDGGDKKYSIGLDIGTNSVGWAVITDEYKVPSKKFKVLGNTDRHSIKKNLIGALLFDSGETAEATRLKRTARRRYTRRKNRICYLQEIFSNEMAKVDDSFFHRLEESFLVEEDKKHERHPIFGNIVDEVAYHEKYPTIYHLRKKLVDSTDKADLRLIYLALAHMIKFRGHFLIEGDLNPDNSDVDKLFIQLVQTYNQLFEENPINASGVDAKAILSARLSKSRRLENLIAQLPGEKKNGLFGNLIALSLGLTPNFKSNFDLAEDAKLQLSKDTYDDDLDNLLAQIGDQYADLFLAAKNLSDAILLSDILRVNTEITKAPLSASMIKRYDEHHQDLTLLKALVRQQLPEKYKEIFFDQSKNGYAGYIDGGASQEEFYKFIKPILEKMDGTEELLVKLNREDLLRKQRTFDNGSIPHQIHLGELHAILRRQEDFYPFLKDNREKIEKILTFRIPYYVGPLARGNSRFAWMTRKSEETITPWNFEEVVDKGASAQSFIERMTNFDKNLPNEKVLPKHSLLYEYFTVYNELTKVKYVTEGMRKPAFLSGEQKKAIVDLLFKTNRKVTVKQLKEDYFKKIECFDSVEISGVEDRFNASLGTYHDLLKIIKDKDFLDNEENEDILEDIVLTLTLFEDREMIEERLKTYAHLFDDKVMKQLKRRRYTGWGRLSRKLINGIRDKQSGKTILDFLKSDGFANRNFMQLIHDDSLTFKEDIQKAQVSGQGDSLHEHIANLAGSPAIKKGILQTVKVVDELVKVMGRHKPENIVIEMARENQTTQKGQKNSRERMKRIEEGIKELGSQILKEHPVENTQLQNEKLYLYYLQNGRDMYVDQELDINRLSDYDVDHIVPQSFLKDDSIDNKVLTRSDKARGKSDNVPSEEVVKKMKNYWRQLLNAKLITQRKFDNLTKAERGGLSELDKAGFIKRQLVETRQITKHVAQILDSRMNTKYDENDKLIREVKVITLKSKLVSDFRKDFQFYKVREINNYHHAHDAYLNAVVGTALIKKYPKLESEFVYGDYKVYDVRKMIAKSEQEIGKATAKYFFYSNIMNFFKTEITLANGEIRKRPLIETNGETGEIVWDKGRDFATVRKVLSMPQVNIVKKTEVQTGGFSKESILPKRNSDKLIARKKDWDPKKYGGFDSPTVAYSVLVVAKVEKGKSKKLKSVKELLGITIMERSSFEKNPIDFLEAKGYKEVKKDLIIKLPKYSLFELENGRKRMLASAGELQKGNELALPSKYVNFLYLASHYEKLKGSPEDNEQKQLFVEQHKHYLDEIIEQISEFSKRVILADANLDKVLSAYNKHRDKPIREQAENIIHLFTLTNLGAPAAFKYFDTTIDRKRYTSTKEVLDATLIHQSITGLYETRIDLSQLGGDGGGGGEAAAKGSSGGVLNLEEEYRLHEKPVPSSIDPSWLQLFPTVWAERAGMGLANQVPPVVVELRSGASPVAVRQYPMSKEAREGIRPHIQRFLDLGVLVPCQSPWNTPLLPVKKPGTNDYRPVQDLREINKRVQDIHPTVPNPYNLLSSLPPSHTWYSVLDLKDAFFCLKLHPNSQPLFAFEWRDPEKGNTGQLTWTRLPQGFKNSPTLFNEALHRDLAPFRALNPQVVLLQYVDDLLVAAPTYRDCKEGTQKLLQELSKLGYRVSAKKAQLCQKEVTYLGYLLKEGKRWLTPARKATVMKIPPPTTPRQVREFLGKAGFCRLFIPGFASLAAPLYPLTKPSIPFIWTEEHQKAFDRIKEALLSAPALALPDLTKPFTLYVDERAGVARGVLTQTLGPWRRPVAYLSKKLDPVASGWPTCLKAVAAVALLLKDADKLTLGQNVTVIASHSLESIVRQPPDRWMTNARMTHYQSLLLNERVSFAPPAVLNPATLLPVESEATPVHRCSEILAEETGTRRDLKDQPLPGVPAWYTDGSSFIAEGKRRAGAAIVDGKRTVWASSLPEGTSAQKAELVALTQALRLAEGKDINIYTDSRYAFATAHIHGAIYKQRGWLTSAGKDIKNKEEILALLEAIHLPKRVAIIHCPGHQKGNDPVATGNRRADEAAKQAALSTRVLAETTKPAGKRTADGSEFEKRTADGSEFESPKKKAKVE

SEQ ID NO: 926 - protein, 2087 aa, synthetic construct
  source 1..2087: note = Description of Artificial Sequence: Synthetic polypeptide
MPAAKRVKLDGGDKKYSIGLDIGTNSVGWAVITDEYKVPSKKFKVLGNTDRHSIKKNLIGALLFDSGETAEATRLKRTARRRYTRRKNRICYLQEIFSNEMAKVDDSFFHRLEESFLVEEDKKHERHPIFGNIVDEVAYHEKYPTIYHLRKKLVDSTDKADLRLIYLALAHMIKFRGHFLIEGDLNPDNSDVDKLFIQLVQTYNQLFEENPINASGVDAKAILSARLSKSRRLENLIAQLPGEKKNGLFGNLIALSLGLTPNFKSNFDLAEDAKLQLSKDTYDDDLDNLLAQIGDQYADLFLAAKNLSDAILLSDILRVNTEITKAPLSASMIKRYDEHHQDLTLLKALVRQQLPEKYKEIFFDQSKNGYAGYIDGGASQEEFYKFIKPILEKMDGTEELLVKLNREDLLRKQRTFDNGSIPHQIHLGELHAILRRQEDFYPFLKDNREKIEKILTFRIPYYVGPLARGNSRFAWMTRKSEETITPWNFEEVVDKGASAQSFIERMTNFDKNLPNEKVLPKHSLLYEYFTVYNELTKVKYVTEGMRKPAFLSGEQKKAIVDLLFKTNRKVTVKQLKEDYFKKIECFDSVEISGVEDRFNASLGTYHDLLKIIKDKDFLDNEENEDILEDIVLTLTLFEDREMIEERLKTYAHLFDDKVMKQLKRRRYTGWGRLSRKLINGIRDKQSGKTILDFLKSDGFANRNFMQLIHDDSLTFKEDIQKAQVSGQGDSLHEHIANLAGSPAIKKGILQTVKVVDELVKVMGRHKPENIVIEMARENQTTQKGQKNSRERMKRIEEGIKELGSQILKEHPVENTQLQNEKLYLYYLQNGRDMYVDQELDINRLSDYDVDHIVPQSFLKDDSIDNKVLTRSDKARGKSDNVPSEEVVKKMKNYWRQLLNAKLITQRKFDNLTKAERGGLSELDKAGFIKRQLVETRQITKHVAQILDSRMNTKYDENDKLIREVKVITLKSKLVSDFRKDFQFYKVREINNYHHAHDAYLNAVVGTALIKKYPKLESEFVYGDYKVYDVRKMIAKSEQEIGKATAKYFFYSNIMNFFKTEITLANGEIRKRPLIETNGETGEIVWDKGRDFATVRKVLSMPQVNIVKKTEVQTGGFSKESILPKRNSDKLIARKKDWDPKKYGGFDSPTVAYSVLVVAKVEKGKSKKLKSVKELLGITIMERSSFEKNPIDFLEAKGYKEVKKDLIIKLPKYSLFELENGRKRMLASAGELQKGNELALPSKYVNFLYLASHYEKLKGSPEDNEQKQLFVEQHKHYLDEIIEQISEFSKRVILADANLDKVLSAYNKHRDKPIREQAENIIHLFTLTNLGAPAAFKYFDTTIDRKRYTSTKEVLDATLIHQSITGLYETRIDLSQLGGDGGGGGGGGVLNLEEEYRLHEKPVPSSIDPSWLQLFPTVWAERAGMGLANQVPPVVVELRSGASPVAVRQYPMSKEAREGIRPHIQRFLDLGVLVPCQSPWNTPLLPVKKPGTNDYRPVQDLREINKRVQDIHPTVPNPYNLLSSLPPSHTWYSVLDLKDAFFCLKLHPNSQPLFAFEWRDPEKGNTGQLTWTRLPQGFKNSPTLFNEALHRDLAPFRALNPQVVLLQYVDDLLVAAPTYRDCKEGTQKLLQELSKLGYRVSAKKAQLCQKEVTYLGYLLKEGKRWLTPARKATVMKIPPPTTPRQVREFLGKAGFCRLFIPGFASLAAPLYPLTKPSIPFIWTEEHQKAFDRIKEALLSAPALALPDLTKPFTLYVDERAGVARGVLTQTLGPWRRPVAYLSKKLDPVASGWPTCLKAVAAVALLLKDADKLTLGQNVTVIASHSLESIVRQPPDRWMTNARMTHYQSLLLNERVSFAPPAVLNPATLLPVESEATPVHRCSEILAEETGTRRDLKDQPLPGVPAWYTDGSSFIAEGKRRAGAAIVDGKRTVWASSLPEGTSAQKAELVALTQALRLAEGKDINIYTDSRYAFATAHIHGAIYKQRGWLTSAGKDIKNKEEILALLEAIHLPKRVAIIHCPGHQKGNDPVATGNRRADEAAKQAALSTRVLAETTKPAGKRTADGSEFEKRTADGSEFESPKKKAKVE

SEQ ID NO: 927 - protein, 2092 aa, synthetic construct
  source 1..2092: note = Description of Artificial Sequence: Synthetic polypeptide
MPAAKRVKLDGGDKKYSIGLDIGTNSVGWAVITDEYKVPSKKFKVLGNTDRHSIKKNLIGALLFDSGETAEATRLKRTARRRYTRRKNRICYLQEIFSNEMAKVDDSFFHRLEESFLVEEDKKHERHPIFGNIVDEVAYHEKYPTIYHLRKKLVDSTDKADLRLIYLALAHMIKFRGHFLIEGDLNPDNSDVDKLFIQLVQTYNQLFEENPINASGVDAKAILSARLSKSRRLENLIAQLPGEKKNGLFGNLIALSLGLTPNFKSNFDLAEDAKLQLSKDTYDDDLDNLLAQIGDQYADLFLAAKNLSDAILLSDILRVNTEITKAPLSASMIKRYDEHHQDLTLLKALVRQQLPEKYKEIFFDQSKNGYAGYIDGGASQEEFYKFIKPILEKMDGTEELLVKLNREDLLRKQRTFDNGSIPHQIHLGELHAILRRQEDFYPFLKDNREKIEKILTFRIPYYVGPLARGNSRFAWMTRKSEETITPWNFEEVVDKGASAQSFIERMTNFDKNLPNEKVLPKHSLLYEYFTVYNELTKVKYVTEGMRKPAFLSGEQKKAIVDLLFKTNRKVTVKQLKEDYFKKIECFDSVEISGVEDRFNASLGTYHDLLKIIKDKDFLDNEENEDILEDIVLTLTLFEDREMIEERLKTYAHLFDDKVMKQLKRRRYTGWGRLSRKLINGIRDKQSGKTILDFLKSDGFANRNFMQLIHDDSLTFKEDIQKAQVSGQGDSLHEHIANLAGSPAIKKGILQTVKVVDELVKVMGRHKPENIVIEMARENQTTQKGQKNSRERMKRIEEGIKELGSQILKEHPVENTQLQNEKLYLYYLQNGRDMYVDQELDINRLSDYDVDHIVPQSFLKDDSIDNKVLTRSDKARGKSDNVPSEEVVKKMKNYWRQLLNAKLITQRKFDNLTKAERGGLSELDKAGFIKRQLVETRQITKHVAQILDSRMNTKYDENDKLIREVKVITLKSKLVSDFRKDFQFYKVREINNYHHAHDAYLNAVVGTALIKKYPKLESEFVYGDYKVYDVRKMIAKSEQEIGKATAKYFFYSNIMNFFKTEITLANGEIRKRPLIETNGETGEIVWDKGRDFATVRKVLSMPQVNIVKKTEVQTGGFSKESILPKRNSDKLIARKKDWDPKKYGGFDSPTVAYSVLVVAKVEKGKSKKLKSVKELLGITIMERSSFEKNPIDFLEAKGYKEVKKDLIIKLPKYSLFELENGRKRMLASAGELQKGNELALPSKYVNFLYLASHYEKLKGSPEDNEQKQLFVEQHKHYLDEIIEQISEFSKRVILADANLDKVLSAYNKHRDKPIREQAENIIHLFTLTNLGAPAAFKYFDTTIDRKRYTSTKEVLDATLIHQSITGLYETRIDLSQLGGDGGPAPGSSGGGGGVLNLEEEYRLHEKPVPSSIDPSWLQLFPTVWAERAGMGLANQVPPVVVELRSGASPVAVRQYPMSKEAREGIRPHIQRFLDLGVLVPCQSPWNTPLLPVKKPGTNDYRPVQDLREINKRVQDIHPTVPNPYNLLSSLPPSHTWYSVLDLKDAFFCLKLHPNSQPLFAFEWRDPEKGNTGQLTWTRLPQGFKNSPTLFNEALHRDLAPFRALNPQVVLLQYVDDLLVAAPTYRDCKEGTQKLLQELSKLGYRVSAKKAQLCQKEVTYLGYLLKEGKRWLTPARKATVMKIPPPTTPRQVREFLGKAGFCRLFIPGFASLAAPLYPLTKPSIPFIWTEEHQKAFDRIKEALLSAPALALPDLTKPFTLYVDERAGVARGVLTQTLGPWRRPVAYLSKKLDPVASGWPTCLKAVAAVALLLKDADKLTLGQNVTVIASHSLESIVRQPPDRWMTNARMTHYQSLLLNERVSFAPPAVLNPATLLPVESEATPVHRCSEILAEETGTRRDLKDQPLPGVPAWYTDGSSFIAEGKRRAGAAIVDGKRTVWASSLPEGTSAQKAELVALTQALRLAEGKDINIYTDSRYAFATAHIHGAIYKQRGWLTSAGKDIKNKEEILALLEAIHLPKRVAIIHCPGHQKGNDPVATGNRRADEAAKQAALSTRVLAETTKPAGKRTADGSEFEKRTADGSEFESPKKKAKVE

SEQ ID NO: 928 - protein, 2094 aa, synthetic construct
  source 1..2094: note = Description of Artificial Sequence: Synthetic polypeptide
MPAAKRVKLDGGDKKYSIGLDIGTNSVGWAVITDEYKVPSKKFKVLGNTDRHSIKKNLIGALLFDSGETAEATRLKRTARRRYTRRKNRICYLQEIFSNEMAKVDDSFFHRLEESFLVEEDKKHERHPIFGNIVDEVAYHEKYPTIYHLRKKLVDSTDKADLRLIYLALAHMIKFRGHFLIEGDLNPDNSDVDKLFIQLVQTYNQLFEENPINASGVDAKAILSARLSKSRRLENLIAQLPGEKKNGLFGNLIALSLGLTPNFKSNFDLAEDAKLQLSKDTYDDDLDNLLAQIGDQYADLFLAAKNLSDAILLSDILRVNTEITKAPLSASMIKRYDEHHQDLTLLKALVRQQLPEKYKEIFFDQSKNGYAGYIDGGASQEEFYKFIKPILEKMDGTEELLVKLNREDLLRKQRTFDNGSIPHQIHLGELHAILRRQEDFYPFLKDNREKIEKILTFRIPYYVGPLARGNSRFAWMTRKSEETITPWNFEEVVDKGASAQSFIERMTNFDKNLPNEKVLPKHSLLYEYFTVYNELTKVKYVTEGMRKPAFLSGEQKKAIVDLLFKTNRKVTVKQLKEDYFKKIECFDSVEISGVEDRFNASLGTYHDLLKIIKDKDFLDNEENEDILEDIVLTLTLFEDREMIEERLKTYAHLFDDKVMKQLKRRRYTGWGRLSRKLINGIRDKQSGKTILDFLKSDGFANRNFMQLIHDDSLTFKEDIQKAQVSGQGDSLHEHIANLAGSPAIKKGILQTVKVVDELVKVMGRHKPENIVIEMARENQTTQKGQKNSRERMKRIEEGIKELGSQILKEHPVENTQLQNEKLYLYYLQNGRDMYVDQELDINRLSDYDVDHIVPQSFLKDDSIDNKVLTRSDKARGKSDNVPSEEVVKKMKNYWRQLLNAKLITQRKFDNLTKAERGGLSELDKAGFIKRQLVETRQITKHVAQILDSRMNTKYDENDKLIREVKVITLKSKLVSDFRKDFQFYKVREINNYHHAHDAYLNAVVGTALIKKYPKLESEFVYGDYKVYDVRKMIAKSEQEIGKATAKYFFYSNIMNFFKTEITLANGEIRKRPLIETNGETGEIVWDKGRDFATVRKVLSMPQVNIVKKTEVQTGGFSKESILPKRNSDKLIARKKDWDPKKYGGFDSPTVAYSVLVVAKVEKGKSKKLKSVKELLGITIMERSSFEKNPIDFLEAKGYKEVKKDLIIKLPKYSLFELENGRKRMLASAGELQKGNELALPSKYVNFLYLASHYEKLKGSPEDNEQKQLFVEQHKHYLDEIIEQISEFSKRVILADANLDKVLSAYNKHRDKPIREQAENIIHLFTLTNLGAPAAFKYFDTTIDRKRYTSTKEVLDATLIHQSITGLYETRIDLSQLGGDGGGGGEAAAKPAPGGVLNLEEEYRLHEKPVPSSIDPSWLQLFPTVWAERAGMGLANQVPPVVVELRSGASPVAVRQYPMSKEAREGIRPHIQRFLDLGVLVPCQSPWNTPLLPVKKPGTNDYRPVQDLREINKRVQDIHPTVPNPYNLLSSLPPSHTWYSVLDLKDAFFCLKLHPNSQPLFAFEWRDPEKGNTGQLTWTRLPQGFKNSPTLFNEALHRDLAPFRALNPQVVLLQYVDDLLVAAPTYRDCKEGTQKLLQELSKLGYRVSAKKAQLCQKEVTYLGYLLKEGKRWLTPARKATVMKIPPPTTPRQVREFLGKAGFCRLFIPGFASLAAPLYPLTKPSIPFIWTEEHQKAFDRIKEALLSAPALALPDLTKPFTLYVDERAGVARGVLTQTLGPWRRPVAYLSKKLDPVASGWPTCLKAVAAVALLLKDADKLTLGQNVTVIASHSLESIVRQPPDRWMTNARMTHYQSLLLNERVSFAPPAVLNPATLLPVESEATPVHRCSEILAEETGTRRDLKDQPLPGVPAWYTDGSSFIAEGKRRAGAAIVDGKRTVWASSLPEGTSAQKAELVALTQALRLAEGKDINIYTDSRYAFATAHIHGAIYKQRGWLTSAGKDIKNKEEILALLEAIHLPKRVAIIHCPGHQKGNDPVATGNRRADEAAKQAALSTRVLAETTKPAGKRTADGSEFEKRTADGSEFESPKKKAKVE

SEQ ID NO: 929 - protein, 2092 aa, synthetic construct
  source 1..2092: note = Description of Artificial Sequence: Synthetic polypeptide
MPAAKRVKLDGGDKKYSIGLDIGTNSVGWAVITDEYKVPSKKFKVLGNTDRHSIKKNLIGALLFDSGETAEATRLKRTARRRYTRRKNRICYLQEIFSNEMAKVDDSFFHRLEESFLVEEDKKHERHPIFGNIVDEVAYHEKYPTIYHLRKKLVDSTDKADLRLIYLALAHMIKFRGHFLIEGDLNPDNSDVDKLFIQLVQTYNQLFEENPINASGVDAKAILSARLSKSRRLENLIAQLPGEKKNGLFGNLIALSLGLTPNFKSNFDLAEDAKLQLSKDTYDDDLDNLLAQIGDQYADLFLAAKNLSDAILLSDILRVNTEITKAPLSASMIKRYDEHHQDLTLLKALVRQQLPEKYKEIFFDQSKNGYAGYIDGGASQEEFYKFIKPILEKMDGTEELLVKLNREDLLRKQRTFDNGSIPHQIHLGELHAILRRQEDFYPFLKDNREKIEKILTFRIPYYVGPLARGNSRFAWMTRKSEETITPWNFEEVVDKGASAQSFIERMTNFDKNLPNEKVLPKHSLLYEYFTVYNELTKVKYVTEGMRKPAFLSGEQKKAIVDLLFKTNRKVTVKQLKEDYFKKIECFDSVEISGVEDRFNASLGTYHDLLKIIKDKDFLDNEENEDILEDIVLTLTLFEDREMIEERLKTYAHLFDDKVMKQLKRRRYTGWGRLSRKLINGIRDKQSGKTILDFLKSDGFANRNFMQLIHDDSLTFKEDIQKAQVSGQGDSLHEHIANLAGSPAIKKGILQTVKVVDELVKVMGRHKPENIVIEMARENQTTQKGQKNSRERMKRIEEGIKELGSQILKEHPVENTQLQNEKLYLYYLQNGRDMYVDQELDINRLSDYDVDHIVPQSFLKDDSIDNKVLTRSDKARGKSDNVPSEEVVKKMKNYWRQLLNAKLITQRKFDNLTKAERGGLSELDKAGFIKRQLVETRQITKHVAQILDSRMNTKYDENDKLIREVKVITLKSKLVSDFRKDFQFYKVREINNYHHAHDAYLNAVVGTALIKKYPKLESEFVYGDYKVYDVRKMIAKSEQEIGKATAKYFFYSNIMNFFKTEITLANGEIRKRPLIETNGETGEIVWDKGRDFATVRKVLSMPQVNIVKKTEVQTGGFSKESILPKRNSDKLIARKKDWDPKKYGGFDSPTVAYSVLVVAKVEKGKSKKLKSVKELLGITIMERSSFEKNPIDFLEAKGYKEVKKDLIIKLPKYSLFELENGRKRMLASAGELQKGNELALPSKYVNFLYLASHYEKLKGSPEDNEQKQLFVEQHKHYLDEIIEQISEFSKRVILADANLDKVLSAYNKHRDKPIREQAENIIHLFTLTNLGAPAAFKYFDTTIDRKRYTSTKEVLDATLIHQSITGLYETRIDLSQLGGDGGGSSGSSGSSGGVLNLEEEYRLHEKPVPSSIDPSWLQLFPTVWAERAGMGLANQVPPVVVELRSGASPVAVRQYPMSKEAREGIRPHIQRFLDLGVLVPCQSPWNTPLLPVKKPGTNDYRPVQDLREINKRVQDIHPTVPNPYNLLSSLPPSHTWYSVLDLKDAFFCLKLHPNSQPLFAFEWRDPEKGNTGQLTWTRLPQGFKNSPTLFNEALHRDLAPFRALNPQVVLLQYVDDLLVAAPTYRDCKEGTQKLLQELSKLGYRVSAKKAQLCQKEVTYLGYLLKEGKRWLTPARKATVMKIPPPTTPRQVREFLGKAGFCRLFIPGFASLAAPLYPLTKPSIPFIWTEEHQKAFDRIKEALLSAPALALPDLTKPFTLYVDERAGVARGVLTQTLGPWRRPVAYLSKKLDPVASGWPTCLKAVAAVALLLKDADKLTLGQNVTVIASHSLESIVRQPPDRWMTNARMTHYQSLLLNERVSFAPPAVLNPATLLPVESEATPVHRCSEILAEETGTRRDLKDQPLPGVPAWYTDGSSFIAEGKRRAGAAIVDGKRTVWASSLPEGTSAQKAELVALTQALRLAEGKDINIYTDSRYAFATAHIHGAIYKQRGWLTSAGKDIKNKEEILALLEAIHLPKRVAIIHCPGHQKGNDPVATGNRRADEAAKQAALSTRVLAETTKPAGKRTADGSEFEKRTADGSEFESPKKKAKVE

SEQ ID NO: 930 - protein, 2092 aa, synthetic construct
  source 1..2092: note = Description of Artificial Sequence: Synthetic polypeptide
MPAAKRVKLDGGDKKYSIGLDIGTNSVGWAVITDEYKVPSKKFKVLGNTDRHSIKKNLIGALLFDSGETAEATRLKRTARRRYTRRKNRICYLQEIFSNEMAKVDDSFFHRLEESFLVEEDKKHERHPIFGNIVDEVAYHEKYPTIYHLRKKLVDSTDKADLRLIYLALAHMIKFRGHFLIEGDLNPDNSDVDKLFIQLVQTYNQLFEENPINASGVDAKAILSARLSKSRRLENLIAQLPGEKKNGLFGNLIALSLGLTPNFKSNFDLAEDAKLQLSKDTYDDDLDNLLAQIGDQYADLFLAAKNLSDAILLSDILRVNTEITKAPLSASMIKRYDEHHQDLTLLKALVRQQLPEKYKEIFFDQSKNGYAGYIDGGASQEEFYKFIKPILEKMDGTEELLVKLNREDLLRKQRTFDNGSIPHQIHLGELHAILRRQEDFYPFLKDNREKIEKILTFRIPYYVGPLARGNSRFAWMTRKSEETITPWNFEEVVDKGASAQSFIERMTNFDKNLPNEKVLPKHSLLYEYFTVYNELTKVKYVTEGMRKPAFLSGEQKKAIVDLLFKTNRKVTVKQLKEDYFKKIECFDSVEISGVEDRFNASLGTYHDLLKIIKDKDFLDNEENEDILEDIVLTLTLFEDREMIEERLKTYAHLFDDKVMKQLKRRRYTGWGRLSRKLINGIRDKQSGKTILDFLKSDGFANRNFMQLIHDDSLTFKEDIQKAQVSGQGDSLHEHIANLAGSPAIKKGILQTVKVVDELVKVMGRHKPENIVIEMARENQTTQKGQKNSRERMKRIEEGIKELGSQILKEHPVENTQLQNEKLYLYYLQNGRDMYVDQELDINRLSDYDVDHIVPQSFLKDDSIDNKVLTRSDKARGKSDNVPSEEVVKKMKNYWRQLLNAKLITQRKFDNLTKAERGGLSELDKAGFIKRQLVETRQITKHVAQILDSRMNTKYDENDKLIREVKVITLKSKLVSDFRKDFQFYKVREINNYHHAHDAYLNAVVGTALIKKYPKLESEFVYGDYKVYDVRKMIAKSEQEIGKATAKYFFYSNIMNFFKTEITLANGEIRKRPLIETNGETGEIVWDKGRDFATVRKVLSMPQVNIVKKTEVQTGGFSKESILPKRNSDKLIARKKDWDPKKYGGFDSPTVAYSVLVVAKVEKGKSKKLKSVKELLGITIMERSSFEKNPIDFLEAKGYKEVKKDLIIKLPKYSLFELENGRKRMLASAGELQKGNELALPSKYVNFLYLASHYEKLKGSPEDNEQKQLFVEQHKHYLDEIIEQISEFSKRVILADANLDKVLSAYNKHRDKPIREQAENIIHLFTLTNLGAPAAFKYFDTTIDRKRYTSTKEVLDATLIHQSITGLYETRIDLSQLGGDGGGGSPAPGGGGGVLNLEEEYRLHEKPVPSSIDPSWLQLFPTVWAERAGMGLANQVPPVVVELRSGASPVAVRQYPMSKEAREGIRPHIQRFLDLGVLVPCQSPWNTPLLPVKKPGTNDYRPVQDLREINKRVQDIHPTVPNPYNLLSSLPPSHTWYSVLDLKDAFFCLKLHPNSQPLFAFEWRDPEKGNTGQLTWTRLPQGFKNSPTLFNEALHRDLAPFRALNPQVVLLQYVDDLLVAAPTYRDCKEGTQKLLQELSKLGYRVSAKKAQLCQKEVTYLGYLLKEGKRWLTPARKATVMKIPPPTTPRQVREFLGKAGFCRLFIPGFASLAAPLYPLTKPSIPFIWTEEHQKAFDRIKEALLSAPALALPDLTKPFTLYVDERAGVARGVLTQTLGPWRRPVAYLSKKLDPVASGWPTCLKAVAAVALLLKDADKLTLGQNVTVIASHSLESIVRQPPDRWMTNARMTHYQSLLLNERVSFAPPAVLNPATLLPVESEATPVHRCSEILAEETGTRRDLKDQPLPGVPAWYTDGSSFIAEGKRRAGAAIVDGKRTVWASSLPEGTSAQKAELVALTQALRLAEGKDINIYTDSRYAFATAHIHGAIYKQRGWLTSAGKDIKNKEEILALLEAIHLPKRVAIIHCPGHQKGNDPVATGNRRADEAAKQAALSTRVLAETTKPAGKRTADGSEFEKRTADGSEFESPKKKAKVE

SEQ ID NO: 931 - protein, 2091 aa, synthetic construct
  source 1..2091: note = Description of Artificial Sequence: Synthetic polypeptide
MPAAKRVKLDGGDKKYSIGLDIGTNSVGWAVITDEYKVPSKKFKVLGNTDRHSIKKNLIGALLFDSGETAEATRLKRTARRRYTRRKNRICYLQEIFSNEMAKVDDSFFHRLEESFLVEEDKKHERHPIFGNIVDEVAYHEKYPTIYHLRKKLVDSTDKADLRLIYLALAHMIKFRGHFLIEGDLNPDNSDVDKLFIQLVQTYNQLFEENPINASGVDAKAILSARLSKSRRLENLIAQLPGEKKNGLFGNLIALSLGLTPNFKSNFDLAEDAKLQLSKDTYDDDLDNLLAQIGDQYADLFLAAKNLSDAILLSDILRVNTEITKAPLSASMIKRYDEHHQDLTLLKALVRQQLPEKYKEIFFDQSKNGYAGYIDGGASQEEFYKFIKPILEKMDGTEELLVKLNREDLLRKQRTFDNGSIPHQIHLGELHAILRRQEDFYPFLKDNREKIEKILTFRIPYYVGPLARGNSRFAWMTRKSEETITPWNFEEVVDKGASAQSFIERMTNFDKNLPNEKVLPKHSLLYEYFTVYNELTKVKYVTEGMRKPAFLSGEQKKAIVDLLFKTNRKVTVKQLKEDYFKKIECFDSVEISGVEDRFNASLGTYHDLLKIIKDKDFLDNEENEDILEDIVLTLTLFEDREMIEERLKTYAHLFDDKVMKQLKRRRYTGWGRLSRKLINGIRDKQSGKTILDFLKSDGFANRNFMQLIHDDSLTFKEDIQKAQVSGQGDSLHEHIANLAGSPAIKKGILQTVKVVDELVKVMGRHKPENIVIEMARENQTTQKGQKNSRERMKRIEEGIKELGSQILKEHPVENTQLQNEKLYLYYLQNGRDMYVDQELDINRLSDYDVDHIVPQSFLKDDSIDNKVLTRSDKARGKSDNVPSEEVVKKMKNYWRQLLNAKLITQRKFDNLTKAERGGLSELDKAGFIKRQLVETRQITKHVAQILDSRMNTKYDENDKLIREVKVITLKSKLVSDFRKDFQFYKVREINNYHHAHDAYLNAVVGTALIKKYPKLESEFVYGDYKVYDVRKMIAKSEQEIGKATAKYFFYSNIMNFFKTEITLANGEIRKRPLIETNGETGEIVWDKGRDFATVRKVLSMPQVNIVKKTEVQTGGFSKESILPKRNSDKLIARKKDWDPKKYGGFDSPTVAYSVLVVAKVEKGKSKKLKSVKELLGITIMERSSFEKNPIDFLEAKGYKEVKKDLIIKLPKYSLFELENGRKRMLASAGELQKGNELALPSKYVNFLYLASHYEKLKGSPEDNEQKQLFVEQHKHYLDEIIEQISEFSKRVILADANLDKVLSAYNKHRDKPIREQAENIIHLFTLTNLGAPAAFKYFDTTIDRKRYTSTKEVLDATLIHQSITGLYETRIDLSQLGGDGGEAAAKGGGGGVLNLEEEYRLHEKPVPSSIDPSWLQLFPTVWAERAGMGLANQVPPVVVELRSGASPVAVRQYPMSKEAREGIRPHIQRFLDLGVLVPCQSPWNTPLLPVKKPGTNDYRPVQDLREINKRVQDIHPTVPNPYNLLSSLPPSHTWYSVLDLKDAFFCLKLHPNSQPLFAFEWRDPEKGNTGQLTWTRLPQGFKNSPTLFNEALHRDLAPFRALNPQVVLLQYVDDLLVAAPTYRDCKEGTQKLLQELSKLGYRVSAKKAQLCQKEVTYLGYLLKEGKRWLTPARKATVMKIPPPTTPRQVREFLGKAGFCRLFIPGFASLAAPLYPLTKPSIPFIWTEEHQKAFDRIKEALLSAPALALPDLTKPFTLYVDERAGVARGVLTQTLGPWRRPVAYLSKKLDPVASGWPTCLKAVAAVALLLKDADKLTLGQNVTVIASHSLESIVRQPPDRWMTNARMTHYQSLLLNERVSFAPPAVLNPATLLPVESEATPVHRCSEILAEETGTRRDLKDQPLPGVPAWYTDGSSFIAEGKRRAGAAIVDGKRTVWASSLPEGTSAQKAELVALTQALRLAEGKDINIYTDSRYAFATAHIHGAIYKQRGWLTSAGKDIKNKEEILALLEAIHLPKRVAIIHCPGHQKGNDPVATGNRRADEAAKQAALSTRVLAETTKPAGKRTADGSEFEKRTADGSEFESPKKKAKVE

SEQ ID NO: 932 - protein, 2089 aa, synthetic construct
  source 1..2089: note = Description of Artificial Sequence: Synthetic polypeptide
MPAAKRVKLDGGDKKYSIGLDIGTNSVGWAVITDEYKVPSKKFKVLGNTDRHSIKKNLIGALLFDSGETAEATRLKRTARRRYTRRKNRICYLQEIFSNEMAKVDDSFFHRLEESFLVEEDKKHERHPIFGNIVDEVAYHEKYPTIYHLRKKLVDSTDKADLRLIYLALAHMIKFRGHFLIEGDLNPDNSDVDKLFIQLVQTYNQLFEENPINASGVDAKAILSARLSKSRRLENLIAQLPGEKKNGLFGNLIALSLGLTPNFKSNFDLAEDAKLQLSKDTYDDDLDNLLAQIGDQYADLFLAAKNLSDAILLSDILRVNTEITKAPLSASMIKRYDEHHQDLTLLKALVRQQLPEKYKEIFFDQSKNGYAGYIDGGASQEEFYKFIKPILEKMDGTEELLVKLNREDLLRKQRTFDNGSIPHQIHLGELHAILRRQEDFYPFLKDNREKIEKILTFRIPYYVGPLARGNSRFAWMTRKSEETITPWNFEEVVDKGASAQSFIERMTNFDKNLPNEKVLPKHSLLYEYFTVYNELTKVKYVTEGMRKPAFLSGEQKKAIVDLLFKTNRKVTVKQLKEDYFKKIECFDSVEISGVEDRFNASLGTYHDLLKIIKDKDFLDNEENEDILEDIVLTLTLFEDREMIEERLKTYAHLFDDKVMKQLKRRRYTGWGRLSRKLINGIRDKQSGKTILDFLKSDGFANRNFMQLIHDDSLTFKEDIQKAQVSGQGDSLHEHIANLAGSPAIKKGILQTVKVVDELVKVMGRHKPENIVIEMARENQTTQKGQKNSRERMKRIEEGIKELGSQILKEHPVENTQLQNEKLYLYYLQNGRDMYVDQELDINRLSDYDVDHIVPQSFLKDDSIDNKVLTRSDKARGKSDNVPSEEVVKKMKNYWRQLLNAKLITQRKFDNLTKAERGGLSELDKAGFIKRQLVETRQITKHVAQILDSRMNTKYDENDKLIREVKVITLKSKLVSDFRKDFQFYKVREINNYHHAHDAYLNAVVGTALIKKYPKLESEFVYGDYKVYDVRKMIAKSEQEIGKATAKYFFYSNIMNFFKTEITLANGEIRKRPLIETNGETGEIVWDKGRDFATVRKVLSMPQVNIVKKTEVQTGGFSKESILPKRNSDKLIARKKDWDPKKYGGFDSPTVAYSVLVVAKVEKGKSKKLKSVKELLGITIMERSSFEKNPIDFLEAKGYKEVKKDLIIKLPKYSLFELENGRKRMLASAGELQKGNELALPSKYVNFLYLASHYEKLKGSPEDNEQKQLFVEQHKHYLDEIIEQISEFSKRVILADANLDKVLSAYNKHRDKPIREQAENIIHLFTLTNLGAPAAFKYFDTTIDRKRYTSTKEVLDATLIHQSITGLYETRIDLSQLGGDGGGSSGSSGGVLNLEEEYRLHEKPVPSSIDPSWLQLFPTVWAERAGMGLANQVPPVVVELRSGASPVAVRQYPMSKEAREGIRPHIQRFLDLGVLVPCQSPWNTPLLPVKKPGTNDYRPVQDLREINKRVQDIHPTVPNPYNLLSSLPPSHTWYSVLDLKDAFFCLKLHPNSQPLFAFEWRDPEKGNTGQLTWTRLPQGFKNSPTLFNEALHRDLAPFRALNPQVVLLQYVDDLLVAAPTYRDCKEGTQKLLQELSKLGYRVSAKKAQLCQKEVTYLGYLLKEGKRWLTPARKATVMKIPPPTTPRQVREFLGKAGFCRLFIPGFASLAAPLYPLTKPSIPFIWTEEHQKAFDRIKEALLSAPALALPDLTKPFTLYVDERAGVARGVLTQTLGPWRRPVAYLSKKLDPVASGWPTCLKAVAAVALLLKDADKLTLGQNVTVIASHSLESIVRQPPDRWMTNARMTHYQSLLLNERVSFAPPAVLNPATLLPVESEATPVHRCSEILAEETGTRRDLKDQPLPGVPAWYTDGSSFIAEGKRRAGAAIVDGKRTVWASSLPEGTSAQKAELVALTQALRLAEGKDINIYTDSRYAFATAHIHGAIYKQRGWLTSAGKDIKNKEEILALLEAIHLPKRVAIIHCPGHQKGNDPVATGNRRADEAAKQAALSTRVLAETTKPAGKRTADGSEFEKRTADGSEFESPKKKAKVE

SEQ ID NO: 933 - protein, 2098 aa, synthetic construct
  source 1..2098: note = Description of Artificial Sequence: Synthetic polypeptide
MPAAKRVKLDGGDKKYSIGLDIGTNSVGWAVITDEYKVPSKKFKVLGNTDRHSIKKNLIGALLFDSGETAEATRLKRTARRRYTRRKNRICYLQEIFSNEMAKVDDSFFHRLEESFLVEEDKKHERHPIFGNIVDEVAYHEKYPTIYHLRKKLVDSTDKADLRLIYLALAHMIKFRGHFLIEGDLNPDNSDVDKLFIQLVQTYNQLFEENPINASGVDAKAILSARLSKSRRLENLIAQLPGEKKNGLFGNLIALSLGLTPNFKSNFDLAEDAKLQLSKDTYDDDLDNLLAQIGDQYADLFLAAKNLSDAILLSDILRVNTEITKAPLSASMIKRYDEHHQDLTLLKALVRQQLPEKYKEIFFDQSKNGYAGYIDGGASQEEFYKFIKPILEKMDGTEELLVKLNREDLLRKQRTFDNGSIPHQIHLGELHAILRRQEDFYPFLKDNREKIEKILTFRIPYYVGPLARGNSRFAWMTRKSEETITPWNFEEVVDKGASAQSFIERMTNFDKNLPNEKVLPKHSLLYEYFTVYNELTKVKYVTEGMRKPAFLSGEQKKAIVDLLFKTNRKVTVKQLKEDYFKKIECFDSVEISGVEDRFNASLGTYHDLLKIIKDKDFLDNEENEDILEDIVLTLTLFEDREMIEERLKTYAHLFDDKVMKQLKRRRYTGWGRLSRKLINGIRDKQSGKTILDFLKSDGFANRNFMQLIHDDSLTFKEDIQKAQVSGQGDSLHEHIANLAGSPAIKKGILQTVKVVDELVKVMGRHKPENIVIEMARENQTTQKGQKNSRERMKRIEEGIKELGSQILKEHPVENTQLQNEKLYLYYLQNGRDMYVDQELDINRLSDYDVDHIVPQSFLKDDSIDNKVLTRSDKARGKSDNVPSEEVVKKMKNYWRQLLNAKLITQRKFDNLTKAERGGLSELDKAGFIKRQLVETRQITKHVAQILDSRMNTKYDENDKLIREVKVITLKSKLVSDFRKDFQFYKVREINNYHHAHDAYLNAVVGTALIKKYPKLESEFVYGDYKVYDVRKMIAKSEQEIGKATAKYFFYSNIMNFFKTEITLANGEIRKRPLIETNGETGEIVWDKGRDFATVRKVLSMPQVNIVKKTEVQTGGFSKESILPKRNSDKLIARKKDWDPKKYGGFDSPTVAYSVLVVAKVEKGKSKKLKSVKELLGITIMERSSFEKNPIDFLEAKGYKEVKKDLIIKLPKYSLFELENGRKRMLASAGELQKGNELALPSKYVNFLYLASHYEKLKGSPEDNEQKQLFVEQHKHYLDEIIEQISEFSKRVILADANLDKVLSAYNKHRDKPIREQAENIIHLFTLTNLGAPAAFKYFDTTIDRKRYTSTKEVLDATLIHQSITGLYETRIDLSQLGGDGGEAAAKEAAAKEAAAKGGVLNLEEEYRLHEKPVPSSIDPSWLQLFPTVWAERAGMGLANQVPPVVVELRSGASPVAVRQYPMSKEAREGIRPHIQRFLDLGVLVPCQSPWNTPLLPVKKPGTNDYRPVQDLREINKRVQDIHPTVPNPYNLLSSLPPSHTWYSVLDLKDAFFCLKLHPNSQPLFAFEWRDPEKGNTGQLTWTRLPQGFKNSPTLFNEALHRDLAPFRALNPQVVLLQYVDDLLVAAPTYRDCKEGTQKLLQELSKLGYRVSAKKAQLCQKEVTYLGYLLKEGKRWLTPARKATVMKIPPPTTPRQVREFLGKAGFCRLFIPGFASLAAPLYPLTKPSIPFIWTEEHQKAFDRIKEALLSAPALALPDLTKPFTLYVDERAGVARGVLTQTLGPWRRPVAYLSKKLDPVASGWPTCLKAVAAVALLLKDADKLTLGQNVTVIASHSLESIVRQPPDRWMTNARMTHYQSLLLNERVSFAPPAVLNPATLLPVESEATPVHRCSEILAEETGTRRDLKDQPLPGVPAWYTDGSSFIAEGKRRAGAAIVDGKRTVWASSLPEGTSAQKAELVALTQALRLAEGKDINIYTDSRYAFATAHIHGAIYKQRGWLTSAGKDIKNKEEILALLEAIHLPKRVAIIHCPGHQKGNDPVATGNRRADEAAKQAALSTRVLAETTKPAGKRTADGSEFEKRTADGSEFESPKKKAKVE

SEQ ID NO: 934 - protein, 2091 aa, synthetic construct
  source 1..2091: note = Description of Artificial Sequence: Synthetic polypeptide
MPAAKRVKLDGGDKKYSIGLDIGTNSVGWAVITDEYKVPSKKFKVLGNTDRHSIKKNLIGALLFDSGETAEATRLKRTARRRYTRRKNRICYLQEIFSNEMAKVDDSFFHRLEESFLVEEDKKHERHPIFGNIVDEVAYHEKYPTIYHLRKKLVDSTDKADLRLIYLALAHMIKFRGHFLIEGDLNPDNSDVDKLFIQLVQTYNQLFEENPINASGVDAKAILSARLSKSRRLENLIAQLPGEKKNGLFGNLIALSLGLTPNFKSNFDLAEDAKLQLSKDTYDDDLDNLLAQIGDQYADLFLAAKNLSDAILLSDILRVNTEITKAPLSASMIKRYDEHHQDLTLLKALVRQQLPEKYKEIFFDQSKNGYAGYIDGGASQEEFYKFIKPILEKMDGTEELLVKLNREDLLRKQRTFDNGSIPHQIHLGELHAILRRQEDFYPFLKDNREKIEKILTFRIPYYVGPLARGNSRFAWMTRKSEETITPWNFEEVVDKGASAQSFIERMTNFDKNLPNEKVLPKHSLLYEYFTVYNELTKVKYVTEGMRKPAFLSGEQKKAIVDLLFKTNRKVTVKQLKEDYFKKIECFDSVEISGVEDRFNASLGTYHDLLKIIKDKDFLDNEENEDILEDIVLTLTLFEDREMIEERLKTYAHLFDDKVMKQLKRRRYTGWGRLSRKLINGIRDKQSGKTILDFLKSDGFANRNFMQLIHDDSLTFKEDIQKAQVSGQGDSLHEHIANLAGSPAIKKGILQTVKVVDELVKVMGRHKPENIVIEMARENQTTQKGQKNSRERMKRIEEGIKELGSQILKEHPVENTQLQNEKLYLYYLQNGRDMYVDQELDINRLSDYDVDHIVPQSFLKDDSIDNKVLTRSDKARGKSDNVPSEEVVKKMKNYWRQLLNAKLITQRKFDNLTKAERGGLSELDKAGFIKRQLVETRQITKHVAQILDSRMNTKYDENDKLIREVKVITLKSKLVSDFRKDFQFYKVREINNYHHAHDAYLNAVVGTALIKKYPKLESEFVYGDYKVYDVRKMIAKSEQEIGKATAKYFFYSNIMNFFKTEITLANGEIRKRPLIETNGETGEIVWDKGRDFATVRKVLSMPQVNIVKKTEVQTGGFSKESILPKRNSDKLIARKKDWDPKKYGGFDSPTVAYSVLVVAKVEKGKSKKLKSVKELLGITIMERSSFEKNPIDFLEAKGYKEVKKDLIIKLPKYSLFELENGRKRMLASAGELQKGNELALPSKYVNFLYLASHYEKLKGSPEDNEQKQLFVEQHKHYLDEIIEQISEFSKRVILADANLDKVLSAYNKHRDKPIREQAENIIHLFTLTNLGAPAAFKYFDTTIDRKRYTSTKEVLDATLIHQSITGLYETRIDLSQLGGDGGGGGEAAAKGGVLNLEEEYRLHEKPVPSSIDPSWLQLFPTVWAERAGMGLANQVPPVVVELRSGASPVAVRQYPMSKEAREGIRPHIQRFLDLGVLVPCQSPWNTPLLPVKKPGTNDYRPVQDLREINKRVQDIHPTVPNPYNLLSSLPPSHTWYSVLDLKDAFFCLKLHPNSQPLFAFEWRDPEKGNTGQLTWTRLPQGFKNSPTLFNEALHRDLAPFRALNPQVVLLQYVDDLLVAAPTYRDCKEGTQKLLQELSKLGYRVSAKKAQLCQKEVTYLGYLLKEGKRWLTPARKATVMKIPPPTTPRQVREFLGKAGFCRLFIPGFASLAAPLYPLTKPSIPFIWTEEHQKAFDRIKEALLSAPALALPDLTKPFTLYVDERAGVARGVLTQTLGPWRRPVAYLSKKLDPVASGWPTCLKAVAAVALLLKDADKLTLGQNVTVIASHSLESIVRQPPDRWMTNARMTHYQSLLLNERVSFAPPAVLNPATLLPVESEATPVHRCSEILAEETGTRRDLKDQPLPGVPAWYTDGSSFIAEGKRRAGAAIVDGKRTVWASSLPEGTSAQKAELVALTQALRLAEGKDINIYTDSRYAFATAHIHGAIYKQRGWLTSAGKDIKNKEEILALLEAIHLPKRVAIIHCPGHQKGNDPVATGNRRADEAAKQAALSTRVLAETTKPAGKRTADGSEFEKRTADGSEFESPKKKAKVE

SEQ ID NO: 935 - protein, 2103 aa, synthetic construct
  source 1..2103: note = Description of Artificial Sequence: Synthetic polypeptide
MPAAKRVKLDGGDKKYSIGLDIGTNSVGWAVITDEYKVPSKKFKVLGNTDRHSIKKNLIGALLFDSGETAEATRLKRTARRRYTRRKNRICYLQEIFSNEMAKVDDSFFHRLEESFLVEEDKKHERHPIFGNIVDEVAYHEKYPTIYHLRKKLVDSTDKADLRLIYLALAHMIKFRGHFLIEGDLNPDNSDVDKLFIQLVQTYNQLFEENPINASGVDAKAILSARLSKSRRLENLIAQLPGEKKNGLFGNLIALSLGLTPNFKSNFDLAEDAKLQLSKDTYDDDLDNLLAQIGDQYADLFLAAKNLSDAILLSDILRVNTEITKAPLSASMIKRYDEHHQDLTLLKALVRQQLPEKYKEIFFDQSKNGYAGYIDGGASQEEFYKFIKPILEKMDGTEELLVKLNREDLLRKQRTFDNGSIPHQIHLGELHAILRRQEDFYPFLKDNREKIEKILTFRIPYYVGPLARGNSRFAWMTRKSEETITPWNFEEVVDKGASAQSFIERMTNFDKNLPNEKVLPKHSLLYEYFTVYNELTKVKYVTEGMRKPAFLSGEQKKAIVDLLFKTNRKVTVKQLKEDYFKKIECFDSVEISGVEDRFNASLGTYHDLLKIIKDKDFLDNEENEDILEDIVLTLTLFEDREMIEERLKTYAHLFDDKVMKQLKRRRYTGWGRLSRKLINGIRDKQSGKTILDFLKSDGFANRNFMQLIHDDSLTFKEDIQKAQVSGQGDSLHEHIANLAGSPAIKKGILQTVKVVDELVKVMGRHKPENIVIEMARENQTTQKGQKNSRERMKRIEEGIKELGSQILKEHPVENTQLQNEKLYLYYLQNGRDMYVDQELDINRLSDYDVDHIVPQSFLKDDSIDNKVLTRSDKARGKSDNVPSEEVVKKMKNYWRQLLNAKLITQRKFDNLTKAERGGLSELDKAGFIKRQLVETRQITKHVAQILDSRMNTKYDENDKLIREVKVITLKSKLVSDFRKDFQFYKVREINNYHHAHDAYLNAVVGTALIKKYPKLESEFVYGDYKVYDVRKMIAKSEQEIGKATAKYFFYSNIMNFFKTEITLANGEIRKRPLIETNGETGEIVWDKGRDFATVRKVLSMPQVNIVKKTEVQTGGFSKESILPKRNSDKLIARKKDWDPKKYGGFDSPTVAYSVLVVAKVEKGKSKKLKSVKELLGITIMERSSFEKNPIDFLEAKGYKEVKKDLIIKLPKYSLFELENGRKRMLASAGELQKGNELALPSKYVNFLYLASHYEKLKGSPEDNEQKQLFVEQHKHYLDEIIEQISEFSKRVILADANLDKVLSAYNKHRDKPIREQAENIIHLFTLTNLGAPAAFKYFDTTIDRKRYTSTKEVLDATLIHQSITGLYETRIDLSQLGGDGGEAAAKEAAAKEAAAKEAAAKGGVLNLEEEYRLHEKPVPSSIDPSWLQLFPTVWAERAGMGLANQVPPVVVELRSGASPVAVRQYPMSKEAREGIRPHIQRFLDLGVLVPCQSPWNTPLLPVKKPGTNDYRPVQDLREINKRVQDIHPTVPNPYNLLSSLPPSHTWYSVLDLKDAFFCLKLHPNSQPLFAFEWRDPEKGNTGQLTWTRLPQGFKNSPTLFNEALHRDLAPFRALNPQVVLLQYVDDLLVAAPTYRDCKEGTQKLLQELSKLGYRVSAKKAQLCQKEVTYLGYLLKEGKRWLTPARKATVMKIPPPTTPRQVREFLGKAGFCRLFIPGFASLAAPLYPLTKPSIPFIWTEEHQKAFDRIKEALLSAPALALPDLTKPFTLYVDERAGVARGVLTQTLGPWRRPVAYLSKKLDPVASGWPTCLKAVAAVALLLKDADKLTLGQNVTVIASHSLESIVRQPPDRWMTNARMTHYQSLLLNERVSFAPPAVLNPATLLPVESEATPVHRCSEILAEETGTRRDLKDQPLPGVPAWYTDGSSFIAEGKRRAGAAIVDGKRTVWASSLPEGTSAQKAELVALTQALRLAEGKDINIYTDSRYAFATAHIHGAIYKQRGWLTSAGKDIKNKEEILALLEAIHLPKRVAIIHCPGHQKGNDPVATGNRRADEAAKQAALSTRVLAETTKPAGKRTADGSEFEKRTADGSEFESPKKKAKVE

SEQ ID NO: 936 - protein, 2094 aa, synthetic construct
  source 1..2094: note = Description of Artificial Sequence: Synthetic polypeptide
MPAAKRVKLDGGDKKYSIGLDIGTNSVGWAVITDEYKVPSKKFKVLGNTDRHSIKKNLIGALLFDSGETAEATRLKRTARRRYTRRKNRICYLQEIFSNEMAKVDDSFFHRLEESFLVEEDKKHERHPIFGNIVDEVAYHEKYPTIYHLRKKLVDSTDKADLRLIYLALAHMIKFRGHFLIEGDLNPDNSDVDKLFIQLVQTYNQLFEENPINASGVDAKAILSARLSKSRRLENLIAQLPGEKKNGLFGNLIALSLGLTPNFKSNFDLAEDAKLQLSKDTYDDDLDNLLAQIGDQYADLFLAAKNLSDAILLSDILRVNTEITKAPLSASMIKRYDEHHQDLTLLKALVRQQLPEKYKEIFFDQSKNGYAGYIDGGASQEEFYKFIKPILEKMDGTEELLVKLNREDLLRKQRTFDNGSIPHQIHLGELHAILRRQEDFYPFLKDNREKIEKILTFRIPYYVGPLARGNSRFAWMTRKSEETITPWNFEEVVDKGASAQSFIERMTNFDKNLPNEKVLPKHSLLYEYFTVYNELTKVKYVTEGMRKPAFLSGEQKKAIVDLLFKTNRKVTVKQLKEDYFKKIECFDSVEISGVEDRFNASLGTYHDLLKIIKDKDFLDNEENEDILEDIVLTLTLFEDREMIEERLKTYAHLFDDKVMKQLKRRRYTGWGRLSRKLINGIRDKQSGKTILDFLKSDGFANRNFMQLIHDDSLTFKEDIQKAQVSGQGDSLHEHIANLAGSPAIKKGILQTVKVVDELVKVMGRHKPENIVIEMARENQTTQKGQKNSRERMKRIEEGIKELGSQILKEHPVENTQLQNEKLYLYYLQNGRDMYVDQELDINRLSDYDVDHIVPQSFLKDDSIDNKVLTRSDKARGKSDNVPSEEVVKKMKNYWRQLLNAKLITQRKFDNLTKAERGGLSELDKAGFIKRQLVETRQITKHVAQILDSRMNTKYDENDKLIREVKVITLKSKLVSDFRKDFQFYKVREINNYHHAHDAYLNAVVGTALIKKYPKLESEFVYGDYKVYDVRKMIAKSEQEIGKATAKYFFYSNIMNFFKTEITLANGEIRKRPLIETNGETGEIVWDKGRDFATVRKVLSMPQVNIVKKTEVQTGGFSKESILPKRNSDKLIARKKDWDPKKYGGFDSPTVAYSVLVVAKVEKGKSKKLKSVKELLGITIMERSSFEKNPIDFLEAKGYKEVKKDLIIKLPKYSLFELENGRKRMLASAGELQKGNELALPSKYVNFLYLASHYEKLKGSPEDNEQKQLFVEQHKHYLDEIIEQISEFSKRVILADANLDKVLSAYNKHRDKPIREQAENIIHLFTLTNLGAPAAFKYFDTTIDRKRYTSTKEVLDATLIHQSITGLYETRIDLSQLGGDGGGGSGSSEAAAKGGVLNLEEEYRLHEKPVPSSIDPSWLQLFPTVWAERAGMGLANQVPPVVVELRSGASPVAVRQYPMSKEAREGIRPHIQRFLDLGVLVPCQSPWNTPLLPVKKPGTNDYRPVQDLREINKRVQDIHPTVPNPYNLLSSLPPSHTWYSVLDLKDAFFCLKLHPNSQPLFAFEWRDPEKGNTGQLTWTRLPQGFKNSPTLFNEALHRDLAPFRALNPQVVLLQYVDDLLVAAPTYRDCKEGTQKLLQELSKLGYRVSAKKAQLCQKEVTYLGYLLKEGKRWLTPARKATVMKIPPPTTPRQVREFLGKAGFCRLFIPGFASLAAPLYPLTKPSIPFIWTEEHQKAFDRIKEALLSAPALALPDLTKPFTLYVDERAGVARGVLTQTLGPWRRPVAYLSKKLDPVASGWPTCLKAVAAVALLLKDADKLTLGQNVTVIASHSLESIVRQPPDRWMTNARMTHYQSLLLNERVSFAPPAVLNPATLLPVESEATPVHRCSEILAEETGTRRDLKDQPLPGVPAWYTDGSSFIAEGKRRAGAAIVDGKRTVWASSLPEGTSAQKAELVALTQALRLAEGKDINIYTDSRYAFATAHIHGAIYKQRGWLTSAGKDIKNKEEILALLEAIHLPKRVAIIHCPGHQKGNDPVATGNRRADEAAKQAALSTRVLAETTKPAGKRTADGSEFEKRTADGSEFESPKKKAKVE

SEQ ID NO: 937 - protein, 2092 aa, synthetic construct
  source 1..2092: note = Description of Artificial Sequence: Synthetic polypeptide
MPAAKRVKLDGGDKKYSIGLDIGTNSVGWAVITDEYKVPSKKFKVLGNTDRHSIKKNLIGALLFDSGETAEATRLKRTARRRYTRRKNRICYLQEIFSNEMAKVDDSFFHRLEESFLVEEDKKHERHPIFGNIVDEVAYHEKYPTIYHLRKKLVDSTDKADLRLIYLALAHMIKFRGHFLIEGDLNPDNSDVDKLFIQLVQTYNQLFEENPINASGVDAKAILSARLSKSRRLENLIAQLPGEKKNGLFGNLIALSLGLTPNFKSNFDLAEDAKLQLSKDTYDDDLDNLLAQIGDQYADLFLAAKNLSDAILLSDILRVNTEITKAPLSASMIKRYDEHHQDLTLLKALVRQQLPEKYKEIFFDQSKNGYAGYIDGGASQEEFYKFIKPILEKMDGTEELLVKLNREDLLRKQRTFDNGSIPHQIHLGELHAILRRQEDFYPFLKDNREKIEKILTFRIPYYVGPLARGNSRFAWMTRKSEETITPWNFEEVVDKGASAQSFIERMTNFDKNLPNEKVLPKHSLLYEYFTVYNELTKVKYVTEGMRKPAFLSGEQKKAIVDLLFKTNRKVTVKQLKEDYFKKIECFDSVEISGVEDRFNASLGTYHDLLKIIKDKDFLDNEENEDILEDIVLTLTLFEDREMIEERLKTYAHLFDDKVMKQLKRRRYTGWGRLSRKLINGIRDKQSGKTILDFLKSDGFANRNFMQLIHDDSLTFKEDIQKAQVSGQGDSLHEHIANLAGSPAIKKGILQTVKVVDELVKVMGRHKPENIVIEMARENQTTQKGQKNSRERMKRIEEGIKELGSQILKEHPVENTQLQNEKLYLYYLQNGRDMYVDQELDINRLSDYDVDHIVPQSFLKDDSIDNKVLTRSDKARGKSDNVPSEEVVKKMKNYWRQLLNAKLITQRKFDNLTKAERGGLSELDKAGFIKRQLVETRQITKHVAQILDSRMNTKYDENDKLIREVKVITLKSKLVSDFRKDFQFYKVREINNYHHAHDAYLNAVVGTALIKKYPKLESEFVYGDYKVYDVRKMIAKSEQEIGKATAKYFFYSNIMNFFKTEITLANGEIRKRPLIETNGETGEIVWDKGRDFATVRKVLSMPQVNIVKKTEVQTGGFSKESILPKRNSDKLIARKKDWDPKKYGGFDSPTVAYSVLVVAKVEKGKSKKLKSVKELLGITIMERSSFEKNPIDFLEAKGYKEVKKDLIIKLPKYSLFELENGRKRMLASAGELQKGNELALPSKYVNFLYLASHYEKLKGSPEDNEQKQLFVEQHKHYLDEIIEQISEFSKRVILADANLDKVLSAYNKHRDKPIREQAENIIHLFTLTNLGAPAAFKYFDTTIDRKRYTSTKEVLDATLIHQSITGLYETRIDLSQLGGDGGGGGGGSGSSGGVLNLEEEYRLHEKPVPSSIDPSWLQLFPTVWAERAGMGLANQVPPVVVELRSGASPVAVRQYPMSKEAREGIRPHIQRFLDLGVLVPCQSPWNTPLLPVKKPGTNDYRPVQDLREINKRVQDIHPTVPNPYNLLSSLPPSHTWYSVLDLKDAFFCLKLHPNSQPLFAFEWRDPEKGNTGQLTWTRLPQGFKNSPTLFNEALHRDLAPFRALNPQVVLLQYVDDLLVAAPTYRDCKEGTQKLLQELSKLGYRVSAKKAQLCQKEVTYLGYLLKEGKRWLTPARKATVMKIPPPTTPRQVREFLGKAGFCRLFIPGFASLAAPLYPLTKPSIPFIWTEEHQKAFDRIKEALLSAPALALPDLTKPFTLYVDERAGVARGVLTQTLGPWRRPVAYLSKKLDPVASGWPTCLKAVAAVALLLKDADKLTLGQNVTVIASHSLESIVRQPPDRWMTNARMTHYQSLLLNERVSFAPPAVLNPATLLPVESEATPVHRCSEILAEETGTRRDLKDQPLPGVPAWYTDGSSFIAEGKRRAGAAIVDGKRTVWASSLPEGTSAQKAELVALTQALRLAEGKDINIYTDSRYAFATAHIHGAIYKQRGWLTSAGKDIKNKEEILALLEAIHLPKRVAIIHCPGHQKGNDPVATGNRRADEAAKQAALSTRVLAETTKPAGKRTADGSEFEKRTADGSEFESPKKKAKVE

SEQ ID NO: 938 - protein, 2098 aa, synthetic construct
  source 1..2098: note = Description of Artificial Sequence: Synthetic polypeptide
MPAAKRVKLDGGDKKYSIGLDIGTNSVGWAVITDEYKVPSKKFKVLGNTDRHSIKKNLIGALLFDSGETAEATRLKRTARRRYTRRKNRICYLQEIFSNEMAKVDDSFFHRLEESFLVEEDKKHERHPIFGNIVDEVAYHEKYPTIYHLRKKLVDSTDKADLRLIYLALAHMIKFRGHFLIEGDLNPDNSDVDKLFIQLVQTYNQLFEENPINASGVDAKAILSARLSKSRRLENLIAQLPGEKKNGLFGNLIALSLGLTPNFKSNFDLAEDAKLQLSKDTYDDDLDNLLAQIGDQYADLFLAAKNLSDAILLSDILRVNTEITKAPLSASMIKRYDEHHQDLTLLKALVRQQLPEKYKEIFFDQSKNGYAGYIDGGASQEEFYKFIKPILEKMDGTEELLVKLNREDLLRKQRTFDNGSIPHQIHLGELHAILRRQEDFYPFLKDNREKIEKILTFRIPYYVGPLARGNSRFAWMTRKSEETITPWNFEEVVDKGASAQSFIERMTNFDKNLPNEKVLPKHSLLYEYFTVYNELTKVKYVTEGMRKPAFLSGEQKKAIVDLLFKTNRKVTVKQLKEDYFKKIECFDSVEISGVEDRFNASLGTYHDLLKIIKDKDFLDNEENEDILEDIVLTLTLFEDREMIEERLKTYAHLFDDKVMKQLKRRRYTGWGRLSRKLINGIRDKQSGKTILDFLKSDGFANRNFMQLIHDDSLTFKEDIQKAQVSGQGDSLHEHIANLAGSPAIKKGILQTVKVVDELVKVMGRHKPENIVIEMARENQTTQKGQKNSRERMKRIEEGIKELGSQILKEHPVENTQLQNEKLYLYYLQNGRDMYVDQELDINRLSDYDVDHIVPQSFLKDDSIDNKVLTRSDKARGKSDNVPSEEVVKKMKNYWRQLLNAKLITQRKFDNLTKAERGGLSELDKAGFIKRQLVETRQITKHVAQILDSRMNTKYDENDKLIREVKVITLKSKLVSDFRKDFQFYKVREINNYHHAHDAYLNAVVGTALIKKYPKLESEFVYGDYKVYDVRKMIAKSEQEIGKATAKYFFYSNIMNFFKTEITLANGEIRKRPLIETNGETGEIVWDKGRDFATVRKVLSMPQVNIVKKTEVQTGGFSKESILPKRNSDKLIARKKDWDPKKYGGFDSPTVAYSVLVVAKVEKGKSKKLKSVKELLGITIMERSSFEKNPIDFLEAKGYKEVKKDLIIKLPKYSLFELENGRKRMLASAGELQKGNELALPSKYVNFLYLASHYEKLKGSPEDNEQKQLFVEQHKHYLDEIIEQISEFSKRVILADANLDKVLSAYNKHRDKPIREQAENIIHLFTLTNLGAPAAFKYFDTTIDRKRYTSTKEVLDATLIHQSITGLYETRIDLSQLGGDGGGSSGSSGSSGSSGSSGGVLNLEEEYRLHEKPVPSSIDPSWLQLFPTVWAERAGMGLANQVPPVVVELRSGASPVAVRQYPMSKEAREGIRPHIQRFLDLGVLVPCQSPWNTPLLPVKKPGTNDYRPVQDLREINKRVQDIHPTVPNPYNLLSSLPPSHTWYSVLDLKDAFFCLKLHPNSQPLFAFEWRDPEKGNTGQLTWTRLPQGFKNSPTLFNEALHRDLAPFRALNPQVVLLQYVDDLLVAAPTYRDCKEGTQKLLQELSKLGYRVSAKKAQLCQKEVTYLGYLLKEGKRWLTPARKATVMKIPPPTTPRQVREFLGKAGFCRLFIPGFASLAAPLYPLTKPSIPFIWTEEHQKAFDRIKEALLSAPALALPDLTKPFTLYVDERAGVARGVLTQTLGPWRRPVAYLSKKLDPVASGWPTCLKAVAAVALLLKDADKLTLGQNVTVIASHSLESIVRQPPDRWMTNARMTHYQSLLLNERVSFAPPAVLNPATLLPVESEATPVHRCSEILAEETGTRRDLKDQPLPGVPAWYTDGSSFIAEGKRRAGAAIVDGKRTVWASSLPEGTSAQKAELVALTQALRLAEGKDINIYTDSRYAFATAHIHGAIYKQRGWLTSAGKDIKNKEEILALLEAIHLPKRVAIIHCPGHQKGNDPVATGNRRADEAAKQAALSTRVLAETTKPAGKRTADGSEFEKRTADGSEFESPKKKAKVE

SEQ ID NO: 939 - protein, 2094 aa, synthetic construct
  source 1..2094: note = Description of Artificial Sequence: Synthetic polypeptide
MPAAKRVKLDGGDKKYSIGLDIGTNSVGWAVITDEYKVPSKKFKVLGNTDRHSIKKNLIGALLFDSGETAEATRLKRTARRRYTRRKNRICYLQEIFSNEMAKVDDSFFHRLEESFLVEEDKKHERHPIFGNIVDEVAYHEKYPTIYHLRKKLVDSTDKADLRLIYLALAHMIKFRGHFLIEGDLNPDNSDVDKLFIQLVQTYNQLFEENPINASGVDAKAILSARLSKSRRLENLIAQLPGEKKNGLFGNLIALSLGLTPNFKSNFDLAEDAKLQLSKDTYDDDLDNLLAQIGDQYADLFLAAKNLSDAILLSDILRVNTEITKAPLSASMIKRYDEHHQDLTLLKALVRQQLPEKYKEIFFDQSKNGYAGYIDGGASQEEFYKFIKPILEKMDGTEELLVKLNREDLLRKQRTFDNGSIPHQIHLGELHAILRRQEDFYPFLKDNREKIEKILTFRIPYYVGPLARGNSRFAWMTRKSEETITPWNFEEVVDKGASAQSFIERMTNFDKNLPNEKVLPKHSLLYEYFTVYNELTKVKYVTEGMRKPAFLSGEQKKAIVDLLFKTNRKVTVKQLKEDYFKKIECFDSVEISGVEDRFNASLGTYHDLLKIIKDKDFLDNEENEDILEDIVLTLTLFEDREMIEERLKTYAHLFDDKVMKQLKRRRYTGWGRLSRKLINGIRDKQSGKTILDFLKSDGFANRNFMQLIHDDSLTFKEDIQKAQVSGQGDSLHEHIANLAGSPAIKKGILQTVKVVDELVKVMGRHKPENIVIEMARENQTTQKGQKNSRERMKRIEEGIKELGSQILKEHPVENTQLQNEKLYLYYLQNGRDMYVDQELDINRLSDYDVDHIVPQSFLKDDSIDNKVLTRSDKARGKSDNVPSEEVVKKMKNYWRQLLNAKLITQRKFDNLTKAERGGLSELDKAGFIKRQLVETRQITKHVAQILDSRMNTKYDENDKLIREVKVITLKSKLVSDFRKDFQFYKVREINNYHHAHDAYLNAVVGTALIKKYPKLESEFVYGDYKVYDVRKMIAKSEQEIGKATAKYFFYSNIMNFFKTEITLANGEIRKRPLIETNGETGEIVWDKGRDFATVRKVLSMPQVNIVKKTEVQTGGFSKESILPKRNSDKLIARKKDWDPKKYGGFDSPTVAYSVLVVAKVEKGKSKKLKSVKELLGITIMERSSFEKNPIDFLEAKGYKEVKKDLIIKLPKYSLFELENGRKRMLASAGELQKGNELALPSKYVNFLYLASHYEKLKGSPEDNEQKQLFVEQHKHYLDEIIEQISEFSKRVILADANLDKVLSAYNKHRDKPIREQAENIIHLFTLTNLGAPAAFKYFDTTIDRKRYTSTKEVLDATLIHQSITGLYETRIDLSQLGGDGGPAPEAAAKGGSGGVLNLEEEYRLHEKPVPSSIDPSWLQLFPTVWAERAGMGLANQVPPVVVELRSGASPVAVRQYPMSKEAREGIRPHIQRFLDLGVLVPCQSPWNTPLLPVKKPGTNDYRPVQDLREINKRVQDIHPTVPNPYNLLSSLPPSHTWYSVLDLKDAFFCLKLHPNSQPLFAFEWRDPEKGNTGQLTWTRLPQGFKNSPTLFNEALHRDLAPFRALNPQVVLLQYVDDLLVAAPTYRDCKEGTQKLLQELSKLGYRVSAKKAQLCQKEVTYLGYLLKEGKRWLTPARKATVMKIPPPTTPRQVREFLGKAGFCRLFIPGFASLAAPLYPLTKPSIPFIWTEEHQKAFDRIKEALLSAPALALPDLTKPFTLYVDERAGVARGVLTQTLGPWRRPVAYLSKKLDPVASGWPTCLKAVAAVALLLKDADKLTLGQNVTVIASHSLESIVRQPPDRWMTNARMTHYQSLLLNERVSFAPPAVLNPATLLPVESEATPVHRCSEILAEETGTRRDLKDQPLPGVPAWYTDGSSFIAEGKRRAGAAIVDGKRTVWASSLPEGTSAQKAELVALTQALRLAEGKDINIYTDSRYAFATAHIHGAIYKQRGWLTSAGKDIKNKEEILALLEAIHLPKRVAIIHCPGHQKGNDPVATGNRRADEAAKQAALSTRVLAETTKPAGKRTADGSEFEKRTADGSEFESPKKKAKVE

SEQ ID NO: 940 - protein, 2089 aa, synthetic construct
  source 1..2089: note = Description of Artificial Sequence: Synthetic polypeptide
MPAAKRVKLDGGDKKYSIGLDIGTNSVGWAVITDEYKVPSKKFKVLGNTDRHSIKKNLIGALLFDSGETAEATRLKRTARRRYTRRKNRICYLQEIFSNEMAKVDDSFFHRLEESFLVEEDKKHERHPIFGNIVDEVAYHEKYPTIYHLRKKLVDSTDKADLRLIYLALAHMIKFRGHFLIEGDLNPDNSDVDKLFIQLVQTYNQLFEENPINASGVDAKAILSARLSKSRRLENLIAQLPGEKKNGLFGNLIALSLGLTPNFKSNFDLAEDAKLQLSKDTYDDDLDNLLAQIGDQYADLFLAAKNLSDAILLSDILRVNTEITKAPLSASMIKRYDEHHQDLTLLKALVRQQLPEKYKEIFFDQSKNGYAGYIDGGASQEEFYKFIKPILEKMDGTEELLVKLNREDLLRKQRTFDNGSIPHQIHLGELHAILRRQEDFYPFLKDNREKIEKILTFRIPYYVGPLARGNSRFAWMTRKSEETITPWNFEEVVDKGASAQSFIERMTNFDKNLPNEKVLPKHSLLYEYFTVYNELTKVKYVTEGMRKPAFLSGEQKKAIVDLLFKTNRKVTVKQLKEDYFKKIECFDSVEISGVEDRFNASLGTYHDLLKIIKDKDFLDNEENEDILEDIVLTLTLFEDREMIEERLKTYAHLFDDKVMKQLKRRRYTGWGRLSRKLINGIRDKQSGKTILDFLKSDGFANRNFMQLIHDDSLTFKEDIQKAQVSGQGDSLHEHIANLAGSPAIKKGILQTVKVVDELVKVMGRHKPENIVIEMARENQTTQKGQKNSRERMKRIEEGIKELGSQILKEHPVENTQLQNEKLYLYYLQNGRDMYVDQELDINRLSDYDVDHIVPQSFLKDDSIDNKVLTRSDKARGKSDNVPSEEVVKKMKNYWRQLLNAKLITQRKFDNLTKAERGGLSELDKAGFIKRQLVETRQITKHVAQILDSRMNTKYDENDKLIREVKVITLKSKLVSDFRKDFQFYKVREINNYHHAHDAYLNAVVGTALIKKYPKLESEFVYGDYKVYDVRKMIAKSEQEIGKATAKYFFYSNIMNFFKTEITLANGEIRKRPLIETNGETGEIVWDKGRDFATVRKVLSMPQVNIVKKTEVQTGGFSKESILPKRNSDKLIARKKDWDPKKYGGFDSPTVAYSVLVVAKVEKGKSKKLKSVKELLGITIMERSSFEKNPIDFLEAKGYKEVKKDLIIKLPKYSLFELENGRKRMLASAGELQKGNELALPSKYVNFLYLASHYEKLKGSPEDNEQKQLFVEQHKHYLDEIIEQISEFSKRVILADANLDKVLSAYNKHRDKPIREQAENIIHLFTLTNLGAPAAFKYFDTTIDRKRYTSTKEVLDATLIHQSITGLYETRIDLSQLGGDGGGGGPAPGGVLNLEEEYRLHEKPVPSSIDPSWLQLFPTVWAERAGMGLANQVPPVVVELRSGASPVAVRQYPMSKEAREGIRPHIQRFLDLGVLVPCQSPWNTPLLPVKKPGTNDYRPVQDLREINKRVQDIHPTVPNPYNLLSSLPPSHTWYSVLDLKDAFFCLKLHPNSQPLFAFEWRDPEKGNTGQLTWTRLPQGFKNSPTLFNEALHRDLAPFRALNPQVVLLQYVDDLLVAAPTYRDCKEGTQKLLQELSKLGYRVSAKKAQLCQKEVTYLGYLLKEGKRWLTPARKATVMKIPPPTTPRQVREFLGKAGFCRLFIPGFASLAAPLYPLTKPSIPFIWTEEHQKAFDRIKEALLSAPALALPDLTKPFTLYVDERAGVARGVLTQTLGPWRRPVAYLSKKLDPVASGWPTCLKAVAAVALLLKDADKLTLGQNVTVIASHSLESIVRQPPDRWMTNARMTHYQSLLLNERVSFAPPAVLNPATLLPVESEATPVHRCSEILAEETGTRRDLKDQPLPGVPAWYTDGSSFIAEGKRRAGAAIVDGKRTVWASSLPEGTSAQKAELVALTQALRLAEGKDINIYTDSRYAFATAHIHGAIYKQRGWLTSAGKDIKNKEEILALLEAIHLPKRVAIIHCPGHQKGNDPVATGNRRADEAAKQAALSTRVLAETTKPAGKRTADGSEFEKRTADGSEFESPKKKAKVE

SEQ ID NO: 941 - protein, 2089 aa, synthetic construct
  source 1..2089: note = Description of Artificial Sequence: Synthetic polypeptide
MPAAKRVKLDGGDKKYSIGLDIGTNSVGWAVITDEYKVPSKKFKVLGNTDRHSIKKNLIGALLFDSGETAEATRLKRTARRRYTRRKNRICYLQEIFSNEMAKVDDSFFHRLEESFLVEEDKKHERHPIFGNIVDEVAYHEKYPTIYHLRKKLVDSTDKADLRLIYLALAHMIKFRGHFLIEGDLNPDNSDVDKLFIQLVQTYNQLFEENPINASGVDAKAILSARLSKSRRLENLIAQLPGEKKNGLFGNLIALSLGLTPNFKSNFDLAEDAKLQLSKDTYDDDLDNLLAQIGDQYADLFLAAKNLSDAILLSDILRVNTEITKAPLSASMIKRYDEHHQDLTLLKALVRQQLPEKYKEIFFDQSKNGYAGYIDGGASQEEFYKFIKPILEKMDGTEELLVKLNREDLLRKQRTFDNGSIPHQIHLGELHAILRRQEDFYPFLKDNREKIEKILTFRIPYYVGPLARGNSRFAWMTRKSEETITPWNFEEVVDKGASAQSFIERMTNFDKNLPNEKVLPKHSLLYEYFTVYNELTKVKYVTEGMRKPAFLSGEQKKAIVDLLFKTNRKVTVKQLKEDYFKKIECFDSVEISGVEDRFNASLGTYHDLLKIIKDKDFLDNEENEDILEDIVLTLTLFEDREMIEERLKTYAHLFDDKVMKQLKRRRYTGWGRLSRKLINGIRDKQSGKTILDFLKSDGFANRNFMQLIHDDSLTFKEDIQKAQVSGQGDSLHEHIANLAGSPAIKKGILQTVKVVDELVKVMGRHKPENIVIEMARENQTTQKGQKNSRERMKRIEEGIKELGSQILKEHPVENTQLQNEKLYLYYLQNGRDMYVDQELDINRLSDYDVDHIVPQSFLKDDSIDNKVLTRSDKARGKSDNVPSEEVVKKMKNYWRQLLNAKLITQRKFDNLTKAERGGLSELDKAGFIKRQLVETRQITKHVAQILDSRMNTKYDENDKLIREVKVITLKSKLVSDFRKDFQFYKVREINNYHHAHDAYLNAVVGTALIKKYPKLESEFVYGDYKVYDVRKMIAKSEQEIGKATAKYFFYSNIMNFFKTEITLANGEIRKRPLIETNGETGEIVWDKGRDFATVRKVLSMPQVNIVKKTEVQTGGFSKESILPKRNSDKLIARKKDWDPKKYGGFDSPTVAYSVLVVAKVEKGKSKKLKSVKELLGITIMERSSFEKNPIDFLEAKGYKEVKKDLIIKLPKYSLFELENGRKRMLASAGELQKGNELALPSKYVNFLYLASHYEKLKGSPEDNEQKQLFVEQHKHYLDEIIEQISEFSKRVILADANLDKVLSAYNKHRDKPIREQAENIIHLFTLTNLGAPAAFKYFDTTIDRKRYTSTKEVLDATLIHQSITGLYETRIDLSQLGGDGGPAPGSSGGVLNLEEEYRLHEKPVPSSIDPSWLQLFPTVWAERAGMGLANQVPPVVVELRSGASPVAVRQYPMSKEAREGIRPHIQRFLDLGVLVPCQSPWNTPLLPVKKPGTNDYRPVQDLREINKRVQDIHPTVPNPYNLLSSLPPSHTWYSVLDLKDAFFCLKLHPNSQPLFAFEWRDPEKGNTGQLTWTRLPQGFKNSPTLFNEALHRDLAPFRALNPQVVLLQYVDDLLVAAPTYRDCKEGTQKLLQELSKLGYRVSAKKAQLCQKEVTYLGYLLKEGKRWLTPARKATVMKIPPPTTPRQVREFLGKAGFCRLFIPGFASLAAPLYPLTKPSIPFIWTEEHQKAFDRIKEALLSAPALALPDLTKPFTLYVDERAGVARGVLTQTLGPWRRPVAYLSKKLDPVASGWPTCLKAVAAVALLLKDADKLTLGQNVTVIASHSLESIVRQPPDRWMTNARMTHYQSLLLNERVSFAPPAVLNPATLLPVESEATPVHRCSEILAEETGTRRDLKDQPLPGVPAWYTDGSSFIAEGKRRAGAAIVDGKRTVWASSLPEGTSAQKAELVALTQALRLAEGKDINIYTDSRYAFATAHIHGAIYKQRGWLTSAGKDIKNKEEILALLEAIHLPKRVAIIHCPGHQKGNDPVATGNRRADEAAKQAALSTRVLAETTKPAGKRTADGSEFEKRTADGSEFESPKKKAKVE

SEQ ID NO: 942 - protein, 2091 aa, synthetic construct
  source 1..2091: note = Description of Artificial Sequence: Synthetic polypeptide
MPAAKRVKLDGGDKKYSIGLDIGTNSVGWAVITDEYKVPSKKFKVLGNTDRHSIKKNLIGALLFDSGETAEATRLKRTARRRYTRRKNRICYLQEIFSNEMAKVDDSFFHRLEESFLVEEDKKHERHPIFGNIVDEVAYHEKYPTIYHLRKKLVDSTDKADLRLIYLALAHMIKFRGHFLIEGDLNPDNSDVDKLFIQLVQTYNQLFEENPINASGVDAKAILSARLSKSRRLENLIAQLPGEKKNGLFGNLIALSLGLTPNFKSNFDLAEDAKLQLSKDTYDDDLDNLLAQIGDQYADLFLAAKNLSDAILLSDILRVNTEITKAPLSASMIKRYDEHHQDLTLLKALVRQQLPEKYKEIFFDQSKNGYAGYIDGGASQEEFYKFIKPILEKMDGTEELLVKLNREDLLRKQRTFDNGSIPHQIHLGELHAILRRQEDFYPFLKDNREKIEKILTFRIPYYVGPLARGNSRFAWMTRKSEETITPWNFEEVVDKGASAQSFIERMTNFDKNLPNEKVLPKHSLLYEYFTVYNELTKVKYVTEGMRKPAFLSGEQKKAIVDLLFKTNRKVTVKQLKEDYFKKIECFDSVEISGVEDRFNASLGTYHDLLKIIKDKDFLDNEENEDILEDIVLTLTLFEDREMIEERLKTYAHLFDDKVMKQLKRRRYTGWGRLSRKLINGIRDKQSGKTILDFLKSDGFANRNFMQLIHDDSLTFKEDIQKAQVSGQGDSLHEHIANLAGSPAIKKGILQTVKVVDELVKVMGRHKPENIVIEMARENQTTQKGQKNSRERMKRIEEGIKELGSQILKEHPVENTQLQNEKLYLYYLQNGRDMYVDQELDINRLSDYDVDHIVPQSFLKDDSIDNKVLTRSDKARGKSDNVPSEEVVKKMKNYWRQLLNAKLITQRKFDNLTKAERGGLSELDKAGFIKRQLVETRQITKHVAQILDSRMNTKYDENDKLIREVKVITLKSKLVSDFRKDFQFYKVREINNYHHAHDAYLNAVVGTALIKKYPKLESEFVYGDYKVYDVRKMIAKSEQEIGKATAKYFFYSNIMNFFKTEITLANGEIRKRPLIETNGETGEIVWDKGRDFATVRKVLSMPQVNIVKKTEVQTGGFSKESILPKRNSDKLIARKKDWDPKKYGGFDSPTVAYSVLVVAKVEKGKSKKLKSVKELLGITIMERSSFEKNPIDFLEAKGYKEVKKDLIIKLPKYSLFELENGRKRMLASAGELQKGNELALPSKYVNFLYLASHYEKLKGSPEDNEQKQLFVEQHKHYLDEIIEQISEFSKRVILADANLDKVLSAYNKHRDKPIREQAENIIHLFTLTNLGAPAAFKYFDTTIDRKRYTSTKEVLDATLIHQSITGLYETRIDLSQLGGDGGEAAAKGSSGGVLNLEEEYRLHEKPVPSSIDPSWLQLFPTVWAERAGMGLANQVPPVVVELRSGASPVAVRQYPMSKEAREGIRPHIQRFLDLGVLVPCQSPWNTPLLPVKKPGTNDYRPVQDLREINKRVQDIHPTVPNPYNLLSSLPPSHTWYSVLDLKDAFFCLKLHPNSQPLFAFEWRDPEKGNTGQLTWTRLPQGFKNSPTLFNEALHRDLAPFRALNPQVVLLQYVDDLLVAAPTYRDCKEGTQKLLQELSKLGYRVSAKKAQLCQKEVTYLGYLLKEGKRWLTPARKATVMKIPPPTTPRQVREFLGKAGFCRLFIPGFASLAAPLYPLTKPSIPFIWTEEHQKAFDRIKEALLSAPALALPDLTKPFTLYVDERAGVARGVLTQTLGPWRRPVAYLSKKLDPVASGWPTCLKAVAAVALLLKDADKLTLGQNVTVIASHSLESIVRQPPDRWMTNARMTHYQSLLLNERVSFAPPAVLNPATLLPVESEATPVHRCSEILAEETGTRRDLKDQPLPGVPAWYTDGSSFIAEGKRRAGAAIVDGKRTVWASSLPEGTSAQKAELVALTQALRLAEGKDINIYTDSRYAFATAHIHGAIYKQRGWLTSAGKDIKNKEEILALLEAIHLPKRVAIIHCPGHQKGNDPVATGNRRADEAAKQAALSTRVLAETTKPAGKRTADGSEFEKRTADGSEFESPKKKAKVE

SEQ ID NO: 943 - protein, 2089 aa, synthetic construct
  source 1..2089: note = Description of Artificial Sequence: Synthetic polypeptide
MPAAKRVKLDGGDKKYSIGLDIGTNSVGWAVITDEYKVPSKKFKVLGNTDRHSIKKNLIGALLFDSGETAEATRLKRTARRRYTRRKNRICYLQEIFSNEMAKVDDSFFHRLEESFLVEEDKKHERHPIFGNIVDEVAYHEKYPTIYHLRKKLVDSTDKADLRLIYLALAHMIKFRGHFLIEGDLNPDNSDVDKLFIQLVQTYNQLFEENPINASGVDAKAILSARLSKSRRLENLIAQLPGEKKNGLFGNLIALSLGLTPNFKSNFDLAEDAKLQLSKDTYDDDLDNLLAQIGDQYADLFLAAKNLSDAILLSDILRVNTEITKAPLSASMIKRYDEHHQDLTLLKALVRQQLPEKYKEIFFDQSKNGYAGYIDGGASQEEFYKFIKPILEKMDGTEELLVKLNREDLLRKQRTFDNGSIPHQIHLGELHAILRRQEDFYPFLKDNREKIEKILTFRIPYYVGPLARGNSRFAWMTRKSEETITPWNFEEVVDKGASAQSFIERMTNFDKNLPNEKVLPKHSLLYEYFTVYNELTKVKYVTEGMRKPAFLSGEQKKAIVDLLFKTNRKVTVKQLKEDYFKKIECFDSVEISGVEDRFNASLGTYHDLLKIIKDKDFLDNEENEDILEDIVLTLTLFEDREMIEERLKTYAHLFDDKVMKQLKRRRYTGWGRLSRKLINGIRDKQSGKTILDFLKSDGFANRNFMQLIHDDSLTFKEDIQKAQVSGQGDSLHEHIANLAGSPAIKKGILQTVKVVDELVKVMGRHKPENIVIEMARENQTTQKGQKNSRERMKRIEEGIKELGSQILKEHPVENTQLQNEKLYLYYLQNGRDMYVDQELDINRLSDYDVDHIVPQSFLKDDSIDNKVLTRSDKARGKSDNVPSEEVVKKMKNYWRQLLNAKLITQRKFDNLTKAERGGLSELDKAGFIKRQLVETRQITKHVAQILDSRMNTKYDENDKLIREVKVITLKSKLVSDFRKDFQFYKVREINNYHHAHDAYLNAVVGTALIKKYPKLESEFVYGDYKVYDVRKMIAKSEQEIGKATAKYFFYSNIMNFFKTEITLANGEIRKRPLIETNGETGEIVWDKGRDFATVRKVLSMPQVNIVKKTEVQTGGFSKESILPKRNSDKLIARKKDWDPKKYGGFDSPTVAYSVLVVAKVEKGKSKKLKSVKELLGITIMERSSFEKNPIDFLEAKGYKEVKKDLIIKLPKYSLFELENGRKRMLASAGELQKGNELALPSKYVNFLYLASHYEKLKGSPEDNEQKQLFVEQHKHYLDEIIEQISEFSKRVILADANLDKVLSAYNKHRDKPIREQAENIIHLFTLTNLGAPAAFKYFDTTIDRKRYTSTKEVLDATLIHQSITGLYETRIDLSQLGGDGGPAPGGSGGVLNLEEEYRLHEKPVPSSIDPSWLQLFPTVWAERAGMGLANQVPPVVVELRSGASPVAVRQYPMSKEAREGIRPHIQRFLDLGVLVPCQSPWNTPLLPVKKPGTNDYRPVQDLREINKRVQDIHPTVPNPYNLLSSLPPSHTWYSVLDLKDAFFCLKLHPNSQPLFAFEWRDPEKGNTGQLTWTRLPQGFKNSPTLFNEALHRDLAPFRALNPQVVLLQYVDDLLVAAPTYRDCKEGTQKLLQELSKLGYRVSAKKAQLCQKEVTYLGYLLKEGKRWLTPARKATVMKIPPPTTPRQVREFLGKAGFCRLFIPGFASLAAPLYPLTKPSIPFIWTEEHQKAFDRIKEALLSAPALALPDLTKPFTLYVDERAGVARGVLTQTLGPWRRPVAYLSKKLDPVASGWPTCLKAVAAVALLLKDADKLTLGQNVTVIASHSLESIVRQPPDRWMTNARMTHYQSLLLNERVSFAPPAVLNPATLLPVESEATPVHRCSEILAEETGTRRDLKDQPLPGVPAWYTDGSSFIAEGKRRAGAAIVDGKRTVWASSLPEGTSAQKAELVALTQALRLAEGKDINIYTDSRYAFATAHIHGAIYKQRGWLTSAGKDIKNKEEILALLEAIHLPKRVAIIHCPGHQKGNDPVATGNRRADEAAKQAALSTRVLAETTKPAGKRTADGSEFEKRTADGSEFESPKKKAKVE

SEQ ID NO: 944 - protein, 2094 aa, synthetic construct
  source 1..2094: note = Description of Artificial Sequence: Synthetic polypeptide
MPAAKRVKLDGGDKKYSIGLDIGTNSVGWAVITDEYKVPSKKFKVLGNTDRHSIKKNLIGALLFDSGETAEATRLKRTARRRYTRRKNRICYLQEIFSNEMAKVDDSFFHRLEESFLVEEDKKHERHPIFGNIVDEVAYHEKYPTIYHLRKKLVDSTDKADLRLIYLALAHMIKFRGHFLIEGDLNPDNSDVDKLFIQLVQTYNQLFEENPINASGVDAKAILSARLSKSRRLENLIAQLPGEKKNGLFGNLIALSLGLTPNFKSNFDLAEDAKLQLSKDTYDDDLDNLLAQIGDQYADLFLAAKNLSDAILLSDILRVNTEITKAPLSASMIKRYDEHHQDLTLLKALVRQQLPEKYKEIFFDQSKNGYAGYIDGGASQEEFYKFIKPILEKMDGTEELLVKLNREDLLRKQRTFDNGSIPHQIHLGELHAILRRQEDFYPFLKDNREKIEKILTFRIPYYVGPLARGNSRFAWMTRKSEETITPWNFEEVVDKGASAQSFIERMTNFDKNLPNEKVLPKHSLLYEYFTVYNELTKVKYVTEGMRKPAFLSGEQKKAIVDLLFKTNRKVTVKQLKEDYFKKIECFDSVEISGVEDRFNASLGTYHDLLKIIKDKDFLDNEENEDILEDIVLTLTLFEDREMIEERLKTYAHLFDDKVMKQLKRRRYTGWGRLSRKLINGIRDKQSGKTILDFLKSDGFANRNFMQLIHDDSLTFKEDIQKAQVSGQGDSLHEHIANLAGSPAIKKGILQTVKVVDELVKVMGRHKPENIVIEMARENQTTQKGQKNSRERMKRIEEGIKELGSQILKEHPVENTQLQNEKLYLYYLQNGRDMYVDQELDINRLSDYDVDHIVPQSFLKDDSIDNKVLTRSDKARGKSDNVPSEEVVKKMKNYWRQLLNAKLITQRKFDNLTKAERGGLSELDKAGFIKRQLVETRQITKHVAQILDSRMNTKYDENDKLIREVKVITLKSKLVSDFRKDFQFYKVREINNYHHAHDAYLNAVVGTALIKKYPKLESEFVYGDYKVYDVRKMIAKSEQEIGKATAKYFFYSNIMNFFKTEITLANGEIRKRPLIETNGETGEIVWDKGRDFATVRKVLSMPQVNIVKKTEVQTGGFSKESILPKRNSDKLIARKKDWDPKKYGGFDSPTVAYSVLVVAKVEKGKSKKLKSVKELLGITIMERSSFEKNPIDFLEAKGYKEVKKDLIIKLPKYSLFELENGRKRMLASAGELQKGNELALPSKYVNFLYLASHYEKLKGSPEDNEQKQLFVEQHKHYLDEIIEQISEFSKRVILADANLDKVLSAYNKHRDKPIREQAENIIHLFTLTNLGAPAAFKYFDTTIDRKRYTSTKEVLDATLIHQSITGLYETRIDLSQLGGDGGGSSPAPEAAAKGGVLNLEEEYRLHEKPVPSSIDPSWLQLFPTVWAERAGMGLANQVPPVVVELRSGASPVAVRQYPMSKEAREGIRPHIQRFLDLGVLVPCQSPWNTPLLPVKKPGTNDYRPVQDLREINKRVQDIHPTVPNPYNLLSSLPPSHTWYSVLDLKDAFFCLKLHPNSQPLFAFEWRDPEKGNTGQLTWTRLPQGFKNSPTLFNEALHRDLAPFRALNPQVVLLQYVDDLLVAAPTYRDCKEGTQKLLQELSKLGYRVSAKKAQLCQKEVTYLGYLLKEGKRWLTPARKATVMKIPPPTTPRQVREFLGKAGFCRLFIPGFASLAAPLYPLTKPSIPFIWTEEHQKAFDRIKEALLSAPALALPDLTKPFTLYVDERAGVARGVLTQTLGPWRRPVAYLSKKLDPVASGWPTCLKAVAAVALLLKDADKLTLGQNVTVIASHSLESIVRQPPDRWMTNARMTHYQSLLLNERVSFAPPAVLNPATLLPVESEATPVHRCSEILAEETGTRRDLKDQPLPGVPAWYTDGSSFIAEGKRRAGAAIVDGKRTVWASSLPEGTSAQKAELVALTQALRLAEGKDINIYTDSRYAFATAHIHGAIYKQRGWLTSAGKDIKNKEEILALLEAIHLPKRVAIIHCPGHQKGNDPVATGNRRADEAAKQAALSTRVLAETTKPAGKRTADGSEFEKRTADGSEFESPKKKAKVE

SEQ ID NO: 945 - protein, 2093 aa, synthetic construct
  source 1..2093: note = Description of Artificial Sequence: Synthetic polypeptide
MPAAKRVKLDGGDKKYSIGLDIGTNSVGWAVITDEYKVPSKKFKVLGNTDRHSIKKNLIGALLFDSGETAEATRLKRTARRRYTRRKNRICYLQEIFSNEMAKVDDSFFHRLEESFLVEEDKKHERHPIFGNIVDEVAYHEKYPTIYHLRKKLVDSTDKADLRLIYLALAHMIKFRGHFLIEGDLNPDNSDVDKLFIQLVQTYNQLFEENPINASGVDAKAILSARLSKSRRLENLIAQLPGEKKNGLFGNLIALSLGLTPNFKSNFDLAEDAKLQLSKDTYDDDLDNLLAQIGDQYADLFLAAKNLSDAILLSDILRVNTEITKAPLSASMIKRYDEHHQDLTLLKALVRQQLPEKYKEIFFDQSKNGYAGYIDGGASQEEFYKFIKPILEKMDGTEELLVKLNREDLLRKQRTFDNGSIPHQIHLGELHAILRRQEDFYPFLKDNREKIEKILTFRIPYYVGPLARGNSRFAWMTRKSEETITPWNFEEVVDKGASAQSFIERMTNFDKNLPNEKVLPKHSLLYEYFTVYNELTKVKYVTEGMRKPAFLSGEQKKAIVDLLFKTNRKVTVKQLKEDYFKKIECFDSVEISGVEDRFNASLGTYHDLLKIIKDKDFLDNEENEDILEDIVLTLTLFEDREMIEERLKTYAHLFDDKVMKQLKRRRYTGWGRLSRKLINGIRDKQSGKTILDFLKSDGFANRNFMQLIHDDSLTFKEDIQKAQVSGQGDSLHEHIANLAGSPAIKKGILQTVKVVDELVKVMGRHKPENIVIEMARENQTTQKGQKNSRERMKRIEEGIKELGSQILKEHPVENTQLQNEKLYLYYLQNGRDMYVDQELDINRLSDYDVDHIVPQSFLKDDSIDNKVLTRSDKARGKSDNVPSEEVVKKMKNYWRQLLNAKLITQRKFDNLTKAERGGLSELDKAGFIKRQLVETRQITKHVAQILDSRMNTKYDENDKLIREVKVITLKSKLVSDFRKDFQFYKVREINNYHHAHDAYLNAVVGTALIKKYPKLESEFVYGDYKVYDVRKMIAKSEQEIGKATAKYFFYSNIMNFFKTEITLANGEIRKRPLIETNGETGEIVWDKGRDFATVRKVLSMPQVNIVKKTEVQTGGFSKESILPKRNSDKLIARKKDWDPKKYGGFDSPTVAYSVLVVAKVEKGKSKKLKSVKELLGITIMERSSFEKNPIDFLEAKGYKEVKKDLIIKLPKYSLFELENGRKRMLASAGELQKGNELALPSKYVNFLYLASHYEKLKGSPEDNEQKQLFVEQHKHYLDEIIEQISEFSKRVILADANLDKVLSAYNKHRDKPIREQAENIIHLFTLTNLGAPAAFKYFDTTIDRKRYTSTKEVLDATLIHQSITGLYETRIDLSQLGGDGGGGGGSGGGGSGGVLNLEEEYRLHEKPVPSSIDPSWLQLFPTVWAERAGMGLANQVPPVVVELRSGASPVAVRQYPMSKEAREGIRPHIQRFLDLGVLVPCQSPWNTPLLPVKKPGTNDYRPVQDLREINKRVQDIHPTVPNPYNLLSSLPPSHTWYSVLDLKDAFFCLKLHPNSQPLFAFEWRDPEKGNTGQLTWTRLPQGFKNSPTLFNEALHRDLAPFRALNPQVVLLQYVDDLLVAAPTYRDCKEGTQKLLQELSKLGYRVSAKKAQLCQKEVTYLGYLLKEGKRWLTPARKATVMKIPPPTTPRQVREFLGKAGFCRLFIPGFASLAAPLYPLTKPSIPFIWTEEHQKAFDRIKEALLSAPALALPDLTKPFTLYVDERAGVARGVLTQTLGPWRRPVAYLSKKLDPVASGWPTCLKAVAAVALLLKDADKLTLGQNVTVIASHSLESIVRQPPDRWMTNARMTHYQSLLLNERVSFAPPAVLNPATLLPVESEATPVHRCSEILAEETGTRRDLKDQPLPGVPAWYTDGSSFIAEGKRRAGAAIVDGKRTVWASSLPEGTSAQKAELVALTQALRLAEGKDINIYTDSRYAFATAHIHGAIYKQRGWLTSAGKDIKNKEEILALLEAIHLPKRVAIIHCPGHQKGNDPVATGNRRADEAAKQAALSTRVLAETTKPAGKRTADGSEFEKRTADGSEFESPKKKAKVE

SEQ ID NO: 946 - protein, 2092 aa, synthetic construct
  source 1..2092: note = Description of Artificial Sequence: Synthetic polypeptide
MPAAKRVKLDGGDKKYSIGLDIGTNSVGWAVITDEYKVPSKKFKVLGNTDRHSIKKNLIGALLFDSGETAEATRLKRTARRRYTRRKNRICYLQEIFSNEMAKVDDSFFHRLEESFLVEEDKKHERHPIFGNIVDEVAYHEKYPTIYHLRKKLVDSTDKADLRLIYLALAHMIKFRGHFLIEGDLNPDNSDVDKLFIQLVQTYNQLFEENPINASGVDAKAILSARLSKSRRLENLIAQLPGEKKNGLFGNLIALSLGLTPNFKSNFDLAEDAKLQLSKDTYDDDLDNLLAQIGDQYADLFLAAKNLSDAILLSDILRVNTEITKAPLSASMIKRYDEHHQDLTLLKALVRQQLPEKYKEIFFDQSKNGYAGYIDGGASQEEFYKFIKPILEKMDGTEELLVKLNREDLLRKQRTFDNGSIPHQIHLGELHAILRRQEDFYPFLKDNREKIEKILTFRIPYYVGPLARGNSRFAWMTRKSEETITPWNFEEVVDKGASAQSFIERMTNFDKNLPNEKVLPKHSLLYEYFTVYNELTKVKYVTEGMRKPAFLSGEQKKAIVDLLFKTNRKVTVKQLKEDYFKKIECFDSVEISGVEDRFNASLGTYHDLLKIIKDKDFLDNEENEDILEDIVLTLTLFEDREMIEERLKTYAHLFDDKVMKQLKRRRYTGWGRLSRKLINGIRDKQSGKTILDFLKSDGFANRNFMQLIHDDSLTFKEDIQKAQVSGQGDSLHEHIANLAGSPAIKKGILQTVKVVDELVKVMGRHKPENIVIEMARENQTTQKGQKNSRERMKRIEEGIKELGSQILKEHPVENTQLQNEKLYLYYLQNGRDMYVDQELDINRLSDYDVDHIVPQSFLKDDSIDNKVLTRSDKARGKSDNVPSEEVVKKMKNYWRQLLNAKLITQRKFDNLTKAERGGLSELDKAGFIKRQLVETRQITKHVAQILDSRMNTKYDENDKLIREVKVITLKSKLVSDFRKDFQFYKVREINNYHHAHDAYLNAVVGTALIKKYPKLESEFVYGDYKVYDVRKMIAKSEQEIGKATAKYFFYSNIMNFFKTEITLANGEIRKRPLIETNGETGEIVWDKGRDFATVRKVLSMPQVNIVKKTEVQTGGFSKESILPKRNSDKLIARKKDWDPKKYGGFDSPTVAYSVLVVAKVEKGKSKKLKSVKELLGITIMERSSFEKNPIDFLEAKGYKEVKKDLIIKLPKYSLFELENGRKRMLASAGELQKGNELALPSKYVNFLYLASHYEKLKGSPEDNEQKQLFVEQHKHYLDEIIEQISEFSKRVILADANLDKVLSAYNKHRDKPIREQAENIIHLFTLTNLGAPAAFKYFDTTIDRKRYTSTKEVLDATLIHQSITGLYETRIDLSQLGGDGGGGGGSSGGSGGVLNLEEEYRLHEKPVPSSIDPSWLQLFPTVWAERAGMGLANQVPPVVVELRSGASPVAVRQYPMSKEAREGIRPHIQRFLDLGVLVPCQSPWNTPLLPVKKPGTNDYRPVQDLREINKRVQDIHPTVPNPYNLLSSLPPSHTWYSVLDLKDAFFCLKLHPNSQPLFAFEWRDPEKGNTGQLTWTRLPQGFKNSPTLFNEALHRDLAPFRALNPQVVLLQYVDDLLVAAPTYRDCKEGTQKLLQELSKLGYRVSAKKAQLCQKEVTYLGYLLKEGKRWLTPARKATVMKIPPPTTPRQVREFLGKAGFCRLFIPGFASLAAPLYPLTKPSIPFIWTEEHQKAFDRIKEALLSAPALALPDLTKPFTLYVDERAGVARGVLTQTLGPWRRPVAYLSKKLDPVASGWPTCLKAVAAVALLLKDADKLTLGQNVTVIASHSLESIVRQPPDRWMTNARMTHYQSLLLNERVSFAPPAVLNPATLLPVESEATPVHRCSEILAEETGTRRDLKDQPLPGVPAWYTDGSSFIAEGKRRAGAAIVDGKRTVWASSLPEGTSAQKAELVALTQALRLAEGKDINIYTDSRYAFATAHIHGAIYKQRGWLTSAGKDIKNKEEILALLEAIHLPKRVAIIHCPGHQKGNDPVATGNRRADEAAKQAALSTRVLAETTKPAGKRTADGSEFEKRTADGSEFESPKKKAKVE

SEQ ID NO: 947 - protein, 2091 aa, synthetic construct
  source 1..2091: note = Description of Artificial Sequence: Synthetic polypeptide
MPAAKRVKLDGGDKKYSIGLDIGTNSVGWAVITDEYKVPSKKFKVLGNTDRHSIKKNLIGALLFDSGETAEATRLKRTARRRYTRRKNRICYLQEIFSNEMAKVDDSFFHRLEESFLVEEDKKHERHPIFGNIVDEVAYHEKYPTIYHLRKKLVDSTDKADLRLIYLALAHMIKFRGHFLIEGDLNPDNSDVDKLFIQLVQTYNQLFEENPINASGVDAKAILSARLSKSRRLENLIAQLPGEKKNGLFGNLIALSLGLTPNFKSNFDLAEDAKLQLSKDTYDDDLDNLLAQIGDQYADLFLAAKNLSDAILLSDILRVNTEITKAPLSASMIKRYDEHHQDLTLLKALVRQQLPEKYKEIFFDQSKNGYAGYIDGGASQEEFYKFIKPILEKMDGTEELLVKLNREDLLRKQRTFDNGSIPHQIHLGELHAILRRQEDFYPFLKDNREKIEKILTFRIPYYVGPLARGNSRFAWMTRKSEETITPWNFEEVVDKGASAQSFIERMTNFDKNLPNEKVLPKHSLLYEYFTVYNELTKVKYVTEGMRKPAFLSGEQKKAIVDLLFKTNRKVTVKQLKEDYFKKIECFDSVEISGVEDRFNASLGTYHDLLKIIKDKDFLDNEENEDILEDIVLTLTLFEDREMIEERLKTYAHLFDDKVMKQLKRRRYTGWGRLSRKLINGIRDKQSGKTILDFLKSDGFANRNFMQLIHDDSLTFKEDIQKAQVSGQGDSLHEHIANLAGSPAIKKGILQTVKVVDELVKVMGRHKPENIVIEMARENQTTQKGQKNSRERMKRIEEGIKELGSQILKEHPVENTQLQNEKLYLYYLQNGRDMYVDQELDINRLSDYDVDHIVPQSFLKDDSIDNKVLTRSDKARGKSDNVPSEEVVKKMKNYWRQLLNAKLITQRKFDNLTKAERGGLSELDKAGFIKRQLVETRQITKHVAQILDSRMNTKYDENDKLIREVKVITLKSKLVSDFRKDFQFYKVREINNYHHAHDAYLNAVVGTALIKKYPKLESEFVYGDYKVYDVRKMIAKSEQEIGKATAKYFFYSNIMNFFKTEITLANGEIRKRPLIETNGETGEIVWDKGRDFATVRKVLSMPQVNIVKKTEVQTGGFSKESILPKRNSDKLIARKKDWDPKKYGGFDSPTVAYSVLVVAKVEKGKSKKLKSVKELLGITIMERSSFEKNPIDFLEAKGYKEVKKDLIIKLPKYSLFELENGRKRMLASAGELQKGNELALPSKYVNFLYLASHYEKLKGSPEDNEQKQLFVEQHKHYLDEIIEQISEFSKRVILADANLDKVLSAYNKHRDKPIREQAENIIHLFTLTNLGAPAAFKYFDTTIDRKRYTSTKEVLDATLIHQSITGLYETRIDLSQLGGDGGPAPEAAAKGGVLNLEEEYRLHEKPVPSSIDPSWLQLFPTVWAERAGMGLANQVPPVVVELRSGASPVAVRQYPMSKEAREGIRPHIQRFLDLGVLVPCQSPWNTPLLPVKKPGTNDYRPVQDLREINKRVQDIHPTVPNPYNLLSSLPPSHTWYSVLDLKDAFFCLKLHPNSQPLFAFEWRDPEKGNTGQLTWTRLPQGFKNSPTLFNEALHRDLAPFRALNPQVVLLQYVDDLLVAAPTYRDCKEGTQKLLQELSKLGYRVSAKKAQLCQKEVTYLGYLLKEGKRWLTPARKATVMKIPPPTTPRQVREFLGKAGFCRLFIPGFASLAAPLYPLTKPSIPFIWTEEHQKAFDRIKEALLSAPALALPDLTKPFTLYVDERAGVARGVLTQTLGPWRRPVAYLSKKLDPVASGWPTCLKAVAAVALLLKDADKLTLGQNVTVIASHSLESIVRQPPDRWMTNARMTHYQSLLLNERVSFAPPAVLNPATLLPVESEATPVHRCSEILAEETGTRRDLKDQPLPGVPAWYTDGSSFIAEGKRRAGAAIVDGKRTVWASSLPEGTSAQKAELVALTQALRLAEGKDINIYTDSRYAFATAHIHGAIYKQRGWLTSAGKDIKNKEEILALLEAIHLPKRVAIIHCPGHQKGNDPVATGNRRADEAAKQAALSTRVLAETTKPAGKRTADGSEFEKRTADGSEFESPKKKAKVE

SEQ ID NO: 948 - protein, 2094 aa, synthetic construct
  source 1..2094: note = Description of Artificial Sequence: Synthetic polypeptide
MPAAKRVKLDGGDKKYSIGLDIGTNSVGWAVITDEYKVPSKKFKVLGNTDRHSIKKNLIGALLFDSGETAEATRLKRTARRRYTRRKNRICYLQEIFSNEMAKVDDSFFHRLEESFLVEEDKKHERHPIFGNIVDEVAYHEKYPTIYHLRKKLVDSTDKADLRLIYLALAHMIKFRGHFLIEGDLNPDNSDVDKLFIQLVQTYNQLFEENPINASGVDAKAILSARLSKSRRLENLIAQLPGEKKNGLFGNLIALSLGLTPNFKSNFDLAEDAKLQLSKDTYDDDLDNLLAQIGDQYADLFLAAKNLSDAILLSDILRVNTEITKAPLSASMIKRYDEHHQDLTLLKALVRQQLPEKYKEIFFDQSKNGYAGYIDGGASQEEFYKFIKPILEKMDGTEELLVKLNREDLLRKQRTFDNGSIPHQIHLGELHAILRRQEDFYPFLKDNREKIEKILTFRIPYYVGPLARGNSRFAWMTRKSEETITPWNFEEVVDKGASAQSFIERMTNFDKNLPNEKVLPKHSLLYEYFTVYNELTKVKYVTEGMRKPAFLSGEQKKAIVDLLFKTNRKVTVKQLKEDYFKKIECFDSVEISGVEDRFNASLGTYHDLLKIIKDKDFLDNEENEDILEDIVLTLTLFEDREMIEERLKTYAHLFDDKVMKQLKRRRYTGWGRLSRKLINGIRDKQSGKTILDFLKSDGFANRNFMQLIHDDSLTFKEDIQKAQVSGQGDSLHEHIANLAGSPAIKKGILQTVKVVDELVKVMGRHKPENIVIEMARENQTTQKGQKNSRERMKRIEEGIKELGSQILKEHPVENTQLQNEKLYLYYLQNGRDMYVDQELDINRLSDYDVDHIVPQSFLKDDSIDNKVLTRSDKARGKSDNVPSEEVVKKMKNYWRQLLNAKLITQRKFDNLTKAERGGLSELDKAGFIKRQLVETRQITKHVAQILDSRMNTKYDENDKLIREVKVITLKSKLVSDFRKDFQFYKVREINNYHHAHDAYLNAVVGTALIKKYPKLESEFVYGDYKVYDVRKMIAKSEQEIGKATAKYFFYSNIMNFFKTEITLANGEIRKRPLIETNGETGEIVWDKGRDFATVRKVLSMPQVNIVKKTEVQTGGFSKESILPKRNSDKLIARKKDWDPKKYGGFDSPTVAYSVLVVAKVEKGKSKKLKSVKELLGITIMERSSFEKNPIDFLEAKGYKEVKKDLIIKLPKYSLFELENGRKRMLASAGELQKGNELALPSKYVNFLYLASHYEKLKGSPEDNEQKQLFVEQHKHYLDEIIEQISEFSKRVILADANLDKVLSAYNKHRDKPIREQAENIIHLFTLTNLGAPAAFKYFDTTIDRKRYTSTKEVLDATLIHQSITGLYETRIDLSQLGGDGGEAAAKGSSGGSGGVLNLEEEYRLHEKPVPSSIDPSWLQLFPTVWAERAGMGLANQVPPVVVELRSGASPVAVRQYPMSKEAREGIRPHIQRFLDLGVLVPCQSPWNTPLLPVKKPGTNDYRPVQDLREINKRVQDIHPTVPNPYNLLSSLPPSHTWYSVLDLKDAFFCLKLHPNSQPLFAFEWRDPEKGNTGQLTWTRLPQGFKNSPTLFNEALHRDLAPFRALNPQVVLLQYVDDLLVAAPTYRDCKEGTQKLLQELSKLGYRVSAKKAQLCQKEVTYLGYLLKEGKRWLTPARKATVMKIPPPTTPRQVREFLGKAGFCRLFIPGFASLAAPLYPLTKPSIPFIWTEEHQKAFDRIKEALLSAPALALPDLTKPFTLYVDERAGVARGVLTQTLGPWRRPVAYLSKKLDPVASGWPTCLKAVAAVALLLKDADKLTLGQNVTVIASHSLESIVRQPPDRWMTNARMTHYQSLLLNERVSFAPPAVLNPATLLPVESEATPVHRCSEILAEETGTRRDLKDQPLPGVPAWYTDGSSFIAEGKRRAGAAIVDGKRTVWASSLPEGTSAQKAELVALTQALRLAEGKDINIYTDSRYAFATAHIHGAIYKQRGWLTSAGKDIKNKEEILALLEAIHLPKRVAIIHCPGHQKGNDPVATGNRRADEAAKQAALSTRVLAETTKPAGKRTADGSEFEKRTADGSEFESPKKKAKVE

SEQ ID NO: 949 - protein, 2090 aa, synthetic construct
  source 1..2090: note = Description of Artificial Sequence: Synthetic polypeptide
MPAAKRVKLDGGDKKYSIGLDIGTNSVGWAVITDEYKVPSKKFKVLGNTDRHSIKKNLIGALLFDSGETAEATRLKRTARRRYTRRKNRICYLQEIFSNEMAKVDDSFFHRLEESFLVEEDKKHERHPIFGNIVDEVAYHEKYPTIYHLRKKLVDSTDKADLRLIYLALAHMIKFRGHFLIEGDLNPDNSDVDKLFIQLVQTYNQLFEENPINASGVDAKAILSARLSKSRRLENLIAQLPGEKKNGLFGNLIALSLGLTPNFKSNFDLAEDAKLQLSKDTYDDDLDNLLAQIGDQYADLFLAAKNLSDAILLSDILRVNTEITKAPLSASMIKRYDEHHQDLTLLKALVRQQLPEKYKEIFFDQSKNGYAGYIDGGASQEEFYKFIKPILEKMDGTEELLVKLNREDLLRKQRTFDNGSIPHQIHLGELHAILRRQEDFYPFLKDNREKIEKILTFRIPYYVGPLARGNSRFAWMTRKSEETITPWNFEEVVDKGASAQSFIERMTNFDKNLPNEKVLPKHSLLYEYFTVYNELTKVKYVTEGMRKPAFLSGEQKKAIVDLLFKTNRKVTVKQLKEDYFKKIECFDSVEISGVEDRFNASLGTYHDLLKIIKDKDFLDNEENEDILEDIVLTLTLFEDREMIEERLKTYAHLFDDKVMKQLKRRRYTGWGRLSRKLINGIRDKQSGKTILDFLKSDGFANRNFMQLIHDDSLTFKEDIQKAQVSGQGDSLHEHIANLAGSPAIKKGILQTVKVVDELVKVMGRHKPENIVIEMARENQTTQKGQKNSRERMKRIEEGIKELGSQILKEHPVENTQLQNEKLYLYYLQNGRDMYVDQELDINRLSDYDVDHIVPQSFLKDDSIDNKVLTRSDKARGKSDNVPSEEVVKKMKNYWRQLLNAKLITQRKFDNLTKAERGGLSELDKAGFIKRQLVETRQITKHVAQILDSRMNTKYDENDKLIREVKVITLKSKLVSDFRKDFQFYKVREINNYHHAHDAYLNAVVGTALIKKYPKLESEFVYGDYKVYDVRKMIAKSEQEIGKATAKYFFYSNIMNFFKTEITLANGEIRKRPLIETNGETGEIVWDKGRDFATVRKVLSMPQVNIVKKTEVQTGGFSKESILPKRNSDKLIARKKDWDPKKYGGFDSPTVAYSVLVVAKVEKGKSKKLKSVKELLGITIMERSSFEKNPIDFLEAKGYKEVKKDLIIKLPKYSLFELENGRKRMLASAGELQKGNELALPSKYVNFLYLASHYEKLKGSPEDNEQKQLFVEQHKHYLDEIIEQISEFSKRVILADANLDKVLSAYNKHRDKPIREQAENIIHLFTLTNLGAPAAFKYFDTTIDRKRYTSTKEVLDATLIHQSITGLYETRIDLSQLGGDGGPAPAPAPGGVLNLEEEYRLHEKPVPSSIDPSWLQLFPTVWAERAGMGLANQVPPVVVELRSGASPVAVRQYPMSKEAREGIRPHIQRFLDLGVLVPCQSPWNTPLLPVKKPGTNDYRPVQDLREINKRVQDIHPTVPNPYNLLSSLPPSHTWYSVLDLKDAFFCLKLHPNSQPLFAFEWRDPEKGNTGQLTWTRLPQGFKNSPTLFNEALHRDLAPFRALNPQVVLLQYVDDLLVAAPTYRDCKEGTQKLLQELSKLGYRVSAKKAQLCQKEVTYLGYLLKEGKRWLTPARKATVMKIPPPTTPRQVREFLGKAGFCRLFIPGFASLAAPLYPLTKPSIPFIWTEEHQKAFDRIKEALLSAPALALPDLTKPFTLYVDERAGVARGVLTQTLGPWRRPVAYLSKKLDPVASGWPTCLKAVAAVALLLKDADKLTLGQNVTVIASHSLESIVRQPPDRWMTNARMTHYQSLLLNERVSFAPPAVLNPATLLPVESEATPVHRCSEILAEETGTRRDLKDQPLPGVPAWYTDGSSFIAEGKRRAGAAIVDGKRTVWASSLPEGTSAQKAELVALTQALRLAEGKDINIYTDSRYAFATAHIHGAIYKQRGWLTSAGKDIKNKEEILALLEAIHLPKRVAIIHCPGHQKGNDPVATGNRRADEAAKQAALSTRVLAETTKPAGKRTADGSEFEKRTADGSEFESPKKKAKVE

SEQ ID NO: 950 - protein, 2089 aa, synthetic construct
  source 1..2089: note = Description of Artificial Sequence: Synthetic polypeptide
MPAAKRVKLDGGDKKYSIGLDIGTNSVGWAVITDEYKVPSKKFKVLGNTDRHSIKKNLIGALLFDSGETAEATRLKRTARRRYTRRKNRICYLQEIFSNEMAKVDDSFFHRLEESFLVEEDKKHERHPIFGNIVDEVAYHEKYPTIYHLRKKLVDSTDKADLRLIYLALAHMIKFRGHFLIEGDLNPDNSDVDKLFIQLVQTYNQLFEENPINASGVDAKAILSARLSKSRRLENLIAQLPGEKKNGLFGNLIALSLGLTPNFKSNFDLAEDAKLQLSKDTYDDDLDNLLAQIGDQYADLFLAAKNLSDAILLSDILRVNTEITKAPLSASMIKRYDEHHQDLTLLKALVRQQLPEKYKEIFFDQSKNGYAGYIDGGASQEEFYKFIKPILEKMDGTEELLVKLNREDLLRKQRTFDNGSIPHQIHLGELHAILRRQEDFYPFLKDNREKIEKILTFRIPYYVGPLARGNSRFAWMTRKSEETITPWNFEEVVDKGASAQSFIERMTNFDKNLPNEKVLPKHSLLYEYFTVYNELTKVKYVTEGMRKPAFLSGEQKKAIVDLLFKTNRKVTVKQLKEDYFKKIECFDSVEISGVEDRFNASLGTYHDLLKIIKDKDFLDNEENEDILEDIVLTLTLFEDREMIEERLKTYAHLFDDKVMKQLKRRRYTGWGRLSRKLINGIRDKQSGKTILDFLKSDGFANRNFMQLIHDDSLTFKEDIQKAQVSGQGDSLHEHIANLAGSPAIKKGILQTVKVVDELVKVMGRHKPENIVIEMARENQTTQKGQKNSRERMKRIEEGIKELGSQILKEHPVENTQLQNEKLYLYYLQNGRDMYVDQELDINRLSDYDVDHIVPQSFLKDDSIDNKVLTRSDKARGKSDNVPSEEVVKKMKNYWRQLLNAKLITQRKFDNLTKAERGGLSELDKAGFIKRQLVETRQITKHVAQILDSRMNTKYDENDKLIREVKVITLKSKLVSDFRKDFQFYKVREINNYHHAHDAYLNAVVGTALIKKYPKLESEFVYGDYKVYDVRKMIAKSEQEIGKATAKYFFYSNIMNFFKTEITLANGEIRKRPLIETNGETGEIVWDKGRDFATVRKVLSMPQVNIVKKTEVQTGGFSKESILPKRNSDKLIARKKDWDPKKYGGFDSPTVAYSVLVVAKVEKGKSKKLKSVKELLGITIMERSSFEKNPIDFLEAKGYKEVKKDLIIKLPKYSLFELENGRKRMLASAGELQKGNELALPSKYVNFLYLASHYEKLKGSPEDNEQKQLFVEQHKHYLDEIIEQISEFSKRVILADANLDKVLSAYNKHRDKPIREQAENIIHLFTLTNLGAPAAFKYFDTTIDRKRYTSTKEVLDATLIHQSITGLYETRIDLSQLGGDGGGSSGGSGGVLNLEEEYRLHEKPVPSSIDPSWLQLFPTVWAERAGMGLANQVPPVVVELRSGASPVAVRQYPMSKEAREGIRPHIQRFLDLGVLVPCQSPWNTPLLPVKKPGTNDYRPVQDLREINKRVQDIHPTVPNPYNLLSSLPPSHTWYSVLDLKDAFFCLKLHPNSQPLFAFEWRDPEKGNTGQLTWTRLPQGFKNSPTLFNEALHRDLAPFRALNPQVVLLQYVDDLLVAAPTYRDCKEGTQKLLQELSKLGYRVSAKKAQLCQKEVTYLGYLLKEGKRWLTPARKATVMKIPPPTTPRQVREFLGKAGFCRLFIPGFASLAAPLYPLTKPSIPFIWTEEHQKAFDRIKEALLSAPALALPDLTKPFTLYVDERAGVARGVLTQTLGPWRRPVAYLSKKLDPVASGWPTCLKAVAAVALLLKDADKLTLGQNVTVIASHSLESIVRQPPDRWMTNARMTHYQSLLLNERVSFAPPAVLNPATLLPVESEATPVHRCSEILAEETGTRRDLKDQPLPGVPAWYTDGSSFIAEGKRRAGAAIVDGKRTVWASSLPEGTSAQKAELVALTQALRLAEGKDINIYTDSRYAFATAHIHGAIYKQRGWLTSAGKDIKNKEEILALLEAIHLPKRVAIIHCPGHQKGNDPVATGNRRADEAAKQAALSTRVLAETTKPAGKRTADGSEFEKRTADGSEFESPKKKAKVE

SEQ ID NO: 951 - protein, 2131 aa, synthetic construct
  source 1..2131: note = Description of Artificial Sequence: Synthetic polypeptide
MPAAKRVKLDGGDKKYSIGLDIGTNSVGWAVITDEYKVPSKKFKVLGNTDRHSIKKNLIGALLFDSGETAEATRLKRTARRRYTRRKNRICYLQEIFSNEMAKVDDSFFHRLEESFLVEEDKKHERHPIFGNIVDEVAYHEKYPTIYHLRKKLVDSTDKADLRLIYLALAHMIKFRGHFLIEGDLNPDNSDVDKLFIQLVQTYNQLFEENPINASGVDAKAILSARLSKSRRLENLIAQLPGEKKNGLFGNLIALSLGLTPNFKSNFDLAEDAKLQLSKDTYDDDLDNLLAQIGDQYADLFLAAKNLSDAILLSDILRVNTEITKAPLSASMIKRYDEHHQDLTLLKALVRQQLPEKYKEIFFDQSKNGYAGYIDGGASQEEFYKFIKPILEKMDGTEELLVKLNREDLLRKQRTFDNGSIPHQIHLGELHAILRRQEDFYPFLKDNREKIEKILTFRIPYYVGPLARGNSRFAWMTRKSEETITPWNFEEVVDKGASAQSFIERMTNFDKNLPNEKVLPKHSLLYEYFTVYNELTKVKYVTEGMRKPAFLSGEQKKAIVDLLFKTNRKVTVKQLKEDYFKKIECFDSVEISGVEDRFNASLGTYHDLLKIIKDKDFLDNEENEDILEDIVLTLTLFEDREMIEERLKTYAHLFDDKVMKQLKRRRYTGWGRLSRKLINGIRDKQSGKTILDFLKSDGFANRNFMQLIHDDSLTFKEDIQKAQVSGQGDSLHEHIANLAGSPAIKKGILQTVKVVDELVKVMGRHKPENIVIEMARENQTTQKGQKNSRERMKRIEEGIKELGSQILKEHPVENTQLQNEKLYLYYLQNGRDMYVDQELDINRLSDYDVDHIVPQSFLKDDSIDNKVLTRSDKARGKSDNVPSEEVVKKMKNYWRQLLNAKLITQRKFDNLTKAERGGLSELDKAGFIKRQLVETRQITKHVAQILDSRMNTKYDENDKLIREVKVITLKSKLVSDFRKDFQFYKVREINNYHHAHDAYLNAVVGTALIKKYPKLESEFVYGDYKVYDVRKMIAKSEQEIGKATAKYFFYSNIMNFFKTEITLANGEIRKRPLIETNGETGEIVWDKGRDFATVRKVLSMPQVNIVKKTEVQTGGFSKESILPKRNSDKLIARKKDWDPKKYGGFDSPTVAYSVLVVAKVEKGKSKKLKSVKELLGITIMERSSFEKNPIDFLEAKGYKEVKKDLIIKLPKYSLFELENGRKRMLASAGELQKGNELALPSKYVNFLYLASHYEKLKGSPEDNEQKQLFVEQHKHYLDEIIEQISEFSKRVILADANLDKVLSAYNKHRDKPIREQAENIIHLFTLTNLGAPAAFKYFDTTIDRKRYTSTKEVLDATLIHQSITGLYETRIDLSQLGGDGGAEAAAKEAAAKEAAAKEAAAKALEAEAAAKEAAAKEAAAKEAAAKAGGTLNIEDEYRLHETSKEPDVPLGSTWLSDFPQAWAETGGMGLAVRQAPLIIPLKATSTPVSIKQYPMSQEARLGIKPHIQRLLDQGILVPCQSPWNTPLLPVKKPGTNDYRPVQDLREVNKRVEDIHPTVPNPYNLLSGLPPSHQWYTVLDLKDAFFCLRLHPTSQPLFAFEWRDPEMGISGQLTWTRLPQGFKNSPTLFDEALHRDLADFRIQHPDLILLQYVDDLLLAATSEQDCQRGTRALLQTLGNLGYRASAKKAQICQKQVKYLGYLLKEGQRWLTEARKETVMGQPTPKTPRQLREFLGTAGFCRLWIPGFAEMAAPLYPLTKTGTLFNWGPDQQKAYQEIKQALLTAPALGLPDLTKPFELFVDEKQGYAKGVLTQKLGPWRRPVAYLSKKLDPVAAGWPPCLRMVAAIAVLTKDAGKLTMGQPLVILAPHAVEALVKQPPDRWLSNARMTHYQAMLLDTDRVQFGPVVALNPATLLPLPEKEAPHDCLEILAETHGTRPDLTDQPIPDADYTWYTDGSSFLQEGQRRAGAAVTTETEVIWARALPAGTSAQRAELIALTQALKMAEGKKLNVYTDSRYAFATAHVHGEIYRRRGLLTSEGREIKNKNEILALLKALFLPKRLSIIHCPGHQKGNSAEARGNRMADQAAREAAMKAVLETSTLLAGKRTADGSEFEKRTADGSEFESPKKKAKVE

SEQ ID NO: 952 - protein, 2118 aa, synthetic construct
  source 1..2118: note = Description of Artificial Sequence: Synthetic polypeptide
MPAAKRVKLDGGDKKYSIGLDIGTNSVGWAVITDEYKVPSKKFKVLGNTDRHSIKKNLIGALLFDSGETAEATRLKRTARRRYTRRKNRICYLQEIFSNEMAKVDDSFFHRLEESFLVEEDKKHERHPIFGNIVDEVAYHEKYPTIYHLRKKLVDSTDKADLRLIYLALAHMIKFRGHFLIEGDLNPDNSDVDKLFIQLVQTYNQLFEENPINASGVDAKAILSARLSKSRRLENLIAQLPGEKKNGLFGNLIALSLGLTPNFKSNFDLAEDAKLQLSKDTYDDDLDNLLAQIGDQYADLFLAAKNLSDAILLSDILRVNTEITKAPLSASMIKRYDEHHQDLTLLKALVRQQLPEKYKEIFFDQSKNGYAGYIDGGASQEEFYKFIKPILEKMDGTEELLVKLNREDLLRKQRTFDNGSIPHQIHLGELHAILRRQEDFYPFLKDNREKIEKILTFRIPYYVGPLARGNSRFAWMTRKSEETITPWNFEEVVDKGASAQSFIERMTNFDKNLPNEKVLPKHSLLYEYFTVYNELTKVKYVTEGMRKPAFLSGEQKKAIVDLLFKTNRKVTVKQLKEDYFKKIECFDSVEISGVEDRFNASLGTYHDLLKIIKDKDFLDNEENEDILEDIVLTLTLFEDREMIEERLKTYAHLFDDKVMKQLKRRRYTGWGRLSRKLINGIRDKQSGKTILDFLKSDGFANRNFMQLIHDDSLTFKEDIQKAQVSGQGDSLHEHIANLAGSPAIKKGILQTVKVVDELVKVMGRHKPENIVIEMARENQTTQKGQKNSRERMKRIEEGIKELGSQILKEHPVENTQLQNEKLYLYYLQNGRDMYVDQELDINRLSDYDVDHIVPQSFLKDDSIDNKVLTRSDKARGKSDNVPSEEVVKKMKNYWRQLLNAKLITQRKFDNLTKAERGGLSELDKAGFIKRQLVETRQITKHVAQILDSRMNTKYDENDKLIREVKVITLKSKLVSDFRKDFQFYKVREINNYHHAHDAYLNAVVGTALIKKYPKLESEFVYGDYKVYDVRKMIAKSEQEIGKATAKYFFYSNIMNFFKTEITLANGEIRKRPLIETNGETGEIVWDKGRDFATVRKVLSMPQVNIVKKTEVQTGGFSKESILPKRNSDKLIARKKDWDPKKYGGFDSPTVAYSVLVVAKVEKGKSKKLKSVKELLGITIMERSSFEKNPIDFLEAKGYKEVKKDLIIKLPKYSLFELENGRKRMLASAGELQKGNELALPSKYVNFLYLASHYEKLKGSPEDNEQKQLFVEQHKHYLDEIIEQISEFSKRVILADANLDKVLSAYNKHRDKPIREQAENIIHLFTLTNLGAPAAFKYFDTTIDRKRYTSTKEVLDATLIHQSITGLYETRIDLSQLGGDGGSGGSSGGSSGSETPGTSESATPESSGGSSGGSSGGTLNIEDEYRLHETSKEPDVPLGSTWLSDFPQAWAETGGMGLAVRQAPLIIPLKATSTPVSIKQYPMSQEARLGIKPHIQRLLDQGILVPCQSPWNTPLLPVKKPGTNDYRPVQDLREVNKRVEDIHPTVPNPYNLLSGLPPSHQWYTVLDLKDAFFCLRLHPTSQPLFAFEWRDPEMGISGQLTWTRLPQGFKNSPTLFDEALHRDLADFRIQHPDLILLQYVDDLLLAATSEQDCQRGTRALLQTLGNLGYRASAKKAQICQKQVKYLGYLLKEGQRWLTEARKETVMGQPTPKTPRQLREFLGTAGFCRLWIPGFAEMAAPLYPLTKTGTLFNWGPDQQKAYQEIKQALLTAPALGLPDLTKPFELFVDEKQGYAKGVLTQKLGPWRRPVAYLSKKLDPVAAGWPPCLRMVAAIAVLTKDAGKLTMGQPLVILAPHAVEALVKQPPDRWLSNARMTHYQAMLLDTDRVQFGPVVALNPATLLPLPEKEAPHDCLEILAETHGTRPDLTDQPIPDADYTWYTDGSSFLQEGQRRAGAAVTTETEVIWARALPAGTSAQRAELIALTQALKMAEGKKLNVYTDSRYAFATAHVHGEIYRRRGLLTSEGREIKNKNEILALLKALFLPKRLSIIHCPGHQKGNSAEARGNRMADQAAREAAMKAVLETSTLLAGKRTADGSEFEKRTADGSEFESPKKKAKVE

SEQ ID NO: 953 - protein, 2105 aa, synthetic construct
  source 1..2105: note = Description of Artificial Sequence: Synthetic polypeptide
MPAAKRVKLDGGDKKYSIGLDIGTNSVGWAVITDEYKVPSKKFKVLGNTDRHSIKKNLIGALLFDSGETAEATRLKRTARRRYTRRKNRICYLQEIFSNEMAKVDDSFFHRLEESFLVEEDKKHERHPIFGNIVDEVAYHEKYPTIYHLRKKLVDSTDKADLRLIYLALAHMIKFRGHFLIEGDLNPDNSDVDKLFIQLVQTYNQLFEENPINASGVDAKAILSARLSKSRRLENLIAQLPGEKKNGLFGNLIALSLGLTPNFKSNFDLAEDAKLQLSKDTYDDDLDNLLAQIGDQYADLFLAAKNLSDAILLSDILRVNTEITKAPLSASMIKRYDEHHQDLTLLKALVRQQLPEKYKEIFFDQSKNGYAGYIDGGASQEEFYKFIKPILEKMDGTEELLVKLNREDLLRKQRTFDNGSIPHQIHLGELHAILRRQEDFYPFLKDNREKIEKILTFRIPYYVGPLARGNSRFAWMTRKSEETITPWNFEEVVDKGASAQSFIERMTNFDKNLPNEKVLPKHSLLYEYFTVYNELTKVKYVTEGMRKPAFLSGEQKKAIVDLLFKTNRKVTVKQLKEDYFKKIECFDSVEISGVEDRFNASLGTYHDLLKIIKDKDFLDNEENEDILEDIVLTLTLFEDREMIEERLKTYAHLFDDKVMKQLKRRRYTGWGRLSRKLINGIRDKQSGKTILDFLKSDGFANRNFMQLIHDDSLTFKEDIQKAQVSGQGDSLHEHIANLAGSPAIKKGILQTVKVVDELVKVMGRHKPENIVIEMARENQTTQKGQKNSRERMKRIEEGIKELGSQILKEHPVENTQLQNEKLYLYYLQNGRDMYVDQELDINRLSDYDVDHIVPQSFLKDDSIDNKVLTRSDKARGKSDNVPSEEVVKKMKNYWRQLLNAKLITQRKFDNLTKAERGGLSELDKAGFIKRQLVETRQITKHVAQILDSRMNTKYDENDKLIREVKVITLKSKLVSDFRKDFQFYKVREINNYHHAHDAYLNAVVGTALIKKYPKLESEFVYGDYKVYDVRKMIAKSEQEIGKATAKYFFYSNIMNFFKTEITLANGEIRKRPLIETNGETGEIVWDKGRDFATVRKVLSMPQVNIVKKTEVQTGGFSKESILPKRNSDKLIARKKDWDPKKYGGFDSPTVAYSVLVVAKVEKGKSKKLKSVKELLGITIMERSSFEKNPIDFLEAKGYKEVKKDLIIKLPKYSLFELENGRKRMLASAGELQKGNELALPSKYVNFLYLASHYEKLKGSPEDNEQKQLFVEQHKHYLDEIIEQISEFSKRVILADANLDKVLSAYNKHRDKPIREQAENIIHLFTLTNLGAPAAFKYFDTTIDRKRYTSTKEVLDATLIHQSITGLYETRIDLSQLGGDGGGGGGSGGGGSGGGGSGGGGSGGTLNIEDEYRLHETSKEPDVPLGSTWLSDFPQAWAETGGMGLAVRQAPLIIPLKATSTPVSIKQYPMSQEARLGIKPHIQRLLDQGILVPCQSPWNTPLLPVKKPGTNDYRPVQDLREVNKRVEDIHPTVPNPYNLLSGLPPSHQWYTVLDLKDAFFCLRLHPTSQPLFAFEWRDPEMGISGQLTWTRLPQGFKNSPTLFDEALHRDLADFRIQHPDLILLQYVDDLLLAATSEQDCQRGTRALLQTLGNLGYRASAKKAQICQKQVKYLGYLLKEGQRWLTEARKETVMGQPTPKTPRQLREFLGTAGFCRLWIPGFAEMAAPLYPLTKTGTLFNWGPDQQKAYQEIKQALLTAPALGLPDLTKPFELFVDEKQGYAKGVLTQKLGPWRRPVAYLSKKLDPVAAGWPPCLRMVAAIAVLTKDAGKLTMGQPLVILAPHAVEALVKQPPDRWLSNARMTHYQAMLLDTDRVQFGPVVALNPATLLPLPEKEAPHDCLEILAETHGTRPDLTDQPIPDADYTWYTDGSSFLQEGQRRAGAAVTTETEVIWARALPAGTSAQRAELIALTQALKMAEGKKLNVYTDSRYAFATAHVHGEIYRRRGLLTSEGREIKNKNEILALLKALFLPKRLSIIHCPGHQKGNSAEARGNRMADQAAREAAMKAVLETSTLLAGKRTADGSEFEKRTADGSEFESPKKKAKVE

SEQ ID NO: 954 - protein, 2093 aa, synthetic construct
  source 1..2093: note = Description of Artificial Sequence: Synthetic polypeptide
MPAAKRVKLDGGDKKYSIGLDIGTNSVGWAVITDEYKVPSKKFKVLGNTDRHSIKKNLIGALLFDSGETAEATRLKRTARRRYTRRKNRICYLQEIFSNEMAKVDDSFFHRLEESFLVEEDKKHERHPIFGNIVDEVAYHEKYPTIYHLRKKLVDSTDKADLRLIYLALAHMIKFRGHFLIEGDLNPDNSDVDKLFIQLVQTYNQLFEENPINASGVDAKAILSARLSKSRRLENLIAQLPGEKKNGLFGNLIALSLGLTPNFKSNFDLAEDAKLQLSKDTYDDDLDNLLAQIGDQYADLFLAAKNLSDAILLSDILRVNTEITKAPLSASMIKRYDEHHQDLTLLKALVRQQLPEKYKEIFFDQSKNGYAGYIDGGASQEEFYKFIKPILEKMDGTEELLVKLNREDLLRKQRTFDNGSIPHQIHLGELHAILRRQEDFYPFLKDNREKIEKILTFRIPYYVGPLARGNSRFAWMTRKSEETITPWNFEEVVDKGASAQSFIERMTNFDKNLPNEKVLPKHSLLYEYFTVYNELTKVKYVTEGMRKPAFLSGEQKKAIVDLLFKTNRKVTVKQLKEDYFKKIECFDSVEISGVEDRFNASLGTYHDLLKIIKDKDFLDNEENEDILEDIVLTLTLFEDREMIEERLKTYAHLFDDKVMKQLKRRRYTGWGRLSRKLINGIRDKQSGKTILDFLKSDGFANRNFMQLIHDDSLTFKEDIQKAQVSGQGDSLHEHIANLAGSPAIKKGILQTVKVVDELVKVMGRHKPENIVIEMARENQTTQKGQKNSRERMKRIEEGIKELGSQILKEHPVENTQLQNEKLYLYYLQNGRDMYVDQELDINRLSDYDVDHIVPQSFLKDDSIDNKVLTRSDKARGKSDNVPSEEVVKKMKNYWRQLLNAKLITQRKFDNLTKAERGGLSELDKAGFIKRQLVETRQITKHVAQILDSRMNTKYDENDKLIREVKVITLKSKLVSDFRKDFQFYKVREINNYHHAHDAYLNAVVGTALIKKYPKLESEFVYGDYKVYDVRKMIAKSEQEIGKATAKYFFYSNIMNFFKTEITLANGEIRKRPLIETNGETGEIVWDKGRDFATVRKVLSMPQVNIVKKTEVQTGGFSKESILPKRNSDKLIARKKDWDPKKYGGFDSPTVAYSVLVVAKVEKGKSKKLKSVKELLGITIMERSSFEKNPIDFLEAKGYKEVKKDLIIKLPKYSLFELENGRKRMLASAGELQKGNELALPSKYVNFLYLASHYEKLKGSPEDNEQKQLFVEQHKHYLDEIIEQISEFSKRVILADANLDKVLSAYNKHRDKPIREQAENIIHLFTLTNLGAPAAFKYFDTTIDRKRYTSTKEVLDATLIHQSITGLYETRIDLSQLGGDGGGSSEAAAKGGTLNIEDEYRLHETSKEPDVPLGSTWLSDFPQAWAETGGMGLAVRQAPLIIPLKATSTPVSIKQYPMSQEARLGIKPHIQRLLDQGILVPCQSPWNTPLLPVKKPGTNDYRPVQDLREVNKRVEDIHPTVPNPYNLLSGLPPSHQWYTVLDLKDAFFCLRLHPTSQPLFAFEWRDPEMGISGQLTWTRLPQGFKNSPTLFDEALHRDLADFRIQHPDLILLQYVDDLLLAATSEQDCQRGTRALLQTLGNLGYRASAKKAQICQKQVKYLGYLLKEGQRWLTEARKETVMGQPTPKTPRQLREFLGTAGFCRLWIPGFAEMAAPLYPLTKTGTLFNWGPDQQKAYQEIKQALLTAPALGLPDLTKPFELFVDEKQGYAKGVLTQKLGPWRRPVAYLSKKLDPVAAGWPPCLRMVAAIAVLTKDAGKLTMGQPLVILAPHAVEALVKQPPDRWLSNARMTHYQAMLLDTDRVQFGPVVALNPATLLPLPEKEAPHDCLEILAETHGTRPDLTDQPIPDADYTWYTDGSSFLQEGQRRAGAAVTTETEVIWARALPAGTSAQRAELIALTQALKMAEGKKLNVYTDSRYAFATAHVHGEIYRRRGLLTSEGREIKNKNEILALLKALFLPKRLSIIHCPGHQKGNSAEARGNRMADQAAREAAMKAVLETSTLLAGKRTADGSEFEKRTADGSEFESPKKKAKVE

SEQ ID NO: 955 - protein, 2096 aa, synthetic construct
  source 1..2096: note = Description of Artificial Sequence: Synthetic polypeptide
MPAAKRVKLDGGDKKYSIGLDIGTNSVGWAVITDEYKVPSKKFKVLGNTDRHSIKKNLIGALLFDSGETAEATRLKRTARRRYTRRKNRICYLQEIFSNEMAKVDDSFFHRLEESFLVEEDKKHERHPIFGNIVDEVAYHEKYPTIYHLRKKLVDSTDKADLRLIYLALAHMIKFRGHFLIEGDLNPDNSDVDKLFIQLVQTYNQLFEENPINASGVDAKAILSARLSKSRRLENLIAQLPGEKKNGLFGNLIALSLGLTPNFKSNFDLAEDAKLQLSKDTYDDDLDNLLAQIGDQYADLFLAAKNLSDAILLSDILRVNTEITKAPLSASMIKRYDEHHQDLTLLKALVRQQLPEKYKEIFFDQSKNGYAGYIDGGASQEEFYKFIKPILEKMDGTEELLVKLNREDLLRKQRTFDNGSIPHQIHLGELHAILRRQEDFYPFLKDNREKIEKILTFRIPYYVGPLARGNSRFAWMTRKSEETITPWNFEEVVDKGASAQSFIERMTNFDKNLPNEKVLPKHSLLYEYFTVYNELTKVKYVTEGMRKPAFLSGEQKKAIVDLLFKTNRKVTVKQLKEDYFKKIECFDSVEISGVEDRFNASLGTYHDLLKIIKDKDFLDNEENEDILEDIVLTLTLFEDREMIEERLKTYAHLFDDKVMKQLKRRRYTGWGRLSRKLINGIRDKQSGKTILDFLKSDGFANRNFMQLIHDDSLTFKEDIQKAQVSGQGDSLHEHIANLAGSPAIKKGILQTVKVVDELVKVMGRHKPENIVIEMARENQTTQKGQKNSRERMKRIEEGIKELGSQILKEHPVENTQLQNEKLYLYYLQNGRDMYVDQELDINRLSDYDVDHIVPQSFLKDDSIDNKVLTRSDKARGKSDNVPSEEVVKKMKNYWRQLLNAKLITQRKFDNLTKAERGGLSELDKAGFIKRQLVETRQITKHVAQILDSRMNTKYDENDKLIREVKVITLKSKLVSDFRKDFQFYKVREINNYHHAHDAYLNAVVGTALIKKYPKLESEFVYGDYKVYDVRKMIAKSEQEIGKATAKYFFYSNIMNFFKTEITLANGEIRKRPLIETNGETGEIVWDKGRDFATVRKVLSMPQVNIVKKTEVQTGGFSKESILPKRNSDKLIARKKDWDPKKYGGFDSPTVAYSVLVVAKVEKGKSKKLKSVKELLGITIMERSSFEKNPIDFLEAKGYKEVKKDLIIKLPKYSLFELENGRKRMLASAGELQKGNELALPSKYVNFLYLASHYEKLKGSPEDNEQKQLFVEQHKHYLDEIIEQISEFSKRVILADANLDKVLSAYNKHRDKPIREQAENIIHLFTLTNLGAPAAFKYFDTTIDRKRYTSTKEVLDATLIHQSITGLYETRIDLSQLGGDGGEAAAKGGGGSSGGTLNIEDEYRLHETSKEPDVPLGSTWLSDFPQAWAETGGMGLAVRQAPLIIPLKATSTPVSIKQYPMSQEARLGIKPHIQRLLDQGILVPCQSPWNTPLLPVKKPGTNDYRPVQDLREVNKRVEDIHPTVPNPYNLLSGLPPSHQWYTVLDLKDAFFCLRLHPTSQPLFAFEWRDPEMGISGQLTWTRLPQGFKNSPTLFDEALHRDLADFRIQHPDLILLQYVDDLLLAATSEQDCQRGTRALLQTLGNLGYRASAKKAQICQKQVKYLGYLLKEGQRWLTEARKETVMGQPTPKTPRQLREFLGTAGFCRLWIPGFAEMAAPLYPLTKTGTLFNWGPDQQKAYQEIKQALLTAPALGLPDLTKPFELFVDEKQGYAKGVLTQKLGPWRRPVAYLSKKLDPVAAGWPPCLRMVAAIAVLTKDAGKLTMGQPLVILAPHAVEALVKQPPDRWLSNARMTHYQAMLLDTDRVQFGPVVALNPATLLPLPEKEAPHDCLEILAETHGTRPDLTDQPIPDADYTWYTDGSSFLQEGQRRAGAAVTTETEVIWARALPAGTSAQRAELIALTQALKMAEGKKLNVYTDSRYAFATAHVHGEIYRRRGLLTSEGREIKNKNEILALLKALFLPKRLSIIHCPGHQKGNSAEARGNRMADQAAREAAMKAVLETSTLLAGKRTADGSEFEKRTADGSEFESPKKKAKVE

SEQ ID NO: 956 - protein, 2092 aa, synthetic construct
  source 1..2092: note = Description of Artificial Sequence: Synthetic polypeptide
MPAAKRVKLDGGDKKYSIGLDIGTNSVGWAVITDEYKVPSKKFKVLGNTDRHSIKKNLIGALLFDSGETAEATRLKRTARRRYTRRKNRICYLQEIFSNEMAKVDDSFFHRLEESFLVEEDKKHERHPIFGNIVDEVAYHEKYPTIYHLRKKLVDSTDKADLRLIYLALAHMIKFRGHFLIEGDLNPDNSDVDKLFIQLVQTYNQLFEENPINASGVDAKAILSARLSKSRRLENLIAQLPGEKKNGLFGNLIALSLGLTPNFKSNFDLAEDAKLQLSKDTYDDDLDNLLAQIGDQYADLFLAAKNLSDAILLSDILRVNTEITKAPLSASMIKRYDEHHQDLTLLKALVRQQLPEKYKEIFFDQSKNGYAGYIDGGASQEEFYKFIKPILEKMDGTEELLVKLNREDLLRKQRTFDNGSIPHQIHLGELHAILRRQEDFYPFLKDNREKIEKILTFRIPYYVGPLARGNSRFAWMTRKSEETITPWNFEEVVDKGASAQSFIERMTNFDKNLPNEKVLPKHSLLYEYFTVYNELTKVKYVTEGMRKPAFLSGEQKKAIVDLLFKTNRKVTVKQLKEDYFKKIECFDSVEISGVEDRFNASLGTYHDLLKIIKDKDFLDNEENEDILEDIVLTLTLFEDREMIEERLKTYAHLFDDKVMKQLKRRRYTGWGRLSRKLINGIRDKQSGKTILDFLKSDGFANRNFMQLIHDDSLTFKEDIQKAQVSGQGDSLHEHIANLAGSPAIKKGILQTVKVVDELVKVMGRHKPENIVIEMARENQTTQKGQKNSRERMKRIEEGIKELGSQILKEHPVENTQLQNEKLYLYYLQNGRDMYVDQELDINRLSDYDVDHIVPQSFLKDDSIDNKVLTRSDKARGKSDNVPSEEVVKKMKNYWRQLLNAKLITQRKFDNLTKAERGGLSELDKAGFIKRQLVETRQITKHVAQILDSRMNTKYDENDKLIREVKVITLKSKLVSDFRKDFQFYKVREINNYHHAHDAYLNAVVGTALIKKYPKLESEFVYGDYKVYDVRKMIAKSEQEIGKATAKYFFYSNIMNFFKTEITLANGEIRKRPLIETNGETGEIVWDKGRDFATVRKVLSMPQVNIVKKTEVQTGGFSKESILPKRNSDKLIARKKDWDPKKYGGFDSPTVAYSVLVVAKVEKGKSKKLKSVKELLGITIMERSSFEKNPIDFLEAKGYKEVKKDLIIKLPKYSLFELENGRKRMLASAGELQKGNELALPSKYVNFLYLASHYEKLKGSPEDNEQKQLFVEQHKHYLDEIIEQISEFSKRVILADANLDKVLSAYNKHRDKPIREQAENIIHLFTLTNLGAPAAFKYFDTTIDRKRYTSTKEVLDATLIHQSITGLYETRIDLSQLGGDGGGGGGGGGGGTLNIEDEYRLHETSKEPDVPLGSTWLSDFPQAWAETGGMGLAVRQAPLIIPLKATSTPVSIKQYPMSQEARLGIKPHIQRLLDQGILVPCQSPWNTPLLPVKKPGTNDYRPVQDLREVNKRVEDIHPTVPNPYNLLSGLPPSHQWYTVLDLKDAFFCLRLHPTSQPLFAFEWRDPEMGISGQLTWTRLPQGFKNSPTLFDEALHRDLADFRIQHPDLILLQYVDDLLLAATSEQDCQRGTRALLQTLGNLGYRASAKKAQICQKQVKYLGYLLKEGQRWLTEARKETVMGQPTPKTPRQLREFLGTAGFCRLWIPGFAEMAAPLYPLTKTGTLFNWGPDQQKAYQEIKQALLTAPALGLPDLTKPFELFVDEKQGYAKGVLTQKLGPWRRPVAYLSKKLDPVAAGWPPCLRMVAAIAVLTKDAGKLTMGQPLVILAPHAVEALVKQPPDRWLSNARMTHYQAMLLDTDRVQFGPVVALNPATLLPLPEKEAPHDCLEILAETHGTRPDLTDQPIPDADYTWYTDGSSFLQEGQRRAGAAVTTETEVIWARALPAGTSAQRAELIALTQALKMAEGKKLNVYTDSRYAFATAHVHGEIYRRRGLLTSEGREIKNKNEILALLKALFLPKRLSIIHCPGHQKGNSAEARGNRMADQAAREAAMKAVLETSTLLAGKRTADGSEFEKRTADGSEFESPKKKAKVE

SEQ ID NO: 957 - protein, 2094 aa, synthetic construct
  source 1..2094: note = Description of Artificial Sequence: Synthetic polypeptide
MPAAKRVKLDGGDKKYSIGLDIGTNSVGWAVITDEYKVPSKKFKVLGNTDRHSIKKNLIGALLFDSGETAEATRLKRTARRRYTRRKNRICYLQEIFSNEMAKVDDSFFHRLEESFLVEEDKKHERHPIFGNIVDEVAYHEKYPTIYHLRKKLVDSTDKADLRLIYLALAHMIKFRGHFLIEGDLNPDNSDVDKLFIQLVQTYNQLFEENPINASGVDAKAILSARLSKSRRLENLIAQLPGEKKNGLFGNLIALSLGLTPNFKSNFDLAEDAKLQLSKDTYDDDLDNLLAQIGDQYADLFLAAKNLSDAILLSDILRVNTEITKAPLSASMIKRYDEHHQDLTLLKALVRQQLPEKYKEIFFDQSKNGYAGYIDGGASQEEFYKFIKPILEKMDGTEELLVKLNREDLLRKQRTFDNGSIPHQIHLGELHAILRRQEDFYPFLKDNREKIEKILTFRIPYYVGPLARGNSRFAWMTRKSEETITPWNFEEVVDKGASAQSFIERMTNFDKNLPNEKVLPKHSLLYEYFTVYNELTKVKYVTEGMRKPAFLSGEQKKAIVDLLFKTNRKVTVKQLKEDYFKKIECFDSVEISGVEDRFNASLGTYHDLLKIIKDKDFLDNEENEDILEDIVLTLTLFEDREMIEERLKTYAHLFDDKVMKQLKRRRYTGWGRLSRKLINGIRDKQSGKTILDFLKSDGFANRNFMQLIHDDSLTFKEDIQKAQVSGQGDSLHEHIANLAGSPAIKKGILQTVKVVDELVKVMGRHKPENIVIEMARENQTTQKGQKNSRERMKRIEEGIKELGSQILKEHPVENTQLQNEKLYLYYLQNGRDMYVDQELDINRLSDYDVDHIVPQSFLKDDSIDNKVLTRSDKARGKSDNVPSEEVVKKMKNYWRQLLNAKLITQRKFDNLTKAERGGLSELDKAGFIKRQLVETRQITKHVAQILDSRMNTKYDENDKLIREVKVITLKSKLVSDFRKDFQFYKVREINNYHHAHDAYLNAVVGTALIKKYPKLESEFVYGDYKVYDVRKMIAKSEQEIGKATAKYFFYSNIMNFFKTEITLANGEIRKRPLIETNGETGEIVWDKGRDFATVRKVLSMPQVNIVKKTEVQTGGFSKESILPKRNSDKLIARKKDWDPKKYGGFDSPTVAYSVLVVAKVEKGKSKKLKSVKELLGITIMERSSFEKNPIDFLEAKGYKEVKKDLIIKLPKYSLFELENGRKRMLASAGELQKGNELALPSKYVNFLYLASHYEKLKGSPEDNEQKQLFVEQHKHYLDEIIEQISEFSKRVILADANLDKVLSAYNKHRDKPIREQAENIIHLFTLTNLGAPAAFKYFDTTIDRKRYTSTKEVLDATLIHQSITGLYETRIDLSQLGGDGGGSSGGSGGGGGTLNIEDEYRLHETSKEPDVPLGSTWLSDFPQAWAETGGMGLAVRQAPLIIPLKATSTPVSIKQYPMSQEARLGIKPHIQRLLDQGILVPCQSPWNTPLLPVKKPGTNDYRPVQDLREVNKRVEDIHPTVPNPYNLLSGLPPSHQWYTVLDLKDAFFCLRLHPTSQPLFAFEWRDPEMGISGQLTWTRLPQGFKNSPTLFDEALHRDLADFRIQHPDLILLQYVDDLLLAATSEQDCQRGTRALLQTLGNLGYRASAKKAQICQKQVKYLGYLLKEGQRWLTEARKETVMGQPTPKTPRQLREFLGTAGFCRLWIPGFAEMAAPLYPLTKTGTLFNWGPDQQKAYQEIKQALLTAPALGLPDLTKPFELFVDEKQGYAKGVLTQKLGPWRRPVAYLSKKLDPVAAGWPPCLRMVAAIAVLTKDAGKLTMGQPLVILAPHAVEALVKQPPDRWLSNARMTHYQAMLLDTDRVQFGPVVALNPATLLPLPEKEAPHDCLEILAETHGTRPDLTDQPIPDADYTWYTDGSSFLQEGQRRAGAAVTTETEVIWARALPAGTSAQRAELIALTQALKMAEGKKLNVYTDSRYAFATAHVHGEIYRRRGLLTSEGREIKNKNEILALLKALFLPKRLSIIHCPGHQKGNSAEARGNRMADQAAREAAMKAVLETSTLLAGKRTADGSEFEKRTADGSEFESPKKKAKVE

SEQ ID NO: 958 - protein, 2103 aa, synthetic construct
  source 1..2103: note = Description of Artificial Sequence: Synthetic polypeptide
MPAAKRVKLDGGDKKYSIGLDIGTNSVGWAVITDEYKVPSKKFKVLGNTDRHSIKKNLIGALLFDSGETAEATRLKRTARRRYTRRKNRICYLQEIFSNEMAKVDDSFFHRLEESFLVEEDKKHERHPIFGNIVDEVAYHEKYPTIYHLRKKLVDSTDKADLRLIYLALAHMIKFRGHFLIEGDLNPDNSDVDKLFIQLVQTYNQLFEENPINASGVDAKAILSARLSKSRRLENLIAQLPGEKKNGLFGNLIALSLGLTPNFKSNFDLAEDAKLQLSKDTYDDDLDNLLAQIGDQYADLFLAAKNLSDAILLSDILRVNTEITKAPLSASMIKRYDEHHQDLTLLKALVRQQLPEKYKEIFFDQSKNGYAGYIDGGASQEEFYKFIKPILEKMDGTEELLVKLNREDLLRKQRTFDNGSIPHQIHLGELHAILRRQEDFYPFLKDNREKIEKILTFRIPYYVGPLARGNSRFAWMTRKSEETITPWNFEEVVDKGASAQSFIERMTNFDKNLPNEKVLPKHSLLYEYFTVYNELTKVKYVTEGMRKPAFLSGEQKKAIVDLLFKTNRKVTVKQLKEDYFKKIECFDSVEISGVEDRFNASLGTYHDLLKIIKDKDFLDNEENEDILEDIVLTLTLFEDREMIEERLKTYAHLFDDKVMKQLKRRRYTGWGRLSRKLINGIRDKQSGKTILDFLKSDGFANRNFMQLIHDDSLTFKEDIQKAQVSGQGDSLHEHIANLAGSPAIKKGILQTVKVVDELVKVMGRHKPENIVIEMARENQTTQKGQKNSRERMKRIEEGIKELGSQILKEHPVENTQLQNEKLYLYYLQNGRDMYVDQELDINRLSDYDVDHIVPQSFLKDDSIDNKVLTRSDKARGKSDNVPSEEVVKKMKNYWRQLLNAKLITQRKFDNLTKAERGGLSELDKAGFIKRQLVETRQITKHVAQILDSRMNTKYDENDKLIREVKVITLKSKLVSDFRKDFQFYKVREINNYHHAHDAYLNAVVGTALIKKYPKLESEFVYGDYKVYDVRKMIAKSEQEIGKATAKYFFYSNIMNFFKTEITLANGEIRKRPLIETNGETGEIVWDKGRDFATVRKVLSMPQVNIVKKTEVQTGGFSKESILPKRNSDKLIARKKDWDPKKYGGFDSPTVAYSVLVVAKVEKGKSKKLKSVKELLGITIMERSSFEKNPIDFLEAKGYKEVKKDLIIKLPKYSLFELENGRKRMLASAGELQKGNELALPSKYVNFLYLASHYEKLKGSPEDNEQKQLFVEQHKHYLDEIIEQISEFSKRVILADANLDKVLSAYNKHRDKPIREQAENIIHLFTLTNLGAPAAFKYFDTTIDRKRYTSTKEVLDATLIHQSITGLYETRIDLSQLGGDGGGGSGGSGGSGGSGGSGGSGGTLNIEDEYRLHETSKEPDVPLGSTWLSDFPQAWAETGGMGLAVRQAPLIIPLKATSTPVSIKQYPMSQEARLGIKPHIQRLLDQGILVPCQSPWNTPLLPVKKPGTNDYRPVQDLREVNKRVEDIHPTVPNPYNLLSGLPPSHQWYTVLDLKDAFFCLRLHPTSQPLFAFEWRDPEMGISGQLTWTRLPQGFKNSPTLFNEALHRDLADFRIQHPDLILLQYVDDLLLAATSEQDCQRGTRALLQTLGNLGYRASAKKAQICQKQVKYLGYLLKEGQRWLTEARKETVMGQPTPKTPRQLREFLGTAGFCRLWIPGFAEMAAPLYPLTKPGTLFNWGPDQQKAYQEIKQALLTAPALGLPDLTKPFELFVDEKQGYAKGVLTQKLGPWRRPVAYLSKKLDPVAAGWPPCLRMVAAIAVLTKDAGKLTMGQPLVILAPHAVEALVKQPPDRWLSNARMTHYQAMLLDTDRVQFGPVVALNPATLLPLPEKEAPHDCLEILAETHGTRPDLTDQPIPDADYTWYTDGSSFLQEGQRRAGAAVTTETEVIWARALPAGTSAQRAELIALTQALKMAEGKKLNVYTDSRYAFATAHVHGEIYRRRGWLTSEGREIKNKNEILALLKALFLPKRLSIIHCPGHQKGNSAEARGNRMADQAAREAAMKAVLETSTLLAGKRTADGSEFEKRTADGSEFESPKKKAKVE

SEQ ID NO: 959 - protein, 2094 aa, synthetic construct
  source 1..2094: note = Description of Artificial Sequence: Synthetic polypeptide
MPAAKRVKLDGGDKKYSIGLDIGTNSVGWAVITDEYKVPSKKFKVLGNTDRHSIKKNLIGALLFDSGETAEATRLKRTARRRYTRRKNRICYLQEIFSNEMAKVDDSFFHRLEESFLVEEDKKHERHPIFGNIVDEVAYHEKYPTIYHLRKKLVDSTDKADLRLIYLALAHMIKFRGHFLIEGDLNPDNSDVDKLFIQLVQTYNQLFEENPINASGVDAKAILSARLSKSRRLENLIAQLPGEKKNGLFGNLIALSLGLTPNFKSNFDLAEDAKLQLSKDTYDDDLDNLLAQIGDQYADLFLAAKNLSDAILLSDILRVNTEITKAPLSASMIKRYDEHHQDLTLLKALVRQQLPEKYKEIFFDQSKNGYAGYIDGGASQEEFYKFIKPILEKMDGTEELLVKLNREDLLRKQRTFDNGSIPHQIHLGELHAILRRQEDFYPFLKDNREKIEKILTFRIPYYVGPLARGNSRFAWMTRKSEETITPWNFEEVVDKGASAQSFIERMTNFDKNLPNEKVLPKHSLLYEYFTVYNELTKVKYVTEGMRKPAFLSGEQKKAIVDLLFKTNRKVTVKQLKEDYFKKIECFDSVEISGVEDRFNASLGTYHDLLKIIKDKDFLDNEENEDILEDIVLTLTLFEDREMIEERLKTYAHLFDDKVMKQLKRRRYTGWGRLSRKLINGIRDKQSGKTILDFLKSDGFANRNFMQLIHDDSLTFKEDIQKAQVSGQGDSLHEHIANLAGSPAIKKGILQTVKVVDELVKVMGRHKPENIVIEMARENQTTQKGQKNSRERMKRIEEGIKELGSQILKEHPVENTQLQNEKLYLYYLQNGRDMYVDQELDINRLSDYDVDHIVPQSFLKDDSIDNKVLTRSDKARGKSDNVPSEEVVKKMKNYWRQLLNAKLITQRKFDNLTKAERGGLSELDKAGFIKRQLVETRQITKHVAQILDSRMNTKYDENDKLIREVKVITLKSKLVSDFRKDFQFYKVREINNYHHAHDAYLNAVVGTALIKKYPKLESEFVYGDYKVYDVRKMIAKSEQEIGKATAKYFFYSNIMNFFKTEITLANGEIRKRPLIETNGETGEIVWDKGRDFATVRKVLSMPQVNIVKKTEVQTGGFSKESILPKRNSDKLIARKKDWDPKKYGGFDSPTVAYSVLVVAKVEKGKSKKLKSVKELLGITIMERSSFEKNPIDFLEAKGYKEVKKDLIIKLPKYSLFELENGRKRMLASAGELQKGNELALPSKYVNFLYLASHYEKLKGSPEDNEQKQLFVEQHKHYLDEIIEQISEFSKRVILADANLDKVLSAYNKHRDKPIREQAENIIHLFTLTNLGAPAAFKYFDTTIDRKRYTSTKEVLDATLIHQSITGLYETRIDLSQLGGDGGGSSGSSGSSGGTLNIEDEYRLHETSKEPDVPLGSTWLSDFPQAWAETGGMGLAVRQAPLIIPLKATSTPVSIKQYPMSQEARLGIKPHIQRLLDQGILVPCQSPWNTPLLPVKKPGTNDYRPVQDLREVNKRVEDIHPTVPNPYNLLSGLPPSHQWYTVLDLKDAFFCLRLHPTSQPLFAFEWRDPEMGISGQLTWTRLPQGFKNSPTLFNEALHRDLADFRIQHPDLILLQYVDDLLLAATSEQDCQRGTRALLQTLGNLGYRASAKKAQICQKQVKYLGYLLKEGQRWLTEARKETVMGQPTPKTPRQLREFLGTAGFCRLWIPGFAEMAAPLYPLTKPGTLFNWGPDQQKAYQEIKQALLTAPALGLPDLTKPFELFVDEKQGYAKGVLTQKLGPWRRPVAYLSKKLDPVAAGWPPCLRMVAAIAVLTKDAGKLTMGQPLVILAPHAVEALVKQPPDRWLSNARMTHYQAMLLDTDRVQFGPVVALNPATLLPLPEKEAPHDCLEILAETHGTRPDLTDQPIPDADYTWYTDGSSFLQEGQRRAGAAVTTETEVIWARALPAGTSAQRAELIALTQALKMAEGKKLNVYTDSRYAFATAHVHGEIYRRRGWLTSEGREIKNKNEILALLKALFLPKRLSIIHCPGHQKGNSAEARGNRMADQAAREAAMKAVLETSTLLAGKRTADGSEFEKRTADGSEFESPKKKAKVE

SEQ ID NO: 960 - protein, 2096 aa, synthetic construct
  source 1..2096: note = Description of Artificial Sequence: Synthetic polypeptide
MPAAKRVKLDGGDKKYSIGLDIGTNSVGWAVITDEYKVPSKKFKVLGNTDRHSIKKNLIGALLFDSGETAEATRLKRTARRRYTRRKNRICYLQEIFSNEMAKVDDSFFHRLEESFLVEEDKKHERHPIFGNIVDEVAYHEKYPTIYHLRKKLVDSTDKADLRLIYLALAHMIKFRGHFLIEGDLNPDNSDVDKLFIQLVQTYNQLFEENPINASGVDAKAILSARLSKSRRLENLIAQLPGEKKNGLFGNLIALSLGLTPNFKSNFDLAEDAKLQLSKDTYDDDLDNLLAQIGDQYADLFLAAKNLSDAILLSDILRVNTEITKAPLSASMIKRYDEHHQDLTLLKALVRQQLPEKYKEIFFDQSKNGYAGYIDGGASQEEFYKFIKPILEKMDGTEELLVKLNREDLLRKQRTFDNGSIPHQIHLGELHAILRRQEDFYPFLKDNREKIEKILTFRIPYYVGPLARGNSRFAWMTRKSEETITPWNFEEVVDKGASAQSFIERMTNFDKNLPNEKVLPKHSLLYEYFTVYNELTKVKYVTEGMRKPAFLSGEQKKAIVDLLFKTNRKVTVKQLKEDYFKKIECFDSVEISGVEDRFNASLGTYHDLLKIIKDKDFLDNEENEDILEDIVLTLTLFEDREMIEERLKTYAHLFDDKVMKQLKRRRYTGWGRLSRKLINGIRDKQSGKTILDFLKSDGFANRNFMQLIHDDSLTFKEDIQKAQVSGQGDSLHEHIANLAGSPAIKKGILQTVKVVDELVKVMGRHKPENIVIEMARENQTTQKGQKNSRERMKRIEEGIKELGSQILKEHPVENTQLQNEKLYLYYLQNGRDMYVDQELDINRLSDYDVDHIVPQSFLKDDSIDNKVLTRSDKARGKSDNVPSEEVVKKMKNYWRQLLNAKLITQRKFDNLTKAERGGLSELDKAGFIKRQLVETRQITKHVAQILDSRMNTKYDENDKLIREVKVITLKSKLVSDFRKDFQFYKVREINNYHHAHDAYLNAVVGTALIKKYPKLESEFVYGDYKVYDVRKMIAKSEQEIGKATAKYFFYSNIMNFFKTEITLANGEIRKRPLIETNGETGEIVWDKGRDFATVRKVLSMPQVNIVKKTEVQTGGFSKESILPKRNSDKLIARKKDWDPKKYGGFDSPTVAYSVLVVAKVEKGKSKKLKSVKELLGITIMERSSFEKNPIDFLEAKGYKEVKKDLIIKLPKYSLFELENGRKRMLASAGELQKGNELALPSKYVNFLYLASHYEKLKGSPEDNEQKQLFVEQHKHYLDEIIEQISEFSKRVILADANLDKVLSAYNKHRDKPIREQAENIIHLFTLTNLGAPAAFKYFDTTIDRKRYTSTKEVLDATLIHQSITGLYETRIDLSQLGGDGGEAAAKGSSPAPGGTLNIEDEYRLHETSKEPDVPLGSTWLSDFPQAWAETGGMGLAVRQAPLIIPLKATSTPVSIKQYPMSQEARLGIKPHIQRLLDQGILVPCQSPWNTPLLPVKKPGTNDYRPVQDLREVNKRVEDIHPTVPNPYNLLSGLPPSHQWYTVLDLKDAFFCLRLHPTSQPLFAFEWRDPEMGISGQLTWTRLPQGFKNSPTLFNEALHRDLADFRIQHPDLILLQYVDDLLLAATSEQDCQRGTRALLQTLGNLGYRASAKKAQICQKQVKYLGYLLKEGQRWLTEARKETVMGQPTPKTPRQLREFLGTAGFCRLWIPGFAEMAAPLYPLTKPGTLFNWGPDQQKAYQEIKQALLTAPALGLPDLTKPFELFVDEKQGYAKGVLTQKLGPWRRPVAYLSKKLDPVAAGWPPCLRMVAAIAVLTKDAGKLTMGQPLVILAPHAVEALVKQPPDRWLSNARMTHYQAMLLDTDRVQFGPVVALNPATLLPLPEKEAPHDCLEILAETHGTRPDLTDQPIPDADYTWYTDGSSFLQEGQRRAGAAVTTETEVIWARALPAGTSAQRAELIALTQALKMAEGKKLNVYTDSRYAFATAHVHGEIYRRRGWLTSEGREIKNKNEILALLKALFLPKRLSIIHCPGHQKGNSAEARGNRMADQAAREAAMKAVLETSTLLAGKRTADGSEFEKRTADGSEFESPKKKAKVE

SEQ ID NO: 961 - protein, 2096 aa, synthetic construct
  source 1..2096: note = Description of Artificial Sequence: Synthetic polypeptide
MPAAKRVKLDGGDKKYSIGLDIGTNSVGWAVITDEYKVPSKKFKVLGNTDRHSIKKNLIGALLFDSGETAEATRLKRTARRRYTRRKNRICYLQEIFSNEMAKVDDSFFHRLEESFLVEEDKKHERHPIFGNIVDEVAYHEKYPTIYHLRKKLVDSTDKADLRLIYLALAHMIKFRGHFLIEGDLNPDNSDVDKLFIQLVQTYNQLFEENPINASGVDAKAILSARLSKSRRLENLIAQLPGEKKNGLFGNLIALSLGLTPNFKSNFDLAEDAKLQLSKDTYDDDLDNLLAQIGDQYADLFLAAKNLSDAILLSDILRVNTEITKAPLSASMIKRYDEHHQDLTLLKALVRQQLPEKYKEIFFDQSKNGYAGYIDGGASQEEFYKFIKPILEKMDGTEELLVKLNREDLLRKQRTFDNGSIPHQIHLGELHAILRRQEDFYPFLKDNREKIEKILTFRIPYYVGPLARGNSRFAWMTRKSEETITPWNFEEVVDKGASAQSFIERMTNFDKNLPNEKVLPKHSLLYEYFTVYNELTKVKYVTEGMRKPAFLSGEQKKAIVDLLFKTNRKVTVKQLKEDYFKKIECFDSVEISGVEDRFNASLGTYHDLLKIIKDKDFLDNEENEDILEDIVLTLTLFEDREMIEERLKTYAHLFDDKVMKQLKRRRYTGWGRLSRKLINGIRDKQSGKTILDFLKSDGFANRNFMQLIHDDSLTFKEDIQKAQVSGQGDSLHEHIANLAGSPAIKKGILQTVKVVDELVKVMGRHKPENIVIEMARENQTTQKGQKNSRERMKRIEEGIKELGSQILKEHPVENTQLQNEKLYLYYLQNGRDMYVDQELDINRLSDYDVDHIVPQSFLKDDSIDNKVLTRSDKARGKSDNVPSEEVVKKMKNYWRQLLNAKLITQRKFDNLTKAERGGLSELDKAGFIKRQLVETRQITKHVAQILDSRMNTKYDENDKLIREVKVITLKSKLVSDFRKDFQFYKVREINNYHHAHDAYLNAVVGTALIKKYPKLESEFVYGDYKVYDVRKMIAKSEQEIGKATAKYFFYSNIMNFFKTEITLANGEIRKRPLIETNGETGEIVWDKGRDFATVRKVLSMPQVNIVKKTEVQTGGFSKESILPKRNSDKLIARKKDWDPKKYGGFDSPTVAYSVLVVAKVEKGKSKKLKSVKELLGITIMERSSFEKNPIDFLEAKGYKEVKKDLIIKLPKYSLFELENGRKRMLASAGELQKGNELALPSKYVNFLYLASHYEKLKGSPEDNEQKQLFVEQHKHYLDEIIEQISEFSKRVILADANLDKVLSAYNKHRDKPIREQAENIIHLFTLTNLGAPAAFKYFDTTIDRKRYTSTKEVLDATLIHQSITGLYETRIDLSQLGGDGGEAAAKPAPGGSGGTLNIEDEYRLHETSKEPDVPLGSTWLSDFPQAWAETGGMGLAVRQAPLIIPLKATSTPVSIKQYPMSQEARLGIKPHIQRLLDQGILVPCQSPWNTPLLPVKKPGTNDYRPVQDLREVNKRVEDIHPTVPNPYNLLSGLPPSHQWYTVLDLKDAFFCLRLHPTSQPLFAFEWRDPEMGISGQLTWTRLPQGFKNSPTLFNEALHRDLADFRIQHPDLILLQYVDDLLLAATSEQDCQRGTRALLQTLGNLGYRASAKKAQICQKQVKYLGYLLKEGQRWLTEARKETVMGQPTPKTPRQLREFLGTAGFCRLWIPGFAEMAAPLYPLTKPGTLFNWGPDQQKAYQEIKQALLTAPALGLPDLTKPFELFVDEKQGYAKGVLTQKLGPWRRPVAYLSKKLDPVAAGWPPCLRMVAAIAVLTKDAGKLTMGQPLVILAPHAVEALVKQPPDRWLSNARMTHYQAMLLDTDRVQFGPVVALNPATLLPLPEKEAPHDCLEILAETHGTRPDLTDQPIPDADYTWYTDGSSFLQEGQRRAGAAVTTETEVIWARALPAGTSAQRAELIALTQALKMAEGKKLNVYTDSRYAFATAHVHGEIYRRRGWLTSEGREIKNKNEILALLKALFLPKRLSIIHCPGHQKGNSAEARGNRMADQAAREAAMKAVLETSTLLAGKRTADGSEFEKRTADGSEFESPKKKAKVE

SEQ ID NO: 962 - protein, 2131 aa, synthetic construct
  source 1..2131: note = Description of Artificial Sequence: Synthetic polypeptide
MPAAKRVKLDGGDKKYSIGLDIGTNSVGWAVITDEYKVPSKKFKVLGNTDRHSIKKNLIGALLFDSGETAEATRLKRTARRRYTRRKNRICYLQEIFSNEMAKVDDSFFHRLEESFLVEEDKKHERHPIFGNIVDEVAYHEKYPTIYHLRKKLVDSTDKADLRLIYLALAHMIKFRGHFLIEGDLNPDNSDVDKLFIQLVQTYNQLFEENPINASGVDAKAILSARLSKSRRLENLIAQLPGEKKNGLFGNLIALSLGLTPNFKSNFDLAEDAKLQLSKDTYDDDLDNLLAQIGDQYADLFLAAKNLSDAILLSDILRVNTEITKAPLSASMIKRYDEHHQDLTLLKALVRQQLPEKYKEIFFDQSKNGYAGYIDGGASQEEFYKFIKPILEKMDGTEELLVKLNREDLLRKQRTFDNGSIPHQIHLGELHAILRRQEDFYPFLKDNREKIEKILTFRIPYYVGPLARGNSRFAWMTRKSEETITPWNFEEVVDKGASAQSFIERMTNFDKNLPNEKVLPKHSLLYEYFTVYNELTKVKYVTEGMRKPAFLSGEQKKAIVDLLFKTNRKVTVKQLKEDYFKKIECFDSVEISGVEDRFNASLGTYHDLLKIIKDKDFLDNEENEDILEDIVLTLTLFEDREMIEERLKTYAHLFDDKVMKQLKRRRYTGWGRLSRKLINGIRDKQSGKTILDFLKSDGFANRNFMQLIHDDSLTFKEDIQKAQVSGQGDSLHEHIANLAGSPAIKKGILQTVKVVDELVKVMGRHKPENIVIEMARENQTTQKGQKNSRERMKRIEEGIKELGSQILKEHPVENTQLQNEKLYLYYLQNGRDMYVDQELDINRLSDYDVDHIVPQSFLKDDSIDNKVLTRSDKARGKSDNVPSEEVVKKMKNYWRQLLNAKLITQRKFDNLTKAERGGLSELDKAGFIKRQLVETRQITKHVAQILDSRMNTKYDENDKLIREVKVITLKSKLVSDFRKDFQFYKVREINNYHHAHDAYLNAVVGTALIKKYPKLESEFVYGDYKVYDVRKMIAKSEQEIGKATAKYFFYSNIMNFFKTEITLANGEIRKRPLIETNGETGEIVWDKGRDFATVRKVLSMPQVNIVKKTEVQTGGFSKESILPKRNSDKLIARKKDWDPKKYGGFDSPTVAYSVLVVAKVEKGKSKKLKSVKELLGITIMERSSFEKNPIDFLEAKGYKEVKKDLIIKLPKYSLFELENGRKRMLASAGELQKGNELALPSKYVNFLYLASHYEKLKGSPEDNEQKQLFVEQHKHYLDEIIEQISEFSKRVILADANLDKVLSAYNKHRDKPIREQAENIIHLFTLTNLGAPAAFKYFDTTIDRKRYTSTKEVLDATLIHQSITGLYETRIDLSQLGGDGGAEAAAKEAAAKEAAAKEAAAKALEAEAAAKEAAAKEAAAKEAAAKAGGTLNIEDEYRLHETSKEPDVPLGSTWLSDFPQAWAETGGMGLAVRQAPLIIPLKATSTPVSIKQYPMSQEARLGIKPHIQRLLDQGILVPCQSPWNTPLLPVKKPGTNDYRPVQDLREVNKRVEDIHPTVPNPYNLLSGLPPSHQWYTVLDLKDAFFCLRLHPTSQPLFAFEWRDPEMGISGQLTWTRLPQGFKNSPTLFNEALHRDLADFRIQHPDLILLQYVDDLLLAATSEQDCQRGTRALLQTLGNLGYRASAKKAQICQKQVKYLGYLLKEGQRWLTEARKETVMGQPTPKTPRQLREFLGTAGFCRLWIPGFAEMAAPLYPLTKPGTLFNWGPDQQKAYQEIKQALLTAPALGLPDLTKPFELFVDEKQGYAKGVLTQKLGPWRRPVAYLSKKLDPVAAGWPPCLRMVAAIAVLTKDAGKLTMGQPLVILAPHAVEALVKQPPDRWLSNARMTHYQAMLLDTDRVQFGPVVALNPATLLPLPEKEAPHDCLEILAETHGTRPDLTDQPIPDADYTWYTDGSSFLQEGQRRAGAAVTTETEVIWARALPAGTSAQRAELIALTQALKMAEGKKLNVYTDSRYAFATAHVHGEIYRRRGWLTSEGREIKNKNEILALLKALFLPKRLSIIHCPGHQKGNSAEARGNRMADQAAREAAMKAVLETSTLLAGKRTADGSEFEKRTADGSEFESPKKKAKVE

SEQ ID NO: 963 - protein, 2096 aa, synthetic construct
  source 1..2096: note = Description of Artificial Sequence: Synthetic polypeptide
MPAAKRVKLDGGDKKYSIGLDIGTNSVGWAVITDEYKVPSKKFKVLGNTDRHSIKKNLIGALLFDSGETAEATRLKRTARRRYTRRKNRICYLQEIFSNEMAKVDDSFFHRLEESFLVEEDKKHERHPIFGNIVDEVAYHEKYPTIYHLRKKLVDSTDKADLRLIYLALAHMIKFRGHFLIEGDLNPDNSDVDKLFIQLVQTYNQLFEENPINASGVDAKAILSARLSKSRRLENLIAQLPGEKKNGLFGNLIALSLGLTPNFKSNFDLAEDAKLQLSKDTYDDDLDNLLAQIGDQYADLFLAAKNLSDAILLSDILRVNTEITKAPLSASMIKRYDEHHQDLTLLKALVRQQLPEKYKEIFFDQSKNGYAGYIDGGASQEEFYKFIKPILEKMDGTEELLVKLNREDLLRKQRTFDNGSIPHQIHLGELHAILRRQEDFYPFLKDNREKIEKILTFRIPYYVGPLARGNSRFAWMTRKSEETITPWNFEEVVDKGASAQSFIERMTNFDKNLPNEKVLPKHSLLYEYFTVYNELTKVKYVTEGMRKPAFLSGEQKKAIVDLLFKTNRKVTVKQLKEDYFKKIECFDSVEISGVEDRFNASLGTYHDLLKIIKDKDFLDNEENEDILEDIVLTLTLFEDREMIEERLKTYAHLFDDKVMKQLKRRRYTGWGRLSRKLINGIRDKQSGKTILDFLKSDGFANRNFMQLIHDDSLTFKEDIQKAQVSGQGDSLHEHIANLAGSPAIKKGILQTVKVVDELVKVMGRHKPENIVIEMARENQTTQKGQKNSRERMKRIEEGIKELGSQILKEHPVENTQLQNEKLYLYYLQNGRDMYVDQELDINRLSDYDVDHIVPQSFLKDDSIDNKVLTRSDKARGKSDNVPSEEVVKKMKNYWRQLLNAKLITQRKFDNLTKAERGGLSELDKAGFIKRQLVETRQITKHVAQILDSRMNTKYDENDKLIREVKVITLKSKLVSDFRKDFQFYKVREINNYHHAHDAYLNAVVGTALIKKYPKLESEFVYGDYKVYDVRKMIAKSEQEIGKATAKYFFYSNIMNFFKTEITLANGEIRKRPLIETNGETGEIVWDKGRDFATVRKVLSMPQVNIVKKTEVQTGGFSKESILPKRNSDKLIARKKDWDPKKYGGFDSPTVAYSVLVVAKVEKGKSKKLKSVKELLGITIMERSSFEKNPIDFLEAKGYKEVKKDLIIKLPKYSLFELENGRKRMLASAGELQKGNELALPSKYVNFLYLASHYEKLKGSPEDNEQKQLFVEQHKHYLDEIIEQISEFSKRVILADANLDKVLSAYNKHRDKPIREQAENIIHLFTLTNLGAPAAFKYFDTTIDRKRYTSTKEVLDATLIHQSITGLYETRIDLSQLGGDGGEAAAKGGGPAPGGTLNIEDEYRLHETSKEPDVPLGSTWLSDFPQAWAETGGMGLAVRQAPLIIPLKATSTPVSIKQYPMSQEARLGIKPHIQRLLDQGILVPCQSPWNTPLLPVKKPGTNDYRPVQDLREVNKRVEDIHPTVPNPYNLLSGLPPSHQWYTVLDLKDAFFCLRLHPTSQPLFAFEWRDPEMGISGQLTWTRLPQGFKNSPTLFNEALHRDLADFRIQHPDLILLQYVDDLLLAATSEQDCQRGTRALLQTLGNLGYRASAKKAQICQKQVKYLGYLLKEGQRWLTEARKETVMGQPTPKTPRQLREFLGTAGFCRLWIPGFAEMAAPLYPLTKPGTLFNWGPDQQKAYQEIKQALLTAPALGLPDLTKPFELFVDEKQGYAKGVLTQKLGPWRRPVAYLSKKLDPVAAGWPPCLRMVAAIAVLTKDAGKLTMGQPLVILAPHAVEALVKQPPDRWLSNARMTHYQAMLLDTDRVQFGPVVALNPATLLPLPEKEAPHDCLEILAETHGTRPDLTDQPIPDADYTWYTDGSSFLQEGQRRAGAAVTTETEVIWARALPAGTSAQRAELIALTQALKMAEGKKLNVYTDSRYAFATAHVHGEIYRRRGWLTSEGREIKNKNEILALLKALFLPKRLSIIHCPGHQKGNSAEARGNRMADQAAREAAMKAVLETSTLLAGKRTADGSEFEKRTADGSEFESPKKKAKVE

SEQ ID NO: 964 - protein, 2100 aa, synthetic construct
  source 1..2100: note = Description of Artificial Sequence: Synthetic polypeptide
MPAAKRVKLDGGDKKYSIGLDIGTNSVGWAVITDEYKVPSKKFKVLGNTDRHSIKKNLIGALLFDSGETAEATRLKRTARRRYTRRKNRICYLQEIFSNEMAKVDDSFFHRLEESFLVEEDKKHERHPIFGNIVDEVAYHEKYPTIYHLRKKLVDSTDKADLRLIYLALAHMIKFRGHFLIEGDLNPDNSDVDKLFIQLVQTYNQLFEENPINASGVDAKAILSARLSKSRRLENLIAQLPGEKKNGLFGNLIALSLGLTPNFKSNFDLAEDAKLQLSKDTYDDDLDNLLAQIGDQYADLFLAAKNLSDAILLSDILRVNTEITKAPLSASMIKRYDEHHQDLTLLKALVRQQLPEKYKEIFFDQSKNGYAGYIDGGASQEEFYKFIKPILEKMDGTEELLVKLNREDLLRKQRTFDNGSIPHQIHLGELHAILRRQEDFYPFLKDNREKIEKILTFRIPYYVGPLARGNSRFAWMTRKSEETITPWNFEEVVDKGASAQSFIERMTNFDKNLPNEKVLPKHSLLYEYFTVYNELTKVKYVTEGMRKPAFLSGEQKKAIVDLLFKTNRKVTVKQLKEDYFKKIECFDSVEISGVEDRFNASLGTYHDLLKIIKDKDFLDNEENEDILEDIVLTLTLFEDREMIEERLKTYAHLFDDKVMKQLKRRRYTGWGRLSRKLINGIRDKQSGKTILDFLKSDGFANRNFMQLIHDDSLTFKEDIQKAQVSGQGDSLHEHIANLAGSPAIKKGILQTVKVVDELVKVMGRHKPENIVIEMARENQTTQKGQKNSRERMKRIEEGIKELGSQILKEHPVENTQLQNEKLYLYYLQNGRDMYVDQELDINRLSDYDVDHIVPQSFLKDDSIDNKVLTRSDKARGKSDNVPSEEVVKKMKNYWRQLLNAKLITQRKFDNLTKAERGGLSELDKAGFIKRQLVETRQITKHVAQILDSRMNTKYDENDKLIREVKVITLKSKLVSDFRKDFQFYKVREINNYHHAHDAYLNAVVGTALIKKYPKLESEFVYGDYKVYDVRKMIAKSEQEIGKATAKYFFYSNIMNFFKTEITLANGEIRKRPLIETNGETGEIVWDKGRDFATVRKVLSMPQVNIVKKTEVQTGGFSKESILPKRNSDKLIARKKDWDPKKYGGFDSPTVAYSVLVVAKVEKGKSKKLKSVKELLGITIMERSSFEKNPIDFLEAKGYKEVKKDLIIKLPKYSLFELENGRKRMLASAGELQKGNELALPSKYVNFLYLASHYEKLKGSPEDNEQKQLFVEQHKHYLDEIIEQISEFSKRVILADANLDKVLSAYNKHRDKPIREQAENIIHLFTLTNLGAPAAFKYFDTTIDRKRYTSTKEVLDATLIHQSITGLYETRIDLSQLGGDGGGSSGSSGSSGSSGSSGGTLNIEDEYRLHETSKEPDVPLGSTWLSDFPQAWAETGGMGLAVRQAPLIIPLKATSTPVSIKQYPMSQEARLGIKPHIQRLLDQGILVPCQSPWNTPLLPVKKPGTNDYRPVQDLREVNKRVEDIHPTVPNPYNLLSGLPPSHQWYTVLDLKDAFFCLRLHPTSQPLFAFEWRDPEMGISGQLTWTRLPQGFKNSPTLFNEALHRDLADFRIQHPDLILLQYVDDLLLAATSEQDCQRGTRALLQTLGNLGYRASAKKAQICQKQVKYLGYLLKEGQRWLTEARKETVMGQPTPKTPRQLREFLGTAGFCRLWIPGFAEMAAPLYPLTKPGTLFNWGPDQQKAYQEIKQALLTAPALGLPDLTKPFELFVDEKQGYAKGVLTQKLGPWRRPVAYLSKKLDPVAAGWPPCLRMVAAIAVLTKDAGKLTMGQPLVILAPHAVEALVKQPPDRWLSNARMTHYQAMLLDTDRVQFGPVVALNPATLLPLPEKEAPHDCLEILAETHGTRPDLTDQPIPDADYTWYTDGSSFLQEGQRRAGAAVTTETEVIWARALPAGTSAQRAELIALTQALKMAEGKKLNVYTDSRYAFATAHVHGEIYRRRGWLTSEGREIKNKNEILALLKALFLPKRLSIIHCPGHQKGNSAEARGNRMADQAAREAAMKAVLETSTLLAGKRTADGSEFEKRTADGSEFESPKKKAKVE

SEQ ID NO: 965 - protein, 2105 aa, synthetic construct
  source 1..2105: note = Description of Artificial Sequence: Synthetic polypeptide
MPAAKRVKLDGGDKKYSIGLDIGTNSVGWAVITDEYKVPSKKFKVLGNTDRHSIKKNLIGALLFDSGETAEATRLKRTARRRYTRRKNRICYLQEIFSNEMAKVDDSFFHRLEESFLVEEDKKHERHPIFGNIVDEVAYHEKYPTIYHLRKKLVDSTDKADLRLIYLALAHMIKFRGHFLIEGDLNPDNSDVDKLFIQLVQTYNQLFEENPINASGVDAKAILSARLSKSRRLENLIAQLPGEKKNGLFGNLIALSLGLTPNFKSNFDLAEDAKLQLSKDTYDDDLDNLLAQIGDQYADLFLAAKNLSDAILLSDILRVNTEITKAPLSASMIKRYDEHHQDLTLLKALVRQQLPEKYKEIFFDQSKNGYAGYIDGGASQEEFYKFIKPILEKMDGTEELLVKLNREDLLRKQRTFDNGSIPHQIHLGELHAILRRQEDFYPFLKDNREKIEKILTFRIPYYVGPLARGNSRFAWMTRKSEETITPWNFEEVVDKGASAQSFIERMTNFDKNLPNEKVLPKHSLLYEYFTVYNELTKVKYVTEGMRKPAFLSGEQKKAIVDLLFKTNRKVTVKQLKEDYFKKIECFDSVEISGVEDRFNASLGTYHDLLKIIKDKDFLDNEENEDILEDIVLTLTLFEDREMIEERLKTYAHLFDDKVMKQLKRRRYTGWGRLSRKLINGIRDKQSGKTILDFLKSDGFANRNFMQLIHDDSLTFKEDIQKAQVSGQGDSLHEHIANLAGSPAIKKGILQTVKVVDELVKVMGRHKPENIVIEMARENQTTQKGQKNSRERMKRIEEGIKELGSQILKEHPVENTQLQNEKLYLYYLQNGRDMYVDQELDINRLSDYDVDHIVPQSFLKDDSIDNKVLTRSDKARGKSDNVPSEEVVKKMKNYWRQLLNAKLITQRKFDNLTKAERGGLSELDKAGFIKRQLVETRQITKHVAQILDSRMNTKYDENDKLIREVKVITLKSKLVSDFRKDFQFYKVREINNYHHAHDAYLNAVVGTALIKKYPKLESEFVYGDYKVYDVRKMIAKSEQEIGKATAKYFFYSNIMNFFKTEITLANGEIRKRPLIETNGETGEIVWDKGRDFATVRKVLSMPQVNIVKKTEVQTGGFSKESILPKRNSDKLIARKKDWDPKKYGGFDSPTVAYSVLVVAKVEKGKSKKLKSVKELLGITIMERSSFEKNPIDFLEAKGYKEVKKDLIIKLPKYSLFELENGRKRMLASAGELQKGNELALPSKYVNFLYLASHYEKLKGSPEDNEQKQLFVEQHKHYLDEIIEQISEFSKRVILADANLDKVLSAYNKHRDKPIREQAENIIHLFTLTNLGAPAAFKYFDTTIDRKRYTSTKEVLDATLIHQSITGLYETRIDLSQLGGDGGEAAAKEAAAKEAAAKEAAAKGGTLNIEDEYRLHETSKEPDVPLGSTWLSDFPQAWAETGGMGLAVRQAPLIIPLKATSTPVSIKQYPMSQEARLGIKPHIQRLLDQGILVPCQSPWNTPLLPVKKPGTNDYRPVQDLREVNKRVEDIHPTVPNPYNLLSGLPPSHQWYTVLDLKDAFFCLRLHPTSQPLFAFEWRDPEMGISGQLTWTRLPQGFKNSPTLFNEALHRDLADFRIQHPDLILLQYVDDLLLAATSEQDCQRGTRALLQTLGNLGYRASAKKAQICQKQVKYLGYLLKEGQRWLTEARKETVMGQPTPKTPRQLREFLGTAGFCRLWIPGFAEMAAPLYPLTKPGTLFNWGPDQQKAYQEIKQALLTAPALGLPDLTKPFELFVDEKQGYAKGVLTQKLGPWRRPVAYLSKKLDPVAAGWPPCLRMVAAIAVLTKDAGKLTMGQPLVILAPHAVEALVKQPPDRWLSNARMTHYQAMLLDTDRVQFGPVVALNPATLLPLPEKEAPHDCLEILAETHGTRPDLTDQPIPDADYTWYTDGSSFLQEGQRRAGAAVTTETEVIWARALPAGTSAQRAELIALTQALKMAEGKKLNVYTDSRYAFATAHVHGEIYRRRGWLTSEGREIKNKNEILALLKALFLPKRLSIIHCPGHQKGNSAEARGNRMADQAAREAAMKAVLETSTLLAGKRTADGSEFEKRTADGSEFESPKKKAKVE

SEQ ID NO: 966 - protein, 2093 aa, synthetic construct
  source 1..2093: note = Description of Artificial Sequence: Synthetic polypeptide
MPAAKRVKLDGGDKKYSIGLDIGTNSVGWAVITDEYKVPSKKFKVLGNTDRHSIKKNLIGALLFDSGETAEATRLKRTARRRYTRRKNRICYLQEIFSNEMAKVDDSFFHRLEESFLVEEDKKHERHPIFGNIVDEVAYHEKYPTIYHLRKKLVDSTDKADLRLIYLALAHMIKFRGHFLIEGDLNPDNSDVDKLFIQLVQTYNQLFEENPINASGVDAKAILSARLSKSRRLENLIAQLPGEKKNGLFGNLIALSLGLTPNFKSNFDLAEDAKLQLSKDTYDDDLDNLLAQIGDQYADLFLAAKNLSDAILLSDILRVNTEITKAPLSASMIKRYDEHHQDLTLLKALVRQQLPEKYKEIFFDQSKNGYAGYIDGGASQEEFYKFIKPILEKMDGTEELLVKLNREDLLRKQRTFDNGSIPHQIHLGELHAILRRQEDFYPFLKDNREKIEKILTFRIPYYVGPLARGNSRFAWMTRKSEETITPWNFEEVVDKGASAQSFIERMTNFDKNLPNEKVLPKHSLLYEYFTVYNELTKVKYVTEGMRKPAFLSGEQKKAIVDLLFKTNRKVTVKQLKEDYFKKIECFDSVEISGVEDRFNASLGTYHDLLKIIKDKDFLDNEENEDILEDIVLTLTLFEDREMIEERLKTYAHLFDDKVMKQLKRRRYTGWGRLSRKLINGIRDKQSGKTILDFLKSDGFANRNFMQLIHDDSLTFKEDIQKAQVSGQGDSLHEHIANLAGSPAIKKGILQTVKVVDELVKVMGRHKPENIVIEMARENQTTQKGQKNSRERMKRIEEGIKELGSQILKEHPVENTQLQNEKLYLYYLQNGRDMYVDQELDINRLSDYDVDHIVPQSFLKDDSIDNKVLTRSDKARGKSDNVPSEEVVKKMKNYWRQLLNAKLITQRKFDNLTKAERGGLSELDKAGFIKRQLVETRQITKHVAQILDSRMNTKYDENDKLIREVKVITLKSKLVSDFRKDFQFYKVREINNYHHAHDAYLNAVVGTALIKKYPKLESEFVYGDYKVYDVRKMIAKSEQEIGKATAKYFFYSNIMNFFKTEITLANGEIRKRPLIETNGETGEIVWDKGRDFATVRKVLSMPQVNIVKKTEVQTGGFSKESILPKRNSDKLIARKKDWDPKKYGGFDSPTVAYSVLVVAKVEKGKSKKLKSVKELLGITIMERSSFEKNPIDFLEAKGYKEVKKDLIIKLPKYSLFELENGRKRMLASAGELQKGNELALPSKYVNFLYLASHYEKLKGSPEDNEQKQLFVEQHKHYLDEIIEQISEFSKRVILADANLDKVLSAYNKHRDKPIREQAENIIHLFTLTNLGAPAAFKYFDTTIDRKRYTSTKEVLDATLIHQSITGLYETRIDLSQLGGDGGGSSEAAAKGGTLNIEDEYRLHETSKEPDVPLGSTWLSDFPQAWAETGGMGLAVRQAPLIIPLKATSTPVSIKQYPMSQEARLGIKPHIQRLLDQGILVPCQSPWNTPLLPVKKPGTNDYRPVQDLREVNKRVEDIHPTVPNPYNLLSGLPPSHQWYTVLDLKDAFFCLRLHPTSQPLFAFEWRDPEMGISGQLTWTRLPQGFKNSPTLFNEALHRDLADFRIQHPDLILLQYVDDLLLAATSEQDCQRGTRALLQTLGNLGYRASAKKAQICQKQVKYLGYLLKEGQRWLTEARKETVMGQPTPKTPRQLREFLGTAGFCRLWIPGFAEMAAPLYPLTKPGTLFNWGPDQQKAYQEIKQALLTAPALGLPDLTKPFELFVDEKQGYAKGVLTQKLGPWRRPVAYLSKKLDPVAAGWPPCLRMVAAIAVLTKDAGKLTMGQPLVILAPHAVEALVKQPPDRWLSNARMTHYQAMLLDTDRVQFGPVVALNPATLLPLPEKEAPHDCLEILAETHGTRPDLTDQPIPDADYTWYTDGSSFLQEGQRRAGAAVTTETEVIWARALPAGTSAQRAELIALTQALKMAEGKKLNVYTDSRYAFATAHVHGEIYRRRGWLTSEGREIKNKNEILALLKALFLPKRLSIIHCPGHQKGNSAEARGNRMADQAAREAAMKAVLETSTLLAGKRTADGSEFEKRTADGSEFESPKKKAKVE

SEQ ID NO: 967 - protein, 2096 aa, synthetic construct
  source 1..2096: note = Description of Artificial Sequence: Synthetic polypeptide
MPAAKRVKLDGGDKKYSIGLDIGTNSVGWAVITDEYKVPSKKFKVLGNTDRHSIKKNLIGALLFDSGETAEATRLKRTARRRYTRRKNRICYLQEIFSNEMAKVDDSFFHRLEESFLVEEDKKHERHPIFGNIVDEVAYHEKYPTIYHLRKKLVDSTDKADLRLIYLALAHMIKFRGHFLIEGDLNPDNSDVDKLFIQLVQTYNQLFEENPINASGVDAKAILSARLSKSRRLENLIAQLPGEKKNGLFGNLIALSLGLTPNFKSNFDLAEDAKLQLSKDTYDDDLDNLLAQIGDQYADLFLAAKNLSDAILLSDILRVNTEITKAPLSASMIKRYDEHHQDLTLLKALVRQQLPEKYKEIFFDQSKNGYAGYIDGGASQEEFYKFIKPILEKMDGTEELLVKLNREDLLRKQRTFDNGSIPHQIHLGELHAILRRQEDFYPFLKDNREKIEKILTFRIPYYVGPLARGNSRFAWMTRKSEETITPWNFEEVVDKGASAQSFIERMTNFDKNLPNEKVLPKHSLLYEYFTVYNELTKVKYVTEGMRKPAFLSGEQKKAIVDLLFKTNRKVTVKQLKEDYFKKIECFDSVEISGVEDRFNASLGTYHDLLKIIKDKDFLDNEENEDILEDIVLTLTLFEDREMIEERLKTYAHLFDDKVMKQLKRRRYTGWGRLSRKLINGIRDKQSGKTILDFLKSDGFANRNFMQLIHDDSLTFKEDIQKAQVSGQGDSLHEHIANLAGSPAIKKGILQTVKVVDELVKVMGRHKPENIVIEMARENQTTQKGQKNSRERMKRIEEGIKELGSQILKEHPVENTQLQNEKLYLYYLQNGRDMYVDQELDINRLSDYDVDHIVPQSFLKDDSIDNKVLTRSDKARGKSDNVPSEEVVKKMKNYWRQLLNAKLITQRKFDNLTKAERGGLSELDKAGFIKRQLVETRQITKHVAQILDSRMNTKYDENDKLIREVKVITLKSKLVSDFRKDFQFYKVREINNYHHAHDAYLNAVVGTALIKKYPKLESEFVYGDYKVYDVRKMIAKSEQEIGKATAKYFFYSNIMNFFKTEITLANGEIRKRPLIETNGETGEIVWDKGRDFATVRKVLSMPQVNIVKKTEVQTGGFSKESILPKRNSDKLIARKKDWDPKKYGGFDSPTVAYSVLVVAKVEKGKSKKLKSVKELLGITIMERSSFEKNPIDFLEAKGYKEVKKDLIIKLPKYSLFELENGRKRMLASAGELQKGNELALPSKYVNFLYLASHYEKLKGSPEDNEQKQLFVEQHKHYLDEIIEQISEFSKRVILADANLDKVLSAYNKHRDKPIREQAENIIHLFTLTNLGAPAAFKYFDTTIDRKRYTSTKEVLDATLIHQSITGLYETRIDLSQLGGDGGPAPGSSEAAAKGGTLNIEDEYRLHETSKEPDVPLGSTWLSDFPQAWAETGGMGLAVRQAPLIIPLKATSTPVSIKQYPMSQEARLGIKPHIQRLLDQGILVPCQSPWNTPLLPVKKPGTNDYRPVQDLREVNKRVEDIHPTVPNPYNLLSGLPPSHQWYTVLDLKDAFFCLRLHPTSQPLFAFEWRDPEMGISGQLTWTRLPQGFKNSPTLFNEALHRDLADFRIQHPDLILLQYVDDLLLAATSEQDCQRGTRALLQTLGNLGYRASAKKAQICQKQVKYLGYLLKEGQRWLTEARKETVMGQPTPKTPRQLREFLGTAGFCRLWIPGFAEMAAPLYPLTKPGTLFNWGPDQQKAYQEIKQALLTAPALGLPDLTKPFELFVDEKQGYAKGVLTQKLGPWRRPVAYLSKKLDPVAAGWPPCLRMVAAIAVLTKDAGKLTMGQPLVILAPHAVEALVKQPPDRWLSNARMTHYQAMLLDTDRVQFGPVVALNPATLLPLPEKEAPHDCLEILAETHGTRPDLTDQPIPDADYTWYTDGSSFLQEGQRRAGAAVTTETEVIWARALPAGTSAQRAELIALTQALKMAEGKKLNVYTDSRYAFATAHVHGEIYRRRGWLTSEGREIKNKNEILALLKALFLPKRLSIIHCPGHQKGNSAEARGNRMADQAAREAAMKAVLETSTLLAGKRTADGSEFEKRTADGSEFESPKKKAKVE

SEQ ID NO: 968 - protein, 2096 aa, synthetic construct
  source 1..2096: note = Description of Artificial Sequence: Synthetic polypeptide
MPAAKRVKLDGGDKKYSIGLDIGTNSVGWAVITDEYKVPSKKFKVLGNTDRHSIKKNLIGALLFDSGETAEATRLKRTARRRYTRRKNRICYLQEIFSNEMAKVDDSFFHRLEESFLVEEDKKHERHPIFGNIVDEVAYHEKYPTIYHLRKKLVDSTDKADLRLIYLALAHMIKFRGHFLIEGDLNPDNSDVDKLFIQLVQTYNQLFEENPINASGVDAKAILSARLSKSRRLENLIAQLPGEKKNGLFGNLIALSLGLTPNFKSNFDLAEDAKLQLSKDTYDDDLDNLLAQIGDQYADLFLAAKNLSDAILLSDILRVNTEITKAPLSASMIKRYDEHHQDLTLLKALVRQQLPEKYKEIFFDQSKNGYAGYIDGGASQEEFYKFIKPILEKMDGTEELLVKLNREDLLRKQRTFDNGSIPHQIHLGELHAILRRQEDFYPFLKDNREKIEKILTFRIPYYVGPLARGNSRFAWMTRKSEETITPWNFEEVVDKGASAQSFIERMTNFDKNLPNEKVLPKHSLLYEYFTVYNELTKVKYVTEGMRKPAFLSGEQKKAIVDLLFKTNRKVTVKQLKEDYFKKIECFDSVEISGVEDRFNASLGTYHDLLKIIKDKDFLDNEENEDILEDIVLTLTLFEDREMIEERLKTYAHLFDDKVMKQLKRRRYTGWGRLSRKLINGIRDKQSGKTILDFLKSDGFANRNFMQLIHDDSLTFKEDIQKAQVSGQGDSLHEHIANLAGSPAIKKGILQTVKVVDELVKVMGRHKPENIVIEMARENQTTQKGQKNSRERMKRIEEGIKELGSQILKEHPVENTQLQNEKLYLYYLQNGRDMYVDQELDINRLSDYDVDHIVPQSFLKDDSIDNKVLTRSDKARGKSDNVPSEEVVKKMKNYWRQLLNAKLITQRKFDNLTKAERGGLSELDKAGFIKRQLVETRQITKHVAQILDSRMNTKYDENDKLIREVKVITLKSKLVSDFRKDFQFYKVREINNYHHAHDAYLNAVVGTALIKKYPKLESEFVYGDYKVYDVRKMIAKSEQEIGKATAKYFFYSNIMNFFKTEITLANGEIRKRPLIETNGETGEIVWDKGRDFATVRKVLSMPQVNIVKKTEVQTGGFSKESILPKRNSDKLIARKKDWDPKKYGGFDSPTVAYSVLVVAKVEKGKSKKLKSVKELLGITIMERSSFEKNPIDFLEAKGYKEVKKDLIIKLPKYSLFELENGRKRMLASAGELQKGNELALPSKYVNFLYLASHYEKLKGSPEDNEQKQLFVEQHKHYLDEIIEQISEFSKRVILADANLDKVLSAYNKHRDKPIREQAENIIHLFTLTNLGAPAAFKYFDTTIDRKRYTSTKEVLDATLIHQSITGLYETRIDLSQLGGDGGGGSPAPEAAAKGGTLNIEDEYRLHETSKEPDVPLGSTWLSDFPQAWAETGGMGLAVRQAPLIIPLKATSTPVSIKQYPMSQEARLGIKPHIQRLLDQGILVPCQSPWNTPLLPVKKPGTNDYRPVQDLREVNKRVEDIHPTVPNPYNLLSGLPPSHQWYTVLDLKDAFFCLRLHPTSQPLFAFEWRDPEMGISGQLTWTRLPQGFKNSPTLFNEALHRDLADFRIQHPDLILLQYVDDLLLAATSEQDCQRGTRALLQTLGNLGYRASAKKAQICQKQVKYLGYLLKEGQRWLTEARKETVMGQPTPKTPRQLREFLGTAGFCRLWIPGFAEMAAPLYPLTKPGTLFNWGPDQQKAYQEIKQALLTAPALGLPDLTKPFELFVDEKQGYAKGVLTQKLGPWRRPVAYLSKKLDPVAAGWPPCLRMVAAIAVLTKDAGKLTMGQPLVILAPHAVEALVKQPPDRWLSNARMTHYQAMLLDTDRVQFGPVVALNPATLLPLPEKEAPHDCLEILAETHGTRPDLTDQPIPDADYTWYTDGSSFLQEGQRRAGAAVTTETEVIWARALPAGTSAQRAELIALTQALKMAEGKKLNVYTDSRYAFATAHVHGEIYRRRGWLTSEGREIKNKNEILALLKALFLPKRLSIIHCPGHQKGNSAEARGNRMADQAAREAAMKAVLETSTLLAGKRTADGSEFEKRTADGSEFESPKKKAKVE

SEQ ID NO: 969 - protein, 2094 aa, synthetic construct
  source 1..2094: note = Description of Artificial Sequence: Synthetic polypeptide
MPAAKRVKLDGGDKKYSIGLDIGTNSVGWAVITDEYKVPSKKFKVLGNTDRHSIKKNLIGALLFDSGETAEATRLKRTARRRYTRRKNRICYLQEIFSNEMAKVDDSFFHRLEESFLVEEDKKHERHPIFGNIVDEVAYHEKYPTIYHLRKKLVDSTDKADLRLIYLALAHMIKFRGHFLIEGDLNPDNSDVDKLFIQLVQTYNQLFEENPINASGVDAKAILSARLSKSRRLENLIAQLPGEKKNGLFGNLIALSLGLTPNFKSNFDLAEDAKLQLSKDTYDDDLDNLLAQIGDQYADLFLAAKNLSDAILLSDILRVNTEITKAPLSASMIKRYDEHHQDLTLLKALVRQQLPEKYKEIFFDQSKNGYAGYIDGGASQEEFYKFIKPILEKMDGTEELLVKLNREDLLRKQRTFDNGSIPHQIHLGELHAILRRQEDFYPFLKDNREKIEKILTFRIPYYVGPLARGNSRFAWMTRKSEETITPWNFEEVVDKGASAQSFIERMTNFDKNLPNEKVLPKHSLLYEYFTVYNELTKVKYVTEGMRKPAFLSGEQKKAIVDLLFKTNRKVTVKQLKEDYFKKIECFDSVEISGVEDRFNASLGTYHDLLKIIKDKDFLDNEENEDILEDIVLTLTLFEDREMIEERLKTYAHLFDDKVMKQLKRRRYTGWGRLSRKLINGIRDKQSGKTILDFLKSDGFANRNFMQLIHDDSLTFKEDIQKAQVSGQGDSLHEHIANLAGSPAIKKGILQTVKVVDELVKVMGRHKPENIVIEMARENQTTQKGQKNSRERMKRIEEGIKELGSQILKEHPVENTQLQNEKLYLYYLQNGRDMYVDQELDINRLSDYDVDHIVPQSFLKDDSIDNKVLTRSDKARGKSDNVPSEEVVKKMKNYWRQLLNAKLITQRKFDNLTKAERGGLSELDKAGFIKRQLVETRQITKHVAQILDSRMNTKYDENDKLIREVKVITLKSKLVSDFRKDFQFYKVREINNYHHAHDAYLNAVVGTALIKKYPKLESEFVYGDYKVYDVRKMIAKSEQEIGKATAKYFFYSNIMNFFKTEITLANGEIRKRPLIETNGETGEIVWDKGRDFATVRKVLSMPQVNIVKKTEVQTGGFSKESILPKRNSDKLIARKKDWDPKKYGGFDSPTVAYSVLVVAKVEKGKSKKLKSVKELLGITIMERSSFEKNPIDFLEAKGYKEVKKDLIIKLPKYSLFELENGRKRMLASAGELQKGNELALPSKYVNFLYLASHYEKLKGSPEDNEQKQLFVEQHKHYLDEIIEQISEFSKRVILADANLDKVLSAYNKHRDKPIREQAENIIHLFTLTNLGAPAAFKYFDTTIDRKRYTSTKEVLDATLIHQSITGLYETRIDLSQLGGDGGGGGGSSPAPGGTLNIEDEYRLHETSKEPDVPLGSTWLSDFPQAWAETGGMGLAVRQAPLIIPLKATSTPVSIKQYPMSQEARLGIKPHIQRLLDQGILVPCQSPWNTPLLPVKKPGTNDYRPVQDLREVNKRVEDIHPTVPNPYNLLSGLPPSHQWYTVLDLKDAFFCLRLHPTSQPLFAFEWRDPEMGISGQLTWTRLPQGFKNSPTLFNEALHRDLADFRIQHPDLILLQYVDDLLLAATSEQDCQRGTRALLQTLGNLGYRASAKKAQICQKQVKYLGYLLKEGQRWLTEARKETVMGQPTPKTPRQLREFLGTAGFCRLWIPGFAEMAAPLYPLTKPGTLFNWGPDQQKAYQEIKQALLTAPALGLPDLTKPFELFVDEKQGYAKGVLTQKLGPWRRPVAYLSKKLDPVAAGWPPCLRMVAAIAVLTKDAGKLTMGQPLVILAPHAVEALVKQPPDRWLSNARMTHYQAMLLDTDRVQFGPVVALNPATLLPLPEKEAPHDCLEILAETHGTRPDLTDQPIPDADYTWYTDGSSFLQEGQRRAGAAVTTETEVIWARALPAGTSAQRAELIALTQALKMAEGKKLNVYTDSRYAFATAHVHGEIYRRRGWLTSEGREIKNKNEILALLKALFLPKRLSIIHCPGHQKGNSAEARGNRMADQAAREAAMKAVLETSTLLAGKRTADGSEFEKRTADGSEFESPKKKAKVE

SEQ ID NO: 970 - protein, 2094 aa, synthetic construct
  source 1..2094: note = Description of Artificial Sequence: Synthetic polypeptide
MPAAKRVKLDGGDKKYSIGLDIGTNSVGWAVITDEYKVPSKKFKVLGNTDRHSIKKNLIGALLFDSGETAEATRLKRTARRRYTRRKNRICYLQEIFSNEMAKVDDSFFHRLEESFLVEEDKKHERHPIFGNIVDEVAYHEKYPTIYHLRKKLVDSTDKADLRLIYLALAHMIKFRGHFLIEGDLNPDNSDVDKLFIQLVQTYNQLFEENPINASGVDAKAILSARLSKSRRLENLIAQLPGEKKNGLFGNLIALSLGLTPNFKSNFDLAEDAKLQLSKDTYDDDLDNLLAQIGDQYADLFLAAKNLSDAILLSDILRVNTEITKAPLSASMIKRYDEHHQDLTLLKALVRQQLPEKYKEIFFDQSKNGYAGYIDGGASQEEFYKFIKPILEKMDGTEELLVKLNREDLLRKQRTFDNGSIPHQIHLGELHAILRRQEDFYPFLKDNREKIEKILTFRIPYYVGPLARGNSRFAWMTRKSEETITPWNFEEVVDKGASAQSFIERMTNFDKNLPNEKVLPKHSLLYEYFTVYNELTKVKYVTEGMRKPAFLSGEQKKAIVDLLFKTNRKVTVKQLKEDYFKKIECFDSVEISGVEDRFNASLGTYHDLLKIIKDKDFLDNEENEDILEDIVLTLTLFEDREMIEERLKTYAHLFDDKVMKQLKRRRYTGWGRLSRKLINGIRDKQSGKTILDFLKSDGFANRNFMQLIHDDSLTFKEDIQKAQVSGQGDSLHEHIANLAGSPAIKKGILQTVKVVDELVKVMGRHKPENIVIEMARENQTTQKGQKNSRERMKRIEEGIKELGSQILKEHPVENTQLQNEKLYLYYLQNGRDMYVDQELDINRLSDYDVDHIVPQSFLKDDSIDNKVLTRSDKARGKSDNVPSEEVVKKMKNYWRQLLNAKLITQRKFDNLTKAERGGLSELDKAGFIKRQLVETRQITKHVAQILDSRMNTKYDENDKLIREVKVITLKSKLVSDFRKDFQFYKVREINNYHHAHDAYLNAVVGTALIKKYPKLESEFVYGDYKVYDVRKMIAKSEQEIGKATAKYFFYSNIMNFFKTEITLANGEIRKRPLIETNGETGEIVWDKGRDFATVRKVLSMPQVNIVKKTEVQTGGFSKESILPKRNSDKLIARKKDWDPKKYGGFDSPTVAYSVLVVAKVEKGKSKKLKSVKELLGITIMERSSFEKNPIDFLEAKGYKEVKKDLIIKLPKYSLFELENGRKRMLASAGELQKGNELALPSKYVNFLYLASHYEKLKGSPEDNEQKQLFVEQHKHYLDEIIEQISEFSKRVILADANLDKVLSAYNKHRDKPIREQAENIIHLFTLTNLGAPAAFKYFDTTIDRKRYTSTKEVLDATLIHQSITGLYETRIDLSQLGGDGGPAPGSSGGSGGTLNIEDEYRLHETSKEPDVPLGSTWLSDFPQAWAETGGMGLAVRQAPLIIPLKATSTPVSIKQYPMSQEARLGIKPHIQRLLDQGILVPCQSPWNTPLLPVKKPGTNDYRPVQDLREVNKRVEDIHPTVPNPYNLLSGLPPSHQWYTVLDLKDAFFCLRLHPTSQPLFAFEWRDPEMGISGQLTWTRLPQGFKNSPTLFNEALHRDLADFRIQHPDLILLQYVDDLLLAATSEQDCQRGTRALLQTLGNLGYRASAKKAQICQKQVKYLGYLLKEGQRWLTEARKETVMGQPTPKTPRQLREFLGTAGFCRLWIPGFAEMAAPLYPLTKPGTLFNWGPDQQKAYQEIKQALLTAPALGLPDLTKPFELFVDEKQGYAKGVLTQKLGPWRRPVAYLSKKLDPVAAGWPPCLRMVAAIAVLTKDAGKLTMGQPLVILAPHAVEALVKQPPDRWLSNARMTHYQAMLLDTDRVQFGPVVALNPATLLPLPEKEAPHDCLEILAETHGTRPDLTDQPIPDADYTWYTDGSSFLQEGQRRAGAAVTTETEVIWARALPAGTSAQRAELIALTQALKMAEGKKLNVYTDSRYAFATAHVHGEIYRRRGWLTSEGREIKNKNEILALLKALFLPKRLSIIHCPGHQKGNSAEARGNRMADQAAREAAMKAVLETSTLLAGKRTADGSEFEKRTADGSEFESPKKKAKVE

SEQ ID NO: 971 - protein, 2096 aa, synthetic construct
  source 1..2096: note = Description of Artificial Sequence: Synthetic polypeptide
MPAAKRVKLDGGDKKYSIGLDIGTNSVGWAVITDEYKVPSKKFKVLGNTDRHSIKKNLIGALLFDSGETAEATRLKRTARRRYTRRKNRICYLQEIFSNEMAKVDDSFFHRLEESFLVEEDKKHERHPIFGNIVDEVAYHEKYPTIYHLRKKLVDSTDKADLRLIYLALAHMIKFRGHFLIEGDLNPDNSDVDKLFIQLVQTYNQLFEENPINASGVDAKAILSARLSKSRRLENLIAQLPGEKKNGLFGNLIALSLGLTPNFKSNFDLAEDAKLQLSKDTYDDDLDNLLAQIGDQYADLFLAAKNLSDAILLSDILRVNTEITKAPLSASMIKRYDEHHQDLTLLKALVRQQLPEKYKEIFFDQSKNGYAGYIDGGASQEEFYKFIKPILEKMDGTEELLVKLNREDLLRKQRTFDNGSIPHQIHLGELHAILRRQEDFYPFLKDNREKIEKILTFRIPYYVGPLARGNSRFAWMTRKSEETITPWNFEEVVDKGASAQSFIERMTNFDKNLPNEKVLPKHSLLYEYFTVYNELTKVKYVTEGMRKPAFLSGEQKKAIVDLLFKTNRKVTVKQLKEDYFKKIECFDSVEISGVEDRFNASLGTYHDLLKIIKDKDFLDNEENEDILEDIVLTLTLFEDREMIEERLKTYAHLFDDKVMKQLKRRRYTGWGRLSRKLINGIRDKQSGKTILDFLKSDGFANRNFMQLIHDDSLTFKEDIQKAQVSGQGDSLHEHIANLAGSPAIKKGILQTVKVVDELVKVMGRHKPENIVIEMARENQTTQKGQKNSRERMKRIEEGIKELGSQILKEHPVENTQLQNEKLYLYYLQNGRDMYVDQELDINRLSDYDVDHIVPQSFLKDDSIDNKVLTRSDKARGKSDNVPSEEVVKKMKNYWRQLLNAKLITQRKFDNLTKAERGGLSELDKAGFIKRQLVETRQITKHVAQILDSRMNTKYDENDKLIREVKVITLKSKLVSDFRKDFQFYKVREINNYHHAHDAYLNAVVGTALIKKYPKLESEFVYGDYKVYDVRKMIAKSEQEIGKATAKYFFYSNIMNFFKTEITLANGEIRKRPLIETNGETGEIVWDKGRDFATVRKVLSMPQVNIVKKTEVQTGGFSKESILPKRNSDKLIARKKDWDPKKYGGFDSPTVAYSVLVVAKVEKGKSKKLKSVKELLGITIMERSSFEKNPIDFLEAKGYKEVKKDLIIKLPKYSLFELENGRKRMLASAGELQKGNELALPSKYVNFLYLASHYEKLKGSPEDNEQKQLFVEQHKHYLDEIIEQISEFSKRVILADANLDKVLSAYNKHRDKPIREQAENIIHLFTLTNLGAPAAFKYFDTTIDRKRYTSTKEVLDATLIHQSITGLYETRIDLSQLGGDGGGSSGGGEAAAKGGTLNIEDEYRLHETSKEPDVPLGSTWLSDFPQAWAETGGMGLAVRQAPLIIPLKATSTPVSIKQYPMSQEARLGIKPHIQRLLDQGILVPCQSPWNTPLLPVKKPGTNDYRPVQDLREVNKRVEDIHPTVPNPYNLLSGLPPSHQWYTVLDLKDAFFCLRLHPTSQPLFAFEWRDPEMGISGQLTWTRLPQGFKNSPTLFNEALHRDLADFRIQHPDLILLQYVDDLLLAATSEQDCQRGTRALLQTLGNLGYRASAKKAQICQKQVKYLGYLLKEGQRWLTEARKETVMGQPTPKTPRQLREFLGTAGFCRLWIPGFAEMAAPLYPLTKPGTLFNWGPDQQKAYQEIKQALLTAPALGLPDLTKPFELFVDEKQGYAKGVLTQKLGPWRRPVAYLSKKLDPVAAGWPPCLRMVAAIAVLTKDAGKLTMGQPLVILAPHAVEALVKQPPDRWLSNARMTHYQAMLLDTDRVQFGPVVALNPATLLPLPEKEAPHDCLEILAETHGTRPDLTDQPIPDADYTWYTDGSSFLQEGQRRAGAAVTTETEVIWARALPAGTSAQRAELIALTQALKMAEGKKLNVYTDSRYAFATAHVHGEIYRRRGWLTSEGREIKNKNEILALLKALFLPKRLSIIHCPGHQKGNSAEARGNRMADQAAREAAMKAVLETSTLLAGKRTADGSEFEKRTADGSEFESPKKKAKVE

SEQ ID NO: 972 - protein, 2100 aa, synthetic construct
  source 1..2100: note = Description of Artificial Sequence: Synthetic polypeptide
MPAAKRVKLDGGDKKYSIGLDIGTNSVGWAVITDEYKVPSKKFKVLGNTDRHSIKKNLIGALLFDSGETAEATRLKRTARRRYTRRKNRICYLQEIFSNEMAKVDDSFFHRLEESFLVEEDKKHERHPIFGNIVDEVAYHEKYPTIYHLRKKLVDSTDKADLRLIYLALAHMIKFRGHFLIEGDLNPDNSDVDKLFIQLVQTYNQLFEENPINASGVDAKAILSARLSKSRRLENLIAQLPGEKKNGLFGNLIALSLGLTPNFKSNFDLAEDAKLQLSKDTYDDDLDNLLAQIGDQYADLFLAAKNLSDAILLSDILRVNTEITKAPLSASMIKRYDEHHQDLTLLKALVRQQLPEKYKEIFFDQSKNGYAGYIDGGASQEEFYKFIKPILEKMDGTEELLVKLNREDLLRKQRTFDNGSIPHQIHLGELHAILRRQEDFYPFLKDNREKIEKILTFRIPYYVGPLARGNSRFAWMTRKSEETITPWNFEEVVDKGASAQSFIERMTNFDKNLPNEKVLPKHSLLYEYFTVYNELTKVKYVTEGMRKPAFLSGEQKKAIVDLLFKTNRKVTVKQLKEDYFKKIECFDSVEISGVEDRFNASLGTYHDLLKIIKDKDFLDNEENEDILEDIVLTLTLFEDREMIEERLKTYAHLFDDKVMKQLKRRRYTGWGRLSRKLINGIRDKQSGKTILDFLKSDGFANRNFMQLIHDDSLTFKEDIQKAQVSGQGDSLHEHIANLAGSPAIKKGILQTVKVVDELVKVMGRHKPENIVIEMARENQTTQKGQKNSRERMKRIEEGIKELGSQILKEHPVENTQLQNEKLYLYYLQNGRDMYVDQELDINRLSDYDVDHIVPQSFLKDDSIDNKVLTRSDKARGKSDNVPSEEVVKKMKNYWRQLLNAKLITQRKFDNLTKAERGGLSELDKAGFIKRQLVETRQITKHVAQILDSRMNTKYDENDKLIREVKVITLKSKLVSDFRKDFQFYKVREINNYHHAHDAYLNAVVGTALIKKYPKLESEFVYGDYKVYDVRKMIAKSEQEIGKATAKYFFYSNIMNFFKTEITLANGEIRKRPLIETNGETGEIVWDKGRDFATVRKVLSMPQVNIVKKTEVQTGGFSKESILPKRNSDKLIARKKDWDPKKYGGFDSPTVAYSVLVVAKVEKGKSKKLKSVKELLGITIMERSSFEKNPIDFLEAKGYKEVKKDLIIKLPKYSLFELENGRKRMLASAGELQKGNELALPSKYVNFLYLASHYEKLKGSPEDNEQKQLFVEQHKHYLDEIIEQISEFSKRVILADANLDKVLSAYNKHRDKPIREQAENIIHLFTLTNLGAPAAFKYFDTTIDRKRYTSTKEVLDATLIHQSITGLYETRIDLSQLGGDGGGGGGSEAAAKGGGGSGGTLNIEDEYRLHETSKEPDVPLGSTWLSDFPQAWAETGGMGLAVRQAPLIIPLKATSTPVSIKQYPMSQEARLGIKPHIQRLLDQGILVPCQSPWNTPLLPVKKPGTNDYRPVQDLREVNKRVEDIHPTVPNPYNLLSGLPPSHQWYTVLDLKDAFFCLRLHPTSQPLFAFEWRDPEMGISGQLTWTRLPQGFKNSPTLFNEALHRDLADFRIQHPDLILLQYVDDLLLAATSEQDCQRGTRALLQTLGNLGYRASAKKAQICQKQVKYLGYLLKEGQRWLTEARKETVMGQPTPKTPRQLREFLGTAGFCRLWIPGFAEMAAPLYPLTKPGTLFNWGPDQQKAYQEIKQALLTAPALGLPDLTKPFELFVDEKQGYAKGVLTQKLGPWRRPVAYLSKKLDPVAAGWPPCLRMVAAIAVLTKDAGKLTMGQPLVILAPHAVEALVKQPPDRWLSNARMTHYQAMLLDTDRVQFGPVVALNPATLLPLPEKEAPHDCLEILAETHGTRPDLTDQPIPDADYTWYTDGSSFLQEGQRRAGAAVTTETEVIWARALPAGTSAQRAELIALTQALKMAEGKKLNVYTDSRYAFATAHVHGEIYRRRGWLTSEGREIKNKNEILALLKALFLPKRLSIIHCPGHQKGNSAEARGNRMADQAAREAAMKAVLETSTLLAGKRTADGSEFEKRTADGSEFESPKKKAKVE

SEQ ID NO: 973 - protein, 2096 aa, synthetic construct
  source 1..2096: note = Description of Artificial Sequence: Synthetic polypeptide
MPAAKRVKLDGGDKKYSIGLDIGTNSVGWAVITDEYKVPSKKFKVLGNTDRHSIKKNLIGALLFDSGETAEATRLKRTARRRYTRRKNRICYLQEIFSNEMAKVDDSFFHRLEESFLVEEDKKHERHPIFGNIVDEVAYHEKYPTIYHLRKKLVDSTDKADLRLIYLALAHMIKFRGHFLIEGDLNPDNSDVDKLFIQLVQTYNQLFEENPINASGVDAKAILSARLSKSRRLENLIAQLPGEKKNGLFGNLIALSLGLTPNFKSNFDLAEDAKLQLSKDTYDDDLDNLLAQIGDQYADLFLAAKNLSDAILLSDILRVNTEITKAPLSASMIKRYDEHHQDLTLLKALVRQQLPEKYKEIFFDQSKNGYAGYIDGGASQEEFYKFIKPILEKMDGTEELLVKLNREDLLRKQRTFDNGSIPHQIHLGELHAILRRQEDFYPFLKDNREKIEKILTFRIPYYVGPLARGNSRFAWMTRKSEETITPWNFEEVVDKGASAQSFIERMTNFDKNLPNEKVLPKHSLLYEYFTVYNELTKVKYVTEGMRKPAFLSGEQKKAIVDLLFKTNRKVTVKQLKEDYFKKIECFDSVEISGVEDRFNASLGTYHDLLKIIKDKDFLDNEENEDILEDIVLTLTLFEDREMIEERLKTYAHLFDDKVMKQLKRRRYTGWGRLSRKLINGIRDKQSGKTILDFLKSDGFANRNFMQLIHDDSLTFKEDIQKAQVSGQGDSLHEHIANLAGSPAIKKGILQTVKVVDELVKVMGRHKPENIVIEMARENQTTQKGQKNSRERMKRIEEGIKELGSQILKEHPVENTQLQNEKLYLYYLQNGRDMYVDQELDINRLSDYDVDHIVPQSFLKDDSIDNKVLTRSDKARGKSDNVPSEEVVKKMKNYWRQLLNAKLITQRKFDNLTKAERGGLSELDKAGFIKRQLVETRQITKHVAQILDSRMNTKYDENDKLIREVKVITLKSKLVSDFRKDFQFYKVREINNYHHAHDAYLNAVVGTALIKKYPKLESEFVYGDYKVYDVRKMIAKSEQEIGKATAKYFFYSNIMNFFKTEITLANGEIRKRPLIETNGETGEIVWDKGRDFATVRKVLSMPQVNIVKKTEVQTGGFSKESILPKRNSDKLIARKKDWDPKKYGGFDSPTVAYSVLVVAKVEKGKSKKLKSVKELLGITIMERSSFEKNPIDFLEAKGYKEVKKDLIIKLPKYSLFELENGRKRMLASAGELQKGNELALPSKYVNFLYLASHYEKLKGSPEDNEQKQLFVEQHKHYLDEIIEQISEFSKRVILADANLDKVLSAYNKHRDKPIREQAENIIHLFTLTNLGAPAAFKYFDTTIDRKRYTSTKEVLDATLIHQSITGLYETRIDLSQLGGDGGGGGGGSEAAAKGGTLNIEDEYRLHETSKEPDVPLGSTWLSDFPQAWAETGGMGLAVRQAPLIIPLKATSTPVSIKQYPMSQEARLGIKPHIQRLLDQGILVPCQSPWNTPLLPVKKPGTNDYRPVQDLREVNKRVEDIHPTVPNPYNLLSGLPPSHQWYTVLDLKDAFFCLRLHPTSQPLFAFEWRDPEMGISGQLTWTRLPQGFKNSPTLFNEALHRDLADFRIQHPDLILLQYVDDLLLAATSEQDCQRGTRALLQTLGNLGYRASAKKAQICQKQVKYLGYLLKEGQRWLTEARKETVMGQPTPKTPRQLREFLGTAGFCRLWIPGFAEMAAPLYPLTKPGTLFNWGPDQQKAYQEIKQALLTAPALGLPDLTKPFELFVDEKQGYAKGVLTQKLGPWRRPVAYLSKKLDPVAAGWPPCLRMVAAIAVLTKDAGKLTMGQPLVILAPHAVEALVKQPPDRWLSNARMTHYQAMLLDTDRVQFGPVVALNPATLLPLPEKEAPHDCLEILAETHGTRPDLTDQPIPDADYTWYTDGSSFLQEGQRRAGAAVTTETEVIWARALPAGTSAQRAELIALTQALKMAEGKKLNVYTDSRYAFATAHVHGEIYRRRGWLTSEGREIKNKNEILALLKALFLPKRLSIIHCPGHQKGNSAEARGNRMADQAAREAAMKAVLETSTLLAGKRTADGSEFEKRTADGSEFESPKKKAKVE

SEQ ID NO: 974 - protein, 2091 aa, synthetic construct
  source 1..2091: note = Description of Artificial Sequence: Synthetic polypeptide
MPAAKRVKLDGGDKKYSIGLDIGTNSVGWAVITDEYKVPSKKFKVLGNTDRHSIKKNLIGALLFDSGETAEATRLKRTARRRYTRRKNRICYLQEIFSNEMAKVDDSFFHRLEESFLVEEDKKHERHPIFGNIVDEVAYHEKYPTIYHLRKKLVDSTDKADLRLIYLALAHMIKFRGHFLIEGDLNPDNSDVDKLFIQLVQTYNQLFEENPINASGVDAKAILSARLSKSRRLENLIAQLPGEKKNGLFGNLIALSLGLTPNFKSNFDLAEDAKLQLSKDTYDDDLDNLLAQIGDQYADLFLAAKNLSDAILLSDILRVNTEITKAPLSASMIKRYDEHHQDLTLLKALVRQQLPEKYKEIFFDQSKNGYAGYIDGGASQEEFYKFIKPILEKMDGTEELLVKLNREDLLRKQRTFDNGSIPHQIHLGELHAILRRQEDFYPFLKDNREKIEKILTFRIPYYVGPLARGNSRFAWMTRKSEETITPWNFEEVVDKGASAQSFIERMTNFDKNLPNEKVLPKHSLLYEYFTVYNELTKVKYVTEGMRKPAFLSGEQKKAIVDLLFKTNRKVTVKQLKEDYFKKIECFDSVEISGVEDRFNASLGTYHDLLKIIKDKDFLDNEENEDILEDIVLTLTLFEDREMIEERLKTYAHLFDDKVMKQLKRRRYTGWGRLSRKLINGIRDKQSGKTILDFLKSDGFANRNFMQLIHDDSLTFKEDIQKAQVSGQGDSLHEHIANLAGSPAIKKGILQTVKVVDELVKVMGRHKPENIVIEMARENQTTQKGQKNSRERMKRIEEGIKELGSQILKEHPVENTQLQNEKLYLYYLQNGRDMYVDQELDINRLSDYDVDHIVPQSFLKDDSIDNKVLTRSDKARGKSDNVPSEEVVKKMKNYWRQLLNAKLITQRKFDNLTKAERGGLSELDKAGFIKRQLVETRQITKHVAQILDSRMNTKYDENDKLIREVKVITLKSKLVSDFRKDFQFYKVREINNYHHAHDAYLNAVVGTALIKKYPKLESEFVYGDYKVYDVRKMIAKSEQEIGKATAKYFFYSNIMNFFKTEITLANGEIRKRPLIETNGETGEIVWDKGRDFATVRKVLSMPQVNIVKKTEVQTGGFSKESILPKRNSDKLIARKKDWDPKKYGGFDSPTVAYSVLVVAKVEKGKSKKLKSVKELLGITIMERSSFEKNPIDFLEAKGYKEVKKDLIIKLPKYSLFELENGRKRMLASAGELQKGNELALPSKYVNFLYLASHYEKLKGSPEDNEQKQLFVEQHKHYLDEIIEQISEFSKRVILADANLDKVLSAYNKHRDKPIREQAENIIHLFTLTNLGAPAAFKYFDTTIDRKRYTSTKEVLDATLIHQSITGLYETRIDLSQLGGDGGGGGGGSGGTLNIEDEYRLHETSKEPDVPLGSTWLSDFPQAWAETGGMGLAVRQAPLIIPLKATSTPVSIKQYPMSQEARLGIKPHIQRLLDQGILVPCQSPWNTPLLPVKKPGTNDYRPVQDLREVNKRVEDIHPTVPNPYNLLSGLPPSHQWYTVLDLKDAFFCLRLHPTSQPLFAFEWRDPEMGISGQLTWTRLPQGFKNSPTLFNEALHRDLADFRIQHPDLILLQYVDDLLLAATSEQDCQRGTRALLQTLGNLGYRASAKKAQICQKQVKYLGYLLKEGQRWLTEARKETVMGQPTPKTPRQLREFLGTAGFCRLWIPGFAEMAAPLYPLTKPGTLFNWGPDQQKAYQEIKQALLTAPALGLPDLTKPFELFVDEKQGYAKGVLTQKLGPWRRPVAYLSKKLDPVAAGWPPCLRMVAAIAVLTKDAGKLTMGQPLVILAPHAVEALVKQPPDRWLSNARMTHYQAMLLDTDRVQFGPVVALNPATLLPLPEKEAPHDCLEILAETHGTRPDLTDQPIPDADYTWYTDGSSFLQEGQRRAGAAVTTETEVIWARALPAGTSAQRAELIALTQALKMAEGKKLNVYTDSRYAFATAHVHGEIYRRRGWLTSEGREIKNKNEILALLKALFLPKRLSIIHCPGHQKGNSAEARGNRMADQAAREAAMKAVLETSTLLAGKRTADGSEFEKRTADGSEFESPKKKAKVE

SEQ ID NO: 975 - protein, 2096 aa, synthetic construct
  source 1..2096: note = Description of Artificial Sequence: Synthetic polypeptide
MPAAKRVKLDGGDKKYSIGLDIGTNSVGWAVITDEYKVPSKKFKVLGNTDRHSIKKNLIGALLFDSGETAEATRLKRTARRRYTRRKNRICYLQEIFSNEMAKVDDSFFHRLEESFLVEEDKKHERHPIFGNIVDEVAYHEKYPTIYHLRKKLVDSTDKADLRLIYLALAHMIKFRGHFLIEGDLNPDNSDVDKLFIQLVQTYNQLFEENPINASGVDAKAILSARLSKSRRLENLIAQLPGEKKNGLFGNLIALSLGLTPNFKSNFDLAEDAKLQLSKDTYDDDLDNLLAQIGDQYADLFLAAKNLSDAILLSDILRVNTEITKAPLSASMIKRYDEHHQDLTLLKALVRQQLPEKYKEIFFDQSKNGYAGYIDGGASQEEFYKFIKPILEKMDGTEELLVKLNREDLLRKQRTFDNGSIPHQIHLGELHAILRRQEDFYPFLKDNREKIEKILTFRIPYYVGPLARGNSRFAWMTRKSEETITPWNFEEVVDKGASAQSFIERMTNFDKNLPNEKVLPKHSLLYEYFTVYNELTKVKYVTEGMRKPAFLSGEQKKAIVDLLFKTNRKVTVKQLKEDYFKKIECFDSVEISGVEDRFNASLGTYHDLLKIIKDKDFLDNEENEDILEDIVLTLTLFEDREMIEERLKTYAHLFDDKVMKQLKRRRYTGWGRLSRKLINGIRDKQSGKTILDFLKSDGFANRNFMQLIHDDSLTFKEDIQKAQVSGQGDSLHEHIANLAGSPAIKKGILQTVKVVDELVKVMGRHKPENIVIEMARENQTTQKGQKNSRERMKRIEEGIKELGSQILKEHPVENTQLQNEKLYLYYLQNGRDMYVDQELDINRLSDYDVDHIVPQSFLKDDSIDNKVLTRSDKARGKSDNVPSEEVVKKMKNYWRQLLNAKLITQRKFDNLTKAERGGLSELDKAGFIKRQLVETRQITKHVAQILDSRMNTKYDENDKLIREVKVITLKSKLVSDFRKDFQFYKVREINNYHHAHDAYLNAVVGTALIKKYPKLESEFVYGDYKVYDVRKMIAKSEQEIGKATAKYFFYSNIMNFFKTEITLANGEIRKRPLIETNGETGEIVWDKGRDFATVRKVLSMPQVNIVKKTEVQTGGFSKESILPKRNSDKLIARKKDWDPKKYGGFDSPTVAYSVLVVAKVEKGKSKKLKSVKELLGITIMERSSFEKNPIDFLEAKGYKEVKKDLIIKLPKYSLFELENGRKRMLASAGELQKGNELALPSKYVNFLYLASHYEKLKGSPEDNEQKQLFVEQHKHYLDEIIEQISEFSKRVILADANLDKVLSAYNKHRDKPIREQAENIIHLFTLTNLGAPAAFKYFDTTIDRKRYTSTKEVLDATLIHQSITGLYETRIDLSQLGGDGGGSSGGSEAAAKGGTLNIEDEYRLHETSKEPDVPLGSTWLSDFPQAWAETGGMGLAVRQAPLIIPLKATSTPVSIKQYPMSQEARLGIKPHIQRLLDQGILVPCQSPWNTPLLPVKKPGTNDYRPVQDLREVNKRVEDIHPTVPNPYNLLSGLPPSHQWYTVLDLKDAFFCLRLHPTSQPLFAFEWRDPEMGISGQLTWTRLPQGFKNSPTLFNEALHRDLADFRIQHPDLILLQYVDDLLLAATSEQDCQRGTRALLQTLGNLGYRASAKKAQICQKQVKYLGYLLKEGQRWLTEARKETVMGQPTPKTPRQLREFLGTAGFCRLWIPGFAEMAAPLYPLTKPGTLFNWGPDQQKAYQEIKQALLTAPALGLPDLTKPFELFVDEKQGYAKGVLTQKLGPWRRPVAYLSKKLDPVAAGWPPCLRMVAAIAVLTKDAGKLTMGQPLVILAPHAVEALVKQPPDRWLSNARMTHYQAMLLDTDRVQFGPVVALNPATLLPLPEKEAPHDCLEILAETHGTRPDLTDQPIPDADYTWYTDGSSFLQEGQRRAGAAVTTETEVIWARALPAGTSAQRAELIALTQALKMAEGKKLNVYTDSRYAFATAHVHGEIYRRRGWLTSEGREIKNKNEILALLKALFLPKRLSIIHCPGHQKGNSAEARGNRMADQAAREAAMKAVLETSTLLAGKRTADGSEFEKRTADGSEFESPKKKAKVE

SEQ ID NO: 976 - protein, 2115 aa, synthetic construct
  source 1..2115: note = Description of Artificial Sequence: Synthetic polypeptide
MPAAKRVKLDGGDKKYSIGLDIGTNSVGWAVITDEYKVPSKKFKVLGNTDRHSIKKNLIGALLFDSGETAEATRLKRTARRRYTRRKNRICYLQEIFSNEMAKVDDSFFHRLEESFLVEEDKKHERHPIFGNIVDEVAYHEKYPTIYHLRKKLVDSTDKADLRLIYLALAHMIKFRGHFLIEGDLNPDNSDVDKLFIQLVQTYNQLFEENPINASGVDAKAILSARLSKSRRLENLIAQLPGEKKNGLFGNLIALSLGLTPNFKSNFDLAEDAKLQLSKDTYDDDLDNLLAQIGDQYADLFLAAKNLSDAILLSDILRVNTEITKAPLSASMIKRYDEHHQDLTLLKALVRQQLPEKYKEIFFDQSKNGYAGYIDGGASQEEFYKFIKPILEKMDGTEELLVKLNREDLLRKQRTFDNGSIPHQIHLGELHAILRRQEDFYPFLKDNREKIEKILTFRIPYYVGPLARGNSRFAWMTRKSEETITPWNFEEVVDKGASAQSFIERMTNFDKNLPNEKVLPKHSLLYEYFTVYNELTKVKYVTEGMRKPAFLSGEQKKAIVDLLFKTNRKVTVKQLKEDYFKKIECFDSVEISGVEDRFNASLGTYHDLLKIIKDKDFLDNEENEDILEDIVLTLTLFEDREMIEERLKTYAHLFDDKVMKQLKRRRYTGWGRLSRKLINGIRDKQSGKTILDFLKSDGFANRNFMQLIHDDSLTFKEDIQKAQVSGQGDSLHEHIANLAGSPAIKKGILQTVKVVDELVKVMGRHKPENIVIEMARENQTTQKGQKNSRERMKRIEEGIKELGSQILKEHPVENTQLQNEKLYLYYLQNGRDMYVDQELDINRLSDYDVDHIVPQSFLKDDSIDNKVLTRSDKARGKSDNVPSEEVVKKMKNYWRQLLNAKLITQRKFDNLTKAERGGLSELDKAGFIKRQLVETRQITKHVAQILDSRMNTKYDENDKLIREVKVITLKSKLVSDFRKDFQFYKVREINNYHHAHDAYLNAVVGTALIKKYPKLESEFVYGDYKVYDVRKMIAKSEQEIGKATAKYFFYSNIMNFFKTEITLANGEIRKRPLIETNGETGEIVWDKGRDFATVRKVLSMPQVNIVKKTEVQTGGFSKESILPKRNSDKLIARKKDWDPKKYGGFDSPTVAYSVLVVAKVEKGKSKKLKSVKELLGITIMERSSFEKNPIDFLEAKGYKEVKKDLIIKLPKYSLFELENGRKRMLASAGELQKGNELALPSKYVNFLYLASHYEKLKGSPEDNEQKQLFVEQHKHYLDEIIEQISEFSKRVILADANLDKVLSAYNKHRDKPIREQAENIIHLFTLTNLGAPAAFKYFDTTIDRKRYTSTKEVLDATLIHQSITGLYETRIDLSQLGGDGGGGGGSGGGGSGGGGSGGGGSGGGGSGGGGSGGTLNIEDEYRLHETSKEPDVPLGSTWLSDFPQAWAETGGMGLAVRQAPLIIPLKATSTPVSIKQYPMSQEARLGIKPHIQRLLDQGILVPCQSPWNTPLLPVKKPGTNDYRPVQDLREVNKRVEDIHPTVPNPYNLLSGLPPSHQWYTVLDLKDAFFCLRLHPTSQPLFAFEWRDPEMGISGQLTWTRLPQGFKNSPTLFNEALHRDLADFRIQHPDLILLQYVDDLLLAATSEQDCQRGTRALLQTLGNLGYRASAKKAQICQKQVKYLGYLLKEGQRWLTEARKETVMGQPTPKTPRQLREFLGTAGFCRLWIPGFAEMAAPLYPLTKPGTLFNWGPDQQKAYQEIKQALLTAPALGLPDLTKPFELFVDEKQGYAKGVLTQKLGPWRRPVAYLSKKLDPVAAGWPPCLRMVAAIAVLTKDAGKLTMGQPLVILAPHAVEALVKQPPDRWLSNARMTHYQAMLLDTDRVQFGPVVALNPATLLPLPEKEAPHDCLEILAETHGTRPDLTDQPIPDADYTWYTDGSSFLQEGQRRAGAAVTTETEVIWARALPAGTSAQRAELIALTQALKMAEGKKLNVYTDSRYAFATAHVHGEIYRRRGWLTSEGREIKNKNEILALLKALFLPKRLSIIHCPGHQKGNSAEARGNRMADQAAREAAMKAVLETSTLLAGKRTADGSEFEKRTADGSEFESPKKKAKVE

SEQ ID NO: 977 - protein, 2105 aa, synthetic construct
  source 1..2105: note = Description of Artificial Sequence: Synthetic polypeptide
MPAAKRVKLDGGDKKYSIGLDIGTNSVGWAVITDEYKVPSKKFKVLGNTDRHSIKKNLIGALLFDSGETAEATRLKRTARRRYTRRKNRICYLQEIFSNEMAKVDDSFFHRLEESFLVEEDKKHERHPIFGNIVDEVAYHEKYPTIYHLRKKLVDSTDKADLRLIYLALAHMIKFRGHFLIEGDLNPDNSDVDKLFIQLVQTYNQLFEENPINASGVDAKAILSARLSKSRRLENLIAQLPGEKKNGLFGNLIALSLGLTPNFKSNFDLAEDAKLQLSKDTYDDDLDNLLAQIGDQYADLFLAAKNLSDAILLSDILRVNTEITKAPLSASMIKRYDEHHQDLTLLKALVRQQLPEKYKEIFFDQSKNGYAGYIDGGASQEEFYKFIKPILEKMDGTEELLVKLNREDLLRKQRTFDNGSIPHQIHLGELHAILRRQEDFYPFLKDNREKIEKILTFRIPYYVGPLARGNSRFAWMTRKSEETITPWNFEEVVDKGASAQSFIERMTNFDKNLPNEKVLPKHSLLYEYFTVYNELTKVKYVTEGMRKPAFLSGEQKKAIVDLLFKTNRKVTVKQLKEDYFKKIECFDSVEISGVEDRFNASLGTYHDLLKIIKDKDFLDNEENEDILEDIVLTLTLFEDREMIEERLKTYAHLFDDKVMKQLKRRRYTGWGRLSRKLINGIRDKQSGKTILDFLKSDGFANRNFMQLIHDDSLTFKEDIQKAQVSGQGDSLHEHIANLAGSPAIKKGILQTVKVVDELVKVMGRHKPENIVIEMARENQTTQKGQKNSRERMKRIEEGIKELGSQILKEHPVENTQLQNEKLYLYYLQNGRDMYVDQELDINRLSDYDVDHIVPQSFLKDDSIDNKVLTRSDKARGKSDNVPSEEVVKKMKNYWRQLLNAKLITQRKFDNLTKAERGGLSELDKAGFIKRQLVETRQITKHVAQILDSRMNTKYDENDKLIREVKVITLKSKLVSDFRKDFQFYKVREINNYHHAHDAYLNAVVGTALIKKYPKLESEFVYGDYKVYDVRKMIAKSEQEIGKATAKYFFYSNIMNFFKTEITLANGEIRKRPLIETNGETGEIVWDKGRDFATVRKVLSMPQVNIVKKTEVQTGGFSKESILPKRNSDKLIARKKDWDPKKYGGFDSPTVAYSVLVVAKVEKGKSKKLKSVKELLGITIMERSSFEKNPIDFLEAKGYKEVKKDLIIKLPKYSLFELENGRKRMLASAGELQKGNELALPSKYVNFLYLASHYEKLKGSPEDNEQKQLFVEQHKHYLDEIIEQISEFSKRVILADANLDKVLSAYNKHRDKPIREQAENIIHLFTLTNLGAPAAFKYFDTTIDRKRYTSTKEVLDATLIHQSITGLYETRIDLSQLGGDGGGGGGSGGGGSGGGGSGGGGSGGTLNIEDEYRLHETSKEPDVPLGSTWLSDFPQAWAETGGMGLAVRQAPLIIPLKATSTPVSIKQYPMSQEARLGIKPHIQRLLDQGILVPCQSPWNTPLLPVKKPGTNDYRPVQDLREVNKRVEDIHPTVPNPYNLLSGLPPSHQWYTVLDLKDAFFCLRLHPTSQPLFAFEWRDPEMGISGQLTWTRLPQGFKNSPTLFNEALHRDLADFRIQHPDLILLQYVDDLLLAATSEQDCQRGTRALLQTLGNLGYRASAKKAQICQKQVKYLGYLLKEGQRWLTEARKETVMGQPTPKTPRQLREFLGTAGFCRLWIPGFAEMAAPLYPLTKPGTLFNWGPDQQKAYQEIKQALLTAPALGLPDLTKPFELFVDEKQGYAKGVLTQKLGPWRRPVAYLSKKLDPVAAGWPPCLRMVAAIAVLTKDAGKLTMGQPLVILAPHAVEALVKQPPDRWLSNARMTHYQAMLLDTDRVQFGPVVALNPATLLPLPEKEAPHDCLEILAETHGTRPDLTDQPIPDADYTWYTDGSSFLQEGQRRAGAAVTTETEVIWARALPAGTSAQRAELIALTQALKMAEGKKLNVYTDSRYAFATAHVHGEIYRRRGWLTSEGREIKNKNEILALLKALFLPKRLSIIHCPGHQKGNSAEARGNRMADQAAREAAMKAVLETSTLLAGKRTADGSEFEKRTADGSEFESPKKKAKVE

SEQ ID NO: 978 - protein, 2094 aa, synthetic construct
  source 1..2094: note = Description of Artificial Sequence: Synthetic polypeptide
MPAAKRVKLDGGDKKYSIGLDIGTNSVGWAVITDEYKVPSKKFKVLGNTDRHSIKKNLIGALLFDSGETAEATRLKRTARRRYTRRKNRICYLQEIFSNEMAKVDDSFFHRLEESFLVEEDKKHERHPIFGNIVDEVAYHEKYPTIYHLRKKLVDSTDKADLRLIYLALAHMIKFRGHFLIEGDLNPDNSDVDKLFIQLVQTYNQLFEENPINASGVDAKAILSARLSKSRRLENLIAQLPGEKKNGLFGNLIALSLGLTPNFKSNFDLAEDAKLQLSKDTYDDDLDNLLAQIGDQYADLFLAAKNLSDAILLSDILRVNTEITKAPLSASMIKRYDEHHQDLTLLKALVRQQLPEKYKEIFFDQSKNGYAGYIDGGASQEEFYKFIKPILEKMDGTEELLVKLNREDLLRKQRTFDNGSIPHQIHLGELHAILRRQEDFYPFLKDNREKIEKILTFRIPYYVGPLARGNSRFAWMTRKSEETITPWNFEEVVDKGASAQSFIERMTNFDKNLPNEKVLPKHSLLYEYFTVYNELTKVKYVTEGMRKPAFLSGEQKKAIVDLLFKTNRKVTVKQLKEDYFKKIECFDSVEISGVEDRFNASLGTYHDLLKIIKDKDFLDNEENEDILEDIVLTLTLFEDREMIEERLKTYAHLFDDKVMKQLKRRRYTGWGRLSRKLINGIRDKQSGKTILDFLKSDGFANRNFMQLIHDDSLTFKEDIQKAQVSGQGDSLHEHIANLAGSPAIKKGILQTVKVVDELVKVMGRHKPENIVIEMARENQTTQKGQKNSRERMKRIEEGIKELGSQILKEHPVENTQLQNEKLYLYYLQNGRDMYVDQELDINRLSDYDVDHIVPQSFLKDDSIDNKVLTRSDKARGKSDNVPSEEVVKKMKNYWRQLLNAKLITQRKFDNLTKAERGGLSELDKAGFIKRQLVETRQITKHVAQILDSRMNTKYDENDKLIREVKVITLKSKLVSDFRKDFQFYKVREINNYHHAHDAYLNAVVGTALIKKYPKLESEFVYGDYKVYDVRKMIAKSEQEIGKATAKYFFYSNIMNFFKTEITLANGEIRKRPLIETNGETGEIVWDKGRDFATVRKVLSMPQVNIVKKTEVQTGGFSKESILPKRNSDKLIARKKDWDPKKYGGFDSPTVAYSVLVVAKVEKGKSKKLKSVKELLGITIMERSSFEKNPIDFLEAKGYKEVKKDLIIKLPKYSLFELENGRKRMLASAGELQKGNELALPSKYVNFLYLASHYEKLKGSPEDNEQKQLFVEQHKHYLDEIIEQISEFSKRVILADANLDKVLSAYNKHRDKPIREQAENIIHLFTLTNLGAPAAFKYFDTTIDRKRYTSTKEVLDATLIHQSITGLYETRIDLSQLGGDGGPAPAPAPAPGGTLNIEDEYRLHETSKEPDVPLGSTWLSDFPQAWAETGGMGLAVRQAPLIIPLKATSTPVSIKQYPMSQEARLGIKPHIQRLLDQGILVPCQSPWNTPLLPVKKPGTNDYRPVQDLREVNKRVEDIHPTVPNPYNLLSGLPPSHQWYTVLDLKDAFFCLRLHPTSQPLFAFEWRDPEMGISGQLTWTRLPQGFKNSPTLFNEALHRDLADFRIQHPDLILLQYVDDLLLAATSEQDCQRGTRALLQTLGNLGYRASAKKAQICQKQVKYLGYLLKEGQRWLTEARKETVMGQPTPKTPRQLREFLGTAGFCRLWIPGFAEMAAPLYPLTKPGTLFNWGPDQQKAYQEIKQALLTAPALGLPDLTKPFELFVDEKQGYAKGVLTQKLGPWRRPVAYLSKKLDPVAAGWPPCLRMVAAIAVLTKDAGKLTMGQPLVILAPHAVEALVKQPPDRWLSNARMTHYQAMLLDTDRVQFGPVVALNPATLLPLPEKEAPHDCLEILAETHGTRPDLTDQPIPDADYTWYTDGSSFLQEGQRRAGAAVTTETEVIWARALPAGTSAQRAELIALTQALKMAEGKKLNVYTDSRYAFATAHVHGEIYRRRGWLTSEGREIKNKNEILALLKALFLPKRLSIIHCPGHQKGNSAEARGNRMADQAAREAAMKAVLETSTLLAGKRTADGSEFEKRTADGSEFESPKKKAKVE

SEQ ID NO: 979 - protein, 2096 aa, synthetic construct
  source 1..2096: note = Description of Artificial Sequence: Synthetic polypeptide
MPAAKRVKLDGGDKKYSIGLDIGTNSVGWAVITDEYKVPSKKFKVLGNTDRHSIKKNLIGALLFDSGETAEATRLKRTARRRYTRRKNRICYLQEIFSNEMAKVDDSFFHRLEESFLVEEDKKHERHPIFGNIVDEVAYHEKYPTIYHLRKKLVDSTDKADLRLIYLALAHMIKFRGHFLIEGDLNPDNSDVDKLFIQLVQTYNQLFEENPINASGVDAKAILSARLSKSRRLENLIAQLPGEKKNGLFGNLIALSLGLTPNFKSNFDLAEDAKLQLSKDTYDDDLDNLLAQIGDQYADLFLAAKNLSDAILLSDILRVNTEITKAPLSASMIKRYDEHHQDLTLLKALVRQQLPEKYKEIFFDQSKNGYAGYIDGGASQEEFYKFIKPILEKMDGTEELLVKLNREDLLRKQRTFDNGSIPHQIHLGELHAILRRQEDFYPFLKDNREKIEKILTFRIPYYVGPLARGNSRFAWMTRKSEETITPWNFEEVVDKGASAQSFIERMTNFDKNLPNEKVLPKHSLLYEYFTVYNELTKVKYVTEGMRKPAFLSGEQKKAIVDLLFKTNRKVTVKQLKEDYFKKIECFDSVEISGVEDRFNASLGTYHDLLKIIKDKDFLDNEENEDILEDIVLTLTLFEDREMIEERLKTYAHLFDDKVMKQLKRRRYTGWGRLSRKLINGIRDKQSGKTILDFLKSDGFANRNFMQLIHDDSLTFKEDIQKAQVSGQGDSLHEHIANLAGSPAIKKGILQTVKVVDELVKVMGRHKPENIVIEMARENQTTQKGQKNSRERMKRIEEGIKELGSQILKEHPVENTQLQNEKLYLYYLQNGRDMYVDQELDINRLSDYDVDHIVPQSFLKDDSIDNKVLTRSDKARGKSDNVPSEEVVKKMKNYWRQLLNAKLITQRKFDNLTKAERGGLSELDKAGFIKRQLVETRQITKHVAQILDSRMNTKYDENDKLIREVKVITLKSKLVSDFRKDFQFYKVREINNYHHAHDAYLNAVVGTALIKKYPKLESEFVYGDYKVYDVRKMIAKSEQEIGKATAKYFFYSNIMNFFKTEITLANGEIRKRPLIETNGETGEIVWDKGRDFATVRKVLSMPQVNIVKKTEVQTGGFSKESILPKRNSDKLIARKKDWDPKKYGGFDSPTVAYSVLVVAKVEKGKSKKLKSVKELLGITIMERSSFEKNPIDFLEAKGYKEVKKDLIIKLPKYSLFELENGRKRMLASAGELQKGNELALPSKYVNFLYLASHYEKLKGSPEDNEQKQLFVEQHKHYLDEIIEQISEFSKRVILADANLDKVLSAYNKHRDKPIREQAENIIHLFTLTNLGAPAAFKYFDTTIDRKRYTSTKEVLDATLIHQSITGLYETRIDLSQLGGDGGGGGEAAAKGGSGGTLNIEDEYRLHETSKEPDVPLGSTWLSDFPQAWAETGGMGLAVRQAPLIIPLKATSTPVSIKQYPMSQEARLGIKPHIQRLLDQGILVPCQSPWNTPLLPVKKPGTNDYRPVQDLREVNKRVEDIHPTVPNPYNLLSGLPPSHQWYTVLDLKDAFFCLRLHPTSQPLFAFEWRDPEMGISGQLTWTRLPQGFKNSPTLFNEALHRDLADFRIQHPDLILLQYVDDLLLAATSEQDCQRGTRALLQTLGNLGYRASAKKAQICQKQVKYLGYLLKEGQRWLTEARKETVMGQPTPKTPRQLREFLGTAGFCRLWIPGFAEMAAPLYPLTKPGTLFNWGPDQQKAYQEIKQALLTAPALGLPDLTKPFELFVDEKQGYAKGVLTQKLGPWRRPVAYLSKKLDPVAAGWPPCLRMVAAIAVLTKDAGKLTMGQPLVILAPHAVEALVKQPPDRWLSNARMTHYQAMLLDTDRVQFGPVVALNPATLLPLPEKEAPHDCLEILAETHGTRPDLTDQPIPDADYTWYTDGSSFLQEGQRRAGAAVTTETEVIWARALPAGTSAQRAELIALTQALKMAEGKKLNVYTDSRYAFATAHVHGEIYRRRGWLTSEGREIKNKNEILALLKALFLPKRLSIIHCPGHQKGNSAEARGNRMADQAAREAAMKAVLETSTLLAGKRTADGSEFEKRTADGSEFESPKKKAKVE

SEQ ID NO: 980 - protein, 2094 aa, synthetic construct
  source 1..2094: note = Description of Artificial Sequence: Synthetic polypeptide
MPAAKRVKLDGGDKKYSIGLDIGTNSVGWAVITDEYKVPSKKFKVLGNTDRHSIKKNLIGALLFDSGETAEATRLKRTARRRYTRRKNRICYLQEIFSNEMAKVDDSFFHRLEESFLVEEDKKHERHPIFGNIVDEVAYHEKYPTIYHLRKKLVDSTDKADLRLIYLALAHMIKFRGHFLIEGDLNPDNSDVDKLFIQLVQTYNQLFEENPINASGVDAKAILSARLSKSRRLENLIAQLPGEKKNGLFGNLIALSLGLTPNFKSNFDLAEDAKLQLSKDTYDDDLDNLLAQIGDQYADLFLAAKNLSDAILLSDILRVNTEITKAPLSASMIKRYDEHHQDLTLLKALVRQQLPEKYKEIFFDQSKNGYAGYIDGGASQEEFYKFIKPILEKMDGTEELLVKLNREDLLRKQRTFDNGSIPHQIHLGELHAILRRQEDFYPFLKDNREKIEKILTFRIPYYVGPLARGNSRFAWMTRKSEETITPWNFEEVVDKGASAQSFIERMTNFDKNLPNEKVLPKHSLLYEYFTVYNELTKVKYVTEGMRKPAFLSGEQKKAIVDLLFKTNRKVTVKQLKEDYFKKIECFDSVEISGVEDRFNASLGTYHDLLKIIKDKDFLDNEENEDILEDIVLTLTLFEDREMIEERLKTYAHLFDDKVMKQLKRRRYTGWGRLSRKLINGIRDKQSGKTILDFLKSDGFANRNFMQLIHDDSLTFKEDIQKAQVSGQGDSLHEHIANLAGSPAIKKGILQTVKVVDELVKVMGRHKPENIVIEMARENQTTQKGQKNSRERMKRIEEGIKELGSQILKEHPVENTQLQNEKLYLYYLQNGRDMYVDQELDINRLSDYDVDHIVPQSFLKDDSIDNKVLTRSDKARGKSDNVPSEEVVKKMKNYWRQLLNAKLITQRKFDNLTKAERGGLSELDKAGFIKRQLVETRQITKHVAQILDSRMNTKYDENDKLIREVKVITLKSKLVSDFRKDFQFYKVREINNYHHAHDAYLNAVVGTALIKKYPKLESEFVYGDYKVYDVRKMIAKSEQEIGKATAKYFFYSNIMNFFKTEITLANGEIRKRPLIETNGETGEIVWDKGRDFATVRKVLSMPQVNIVKKTEVQTGGFSKESILPKRNSDKLIARKKDWDPKKYGGFDSPTVAYSVLVVAKVEKGKSKKLKSVKELLGITIMERSSFEKNPIDFLEAKGYKEVKKDLIIKLPKYSLFELENGRKRMLASAGELQKGNELALPSKYVNFLYLASHYEKLKGSPEDNEQKQLFVEQHKHYLDEIIEQISEFSKRVILADANLDKVLSAYNKHRDKPIREQAENIIHLFTLTNLGAPAAFKYFDTTIDRKRYTSTKEVLDATLIHQSITGLYETRIDLSQLGGDGGGGSGGSGGSGGTLNIEDEYRLHETSKEPDVPLGSTWLSDFPQAWAETGGMGLAVRQAPLIIPLKATSTPVSIKQYPMSQEARLGIKPHIQRLLDQGILVPCQSPWNTPLLPVKKPGTNDYRPVQDLREVNKRVEDIHPTVPNPYNLLSGLPPSHQWYTVLDLKDAFFCLRLHPTSQPLFAFEWRDPEMGISGQLTWTRLPQGFKNSPTLFNEALHRDLADFRIQHPDLILLQYVDDLLLAATSEQDCQRGTRALLQTLGNLGYRASAKKAQICQKQVKYLGYLLKEGQRWLTEARKETVMGQPTPKTPRQLREFLGTAGFCRLWIPGFAEMAAPLYPLTKPGTLFNWGPDQQKAYQEIKQALLTAPALGLPDLTKPFELFVDEKQGYAKGVLTQKLGPWRRPVAYLSKKLDPVAAGWPPCLRMVAAIAVLTKDAGKLTMGQPLVILAPHAVEALVKQPPDRWLSNARMTHYQAMLLDTDRVQFGPVVALNPATLLPLPEKEAPHDCLEILAETHGTRPDLTDQPIPDADYTWYTDGSSFLQEGQRRAGAAVTTETEVIWARALPAGTSAQRAELIALTQALKMAEGKKLNVYTDSRYAFATAHVHGEIYRRRGWLTSEGREIKNKNEILALLKALFLPKRLSIIHCPGHQKGNSAEARGNRMADQAAREAAMKAVLETSTLLAGKRTADGSEFEKRTADGSEFESPKKKAKVE

SEQ ID NO: 981 - protein, 2100 aa, synthetic construct
  source 1..2100: note = Description of Artificial Sequence: Synthetic polypeptide
MPAAKRVKLDGGDKKYSIGLDIGTNSVGWAVITDEYKVPSKKFKVLGNTDRHSIKKNLIGALLFDSGETAEATRLKRTARRRYTRRKNRICYLQEIFSNEMAKVDDSFFHRLEESFLVEEDKKHERHPIFGNIVDEVAYHEKYPTIYHLRKKLVDSTDKADLRLIYLALAHMIKFRGHFLIEGDLNPDNSDVDKLFIQLVQTYNQLFEENPINASGVDAKAILSARLSKSRRLENLIAQLPGEKKNGLFGNLIALSLGLTPNFKSNFDLAEDAKLQLSKDTYDDDLDNLLAQIGDQYADLFLAAKNLSDAILLSDILRVNTEITKAPLSASMIKRYDEHHQDLTLLKALVRQQLPEKYKEIFFDQSKNGYAGYIDGGASQEEFYKFIKPILEKMDGTEELLVKLNREDLLRKQRTFDNGSIPHQIHLGELHAILRRQEDFYPFLKDNREKIEKILTFRIPYYVGPLARGNSRFAWMTRKSEETITPWNFEEVVDKGASAQSFIERMTNFDKNLPNEKVLPKHSLLYEYFTVYNELTKVKYVTEGMRKPAFLSGEQKKAIVDLLFKTNRKVTVKQLKEDYFKKIECFDSVEISGVEDRFNASLGTYHDLLKIIKDKDFLDNEENEDILEDIVLTLTLFEDREMIEERLKTYAHLFDDKVMKQLKRRRYTGWGRLSRKLINGIRDKQSGKTILDFLKSDGFANRNFMQLIHDDSLTFKEDIQKAQVSGQGDSLHEHIANLAGSPAIKKGILQTVKVVDELVKVMGRHKPENIVIEMARENQTTQKGQKNSRERMKRIEEGIKELGSQILKEHPVENTQLQNEKLYLYYLQNGRDMYVDQELDINRLSDYDVDHIVPQSFLKDDSIDNKVLTRSDKARGKSDNVPSEEVVKKMKNYWRQLLNAKLITQRKFDNLTKAERGGLSELDKAGFIKRQLVETRQITKHVAQILDSRMNTKYDENDKLIREVKVITLKSKLVSDFRKDFQFYKVREINNYHHAHDAYLNAVVGTALIKKYPKLESEFVYGDYKVYDVRKMIAKSEQEIGKATAKYFFYSNIMNFFKTEITLANGEIRKRPLIETNGETGEIVWDKGRDFATVRKVLSMPQVNIVKKTEVQTGGFSKESILPKRNSDKLIARKKDWDPKKYGGFDSPTVAYSVLVVAKVEKGKSKKLKSVKELLGITIMERSSFEKNPIDFLEAKGYKEVKKDLIIKLPKYSLFELENGRKRMLASAGELQKGNELALPSKYVNFLYLASHYEKLKGSPEDNEQKQLFVEQHKHYLDEIIEQISEFSKRVILADANLDKVLSAYNKHRDKPIREQAENIIHLFTLTNLGAPAAFKYFDTTIDRKRYTSTKEVLDATLIHQSITGLYETRIDLSQLGGDGGEAAAKGGGGSEAAAKGGTLNIEDEYRLHETSKEPDVPLGSTWLSDFPQAWAETGGMGLAVRQAPLIIPLKATSTPVSIKQYPMSQEARLGIKPHIQRLLDQGILVPCQSPWNTPLLPVKKPGTNDYRPVQDLREVNKRVEDIHPTVPNPYNLLSGLPPSHQWYTVLDLKDAFFCLRLHPTSQPLFAFEWRDPEMGISGQLTWTRLPQGFKNSPTLFNEALHRDLADFRIQHPDLILLQYVDDLLLAATSEQDCQRGTRALLQTLGNLGYRASAKKAQICQKQVKYLGYLLKEGQRWLTEARKETVMGQPTPKTPRQLREFLGTAGFCRLWIPGFAEMAAPLYPLTKPGTLFNWGPDQQKAYQEIKQALLTAPALGLPDLTKPFELFVDEKQGYAKGVLTQKLGPWRRPVAYLSKKLDPVAAGWPPCLRMVAAIAVLTKDAGKLTMGQPLVILAPHAVEALVKQPPDRWLSNARMTHYQAMLLDTDRVQFGPVVALNPATLLPLPEKEAPHDCLEILAETHGTRPDLTDQPIPDADYTWYTDGSSFLQEGQRRAGAAVTTETEVIWARALPAGTSAQRAELIALTQALKMAEGKKLNVYTDSRYAFATAHVHGEIYRRRGWLTSEGREIKNKNEILALLKALFLPKRLSIIHCPGHQKGNSAEARGNRMADQAAREAAMKAVLETSTLLAGKRTADGSEFEKRTADGSEFESPKKKAKVE

SEQ ID NO: 982 - protein, 2093 aa, synthetic construct
  source 1..2093: note = Description of Artificial Sequence: Synthetic polypeptide
MPAAKRVKLDGGDKKYSIGLDIGTNSVGWAVITDEYKVPSKKFKVLGNTDRHSIKKNLIGALLFDSGETAEATRLKRTARRRYTRRKNRICYLQEIFSNEMAKVDDSFFHRLEESFLVEEDKKHERHPIFGNIVDEVAYHEKYPTIYHLRKKLVDSTDKADLRLIYLALAHMIKFRGHFLIEGDLNPDNSDVDKLFIQLVQTYNQLFEENPINASGVDAKAILSARLSKSRRLENLIAQLPGEKKNGLFGNLIALSLGLTPNFKSNFDLAEDAKLQLSKDTYDDDLDNLLAQIGDQYADLFLAAKNLSDAILLSDILRVNTEITKAPLSASMIKRYDEHHQDLTLLKALVRQQLPEKYKEIFFDQSKNGYAGYIDGGASQEEFYKFIKPILEKMDGTEELLVKLNREDLLRKQRTFDNGSIPHQIHLGELHAILRRQEDFYPFLKDNREKIEKILTFRIPYYVGPLARGNSRFAWMTRKSEETITPWNFEEVVDKGASAQSFIERMTNFDKNLPNEKVLPKHSLLYEYFTVYNELTKVKYVTEGMRKPAFLSGEQKKAIVDLLFKTNRKVTVKQLKEDYFKKIECFDSVEISGVEDRFNASLGTYHDLLKIIKDKDFLDNEENEDILEDIVLTLTLFEDREMIEERLKTYAHLFDDKVMKQLKRRRYTGWGRLSRKLINGIRDKQSGKTILDFLKSDGFANRNFMQLIHDDSLTFKEDIQKAQVSGQGDSLHEHIANLAGSPAIKKGILQTVKVVDELVKVMGRHKPENIVIEMARENQTTQKGQKNSRERMKRIEEGIKELGSQILKEHPVENTQLQNEKLYLYYLQNGRDMYVDQELDINRLSDYDVDHIVPQSFLKDDSIDNKVLTRSDKARGKSDNVPSEEVVKKMKNYWRQLLNAKLITQRKFDNLTKAERGGLSELDKAGFIKRQLVETRQITKHVAQILDSRMNTKYDENDKLIREVKVITLKSKLVSDFRKDFQFYKVREINNYHHAHDAYLNAVVGTALIKKYPKLESEFVYGDYKVYDVRKMIAKSEQEIGKATAKYFFYSNIMNFFKTEITLANGEIRKRPLIETNGETGEIVWDKGRDFATVRKVLSMPQVNIVKKTEVQTGGFSKESILPKRNSDKLIARKKDWDPKKYGGFDSPTVAYSVLVVAKVEKGKSKKLKSVKELLGITIMERSSFEKNPIDFLEAKGYKEVKKDLIIKLPKYSLFELENGRKRMLASAGELQKGNELALPSKYVNFLYLASHYEKLKGSPEDNEQKQLFVEQHKHYLDEIIEQISEFSKRVILADANLDKVLSAYNKHRDKPIREQAENIIHLFTLTNLGAPAAFKYFDTTIDRKRYTSTKEVLDATLIHQSITGLYETRIDLSQLGGDGGEAAAKPAPGGTLNIEDEYRLHETSKEPDVPLGSTWLSDFPQAWAETGGMGLAVRQAPLIIPLKATSTPVSIKQYPMSQEARLGIKPHIQRLLDQGILVPCQSPWNTPLLPVKKPGTNDYRPVQDLREVNKRVEDIHPTVPNPYNLLSGLPPSHQWYTVLDLKDAFFCLRLHPTSQPLFAFEWRDPEMGISGQLTWTRLPQGFKNSPTLFNEALHRDLADFRIQHPDLILLQYVDDLLLAATSEQDCQRGTRALLQTLGNLGYRASAKKAQICQKQVKYLGYLLKEGQRWLTEARKETVMGQPTPKTPRQLREFLGTAGFCRLWIPGFAEMAAPLYPLTKPGTLFNWGPDQQKAYQEIKQALLTAPALGLPDLTKPFELFVDEKQGYAKGVLTQKLGPWRRPVAYLSKKLDPVAAGWPPCLRMVAAIAVLTKDAGKLTMGQPLVILAPHAVEALVKQPPDRWLSNARMTHYQAMLLDTDRVQFGPVVALNPATLLPLPEKEAPHDCLEILAETHGTRPDLTDQPIPDADYTWYTDGSSFLQEGQRRAGAAVTTETEVIWARALPAGTSAQRAELIALTQALKMAEGKKLNVYTDSRYAFATAHVHGEIYRRRGWLTSEGREIKNKNEILALLKALFLPKRLSIIHCPGHQKGNSAEARGNRMADQAAREAAMKAVLETSTLLAGKRTADGSEFEKRTADGSEFESPKKKAKVE

SEQ ID NO: 983 - protein, 2090 aa, synthetic construct
  source 1..2090: note = Description of Artificial Sequence: Synthetic polypeptide
MPAAKRVKLDGGDKKYSIGLDIGTNSVGWAVITDEYKVPSKKFKVLGNTDRHSIKKNLIGALLFDSGETAEATRLKRTARRRYTRRKNRICYLQEIFSNEMAKVDDSFFHRLEESFLVEEDKKHERHPIFGNIVDEVAYHEKYPTIYHLRKKLVDSTDKADLRLIYLALAHMIKFRGHFLIEGDLNPDNSDVDKLFIQLVQTYNQLFEENPINASGVDAKAILSARLSKSRRLENLIAQLPGEKKNGLFGNLIALSLGLTPNFKSNFDLAEDAKLQLSKDTYDDDLDNLLAQIGDQYADLFLAAKNLSDAILLSDILRVNTEITKAPLSASMIKRYDEHHQDLTLLKALVRQQLPEKYKEIFFDQSKNGYAGYIDGGASQEEFYKFIKPILEKMDGTEELLVKLNREDLLRKQRTFDNGSIPHQIHLGELHAILRRQEDFYPFLKDNREKIEKILTFRIPYYVGPLARGNSRFAWMTRKSEETITPWNFEEVVDKGASAQSFIERMTNFDKNLPNEKVLPKHSLLYEYFTVYNELTKVKYVTEGMRKPAFLSGEQKKAIVDLLFKTNRKVTVKQLKEDYFKKIECFDSVEISGVEDRFNASLGTYHDLLKIIKDKDFLDNEENEDILEDIVLTLTLFEDREMIEERLKTYAHLFDDKVMKQLKRRRYTGWGRLSRKLINGIRDKQSGKTILDFLKSDGFANRNFMQLIHDDSLTFKEDIQKAQVSGQGDSLHEHIANLAGSPAIKKGILQTVKVVDELVKVMGRHKPENIVIEMARENQTTQKGQKNSRERMKRIEEGIKELGSQILKEHPVENTQLQNEKLYLYYLQNGRDMYVDQELDINRLSDYDVDHIVPQSFLKDDSIDNKVLTRSDKARGKSDNVPSEEVVKKMKNYWRQLLNAKLITQRKFDNLTKAERGGLSELDKAGFIKRQLVETRQITKHVAQILDSRMNTKYDENDKLIREVKVITLKSKLVSDFRKDFQFYKVREINNYHHAHDAYLNAVVGTALIKKYPKLESEFVYGDYKVYDVRKMIAKSEQEIGKATAKYFFYSNIMNFFKTEITLANGEIRKRPLIETNGETGEIVWDKGRDFATVRKVLSMPQVNIVKKTEVQTGGFSKESILPKRNSDKLIARKKDWDPKKYGGFDSPTVAYSVLVVAKVEKGKSKKLKSVKELLGITIMERSSFEKNPIDFLEAKGYKEVKKDLIIKLPKYSLFELENGRKRMLASAGELQKGNELALPSKYVNFLYLASHYEKLKGSPEDNEQKQLFVEQHKHYLDEIIEQISEFSKRVILADANLDKVLSAYNKHRDKPIREQAENIIHLFTLTNLGAPAAFKYFDTTIDRKRYTSTKEVLDATLIHQSITGLYETRIDLSQLGGDGGPAPAPGGTLNIEDEYRLHETSKEPDVPLGSTWLSDFPQAWAETGGMGLAVRQAPLIIPLKATSTPVSIKQYPMSQEARLGIKPHIQRLLDQGILVPCQSPWNTPLLPVKKPGTNDYRPVQDLREVNKRVEDIHPTVPNPYNLLSGLPPSHQWYTVLDLKDAFFCLRLHPTSQPLFAFEWRDPEMGISGQLTWTRLPQGFKNSPTLFNEALHRDLADFRIQHPDLILLQYVDDLLLAATSEQDCQRGTRALLQTLGNLGYRASAKKAQICQKQVKYLGYLLKEGQRWLTEARKETVMGQPTPKTPRQLREFLGTAGFCRLWIPGFAEMAAPLYPLTKPGTLFNWGPDQQKAYQEIKQALLTAPALGLPDLTKPFELFVDEKQGYAKGVLTQKLGPWRRPVAYLSKKLDPVAAGWPPCLRMVAAIAVLTKDAGKLTMGQPLVILAPHAVEALVKQPPDRWLSNARMTHYQAMLLDTDRVQFGPVVALNPATLLPLPEKEAPHDCLEILAETHGTRPDLTDQPIPDADYTWYTDGSSFLQEGQRRAGAAVTTETEVIWARALPAGTSAQRAELIALTQALKMAEGKKLNVYTDSRYAFATAHVHGEIYRRRGWLTSEGREIKNKNEILALLKALFLPKRLSIIHCPGHQKGNSAEARGNRMADQAAREAAMKAVLETSTLLAGKRTADGSEFEKRTADGSEFESPKKKAKVE

SEQ ID NO: 984 - protein, 2094 aa, synthetic construct
  source 1..2094: note = Description of Artificial Sequence: Synthetic polypeptide
MPAAKRVKLDGGDKKYSIGLDIGTNSVGWAVITDEYKVPSKKFKVLGNTDRHSIKKNLIGALLFDSGETAEATRLKRTARRRYTRRKNRICYLQEIFSNEMAKVDDSFFHRLEESFLVEEDKKHERHPIFGNIVDEVAYHEKYPTIYHLRKKLVDSTDKADLRLIYLALAHMIKFRGHFLIEGDLNPDNSDVDKLFIQLVQTYNQLFEENPINASGVDAKAILSARLSKSRRLENLIAQLPGEKKNGLFGNLIALSLGLTPNFKSNFDLAEDAKLQLSKDTYDDDLDNLLAQIGDQYADLFLAAKNLSDAILLSDILRVNTEITKAPLSASMIKRYDEHHQDLTLLKALVRQQLPEKYKEIFFDQSKNGYAGYIDGGASQEEFYKFIKPILEKMDGTEELLVKLNREDLLRKQRTFDNGSIPHQIHLGELHAILRRQEDFYPFLKDNREKIEKILTFRIPYYVGPLARGNSRFAWMTRKSEETITPWNFEEVVDKGASAQSFIERMTNFDKNLPNEKVLPKHSLLYEYFTVYNELTKVKYVTEGMRKPAFLSGEQKKAIVDLLFKTNRKVTVKQLKEDYFKKIECFDSVEISGVEDRFNASLGTYHDLLKIIKDKDFLDNEENEDILEDIVLTLTLFEDREMIEERLKTYAHLFDDKVMKQLKRRRYTGWGRLSRKLINGIRDKQSGKTILDFLKSDGFANRNFMQLIHDDSLTFKEDIQKAQVSGQGDSLHEHIANLAGSPAIKKGILQTVKVVDELVKVMGRHKPENIVIEMARENQTTQKGQKNSRERMKRIEEGIKELGSQILKEHPVENTQLQNEKLYLYYLQNGRDMYVDQELDINRLSDYDVDHIVPQSFLKDDSIDNKVLTRSDKARGKSDNVPSEEVVKKMKNYWRQLLNAKLITQRKFDNLTKAERGGLSELDKAGFIKRQLVETRQITKHVAQILDSRMNTKYDENDKLIREVKVITLKSKLVSDFRKDFQFYKVREINNYHHAHDAYLNAVVGTALIKKYPKLESEFVYGDYKVYDVRKMIAKSEQEIGKATAKYFFYSNIMNFFKTEITLANGEIRKRPLIETNGETGEIVWDKGRDFATVRKVLSMPQVNIVKKTEVQTGGFSKESILPKRNSDKLIARKKDWDPKKYGGFDSPTVAYSVLVVAKVEKGKSKKLKSVKELLGITIMERSSFEKNPIDFLEAKGYKEVKKDLIIKLPKYSLFELENGRKRMLASAGELQKGNELALPSKYVNFLYLASHYEKLKGSPEDNEQKQLFVEQHKHYLDEIIEQISEFSKRVILADANLDKVLSAYNKHRDKPIREQAENIIHLFTLTNLGAPAAFKYFDTTIDRKRYTSTKEVLDATLIHQSITGLYETRIDLSQLGGDGGGGGPAPGGSGGTLNIEDEYRLHETSKEPDVPLGSTWLSDFPQAWAETGGMGLAVRQAPLIIPLKATSTPVSIKQYPMSQEARLGIKPHIQRLLDQGILVPCQSPWNTPLLPVKKPGTNDYRPVQDLREVNKRVEDIHPTVPNPYNLLSGLPPSHQWYTVLDLKDAFFCLRLHPTSQPLFAFEWRDPEMGISGQLTWTRLPQGFKNSPTLFNEALHRDLADFRIQHPDLILLQYVDDLLLAATSEQDCQRGTRALLQTLGNLGYRASAKKAQICQKQVKYLGYLLKEGQRWLTEARKETVMGQPTPKTPRQLREFLGTAGFCRLWIPGFAEMAAPLYPLTKPGTLFNWGPDQQKAYQEIKQALLTAPALGLPDLTKPFELFVDEKQGYAKGVLTQKLGPWRRPVAYLSKKLDPVAAGWPPCLRMVAAIAVLTKDAGKLTMGQPLVILAPHAVEALVKQPPDRWLSNARMTHYQAMLLDTDRVQFGPVVALNPATLLPLPEKEAPHDCLEILAETHGTRPDLTDQPIPDADYTWYTDGSSFLQEGQRRAGAAVTTETEVIWARALPAGTSAQRAELIALTQALKMAEGKKLNVYTDSRYAFATAHVHGEIYRRRGWLTSEGREIKNKNEILALLKALFLPKRLSIIHCPGHQKGNSAEARGNRMADQAAREAAMKAVLETSTLLAGKRTADGSEFEKRTADGSEFESPKKKAKVE

SEQ ID NO: 985 - protein, 2096 aa, synthetic construct
  source 1..2096: note = Description of Artificial Sequence: Synthetic polypeptide
MPAAKRVKLDGGDKKYSIGLDIGTNSVGWAVITDEYKVPSKKFKVLGNTDRHSIKKNLIGALLFDSGETAEATRLKRTARRRYTRRKNRICYLQEIFSNEMAKVDDSFFHRLEESFLVEEDKKHERHPIFGNIVDEVAYHEKYPTIYHLRKKLVDSTDKADLRLIYLALAHMIKFRGHFLIEGDLNPDNSDVDKLFIQLVQTYNQLFEENPINASGVDAKAILSARLSKSRRLENLIAQLPGEKKNGLFGNLIALSLGLTPNFKSNFDLAEDAKLQLSKDTYDDDLDNLLAQIGDQYADLFLAAKNLSDAILLSDILRVNTEITKAPLSASMIKRYDEHHQDLTLLKALVRQQLPEKYKEIFFDQSKNGYAGYIDGGASQEEFYKFIKPILEKMDGTEELLVKLNREDLLRKQRTFDNGSIPHQIHLGELHAILRRQEDFYPFLKDNREKIEKILTFRIPYYVGPLARGNSRFAWMTRKSEETITPWNFEEVVDKGASAQSFIERMTNFDKNLPNEKVLPKHSLLYEYFTVYNELTKVKYVTEGMRKPAFLSGEQKKAIVDLLFKTNRKVTVKQLKEDYFKKIECFDSVEISGVEDRFNASLGTYHDLLKIIKDKDFLDNEENEDILEDIVLTLTLFEDREMIEERLKTYAHLFDDKVMKQLKRRRYTGWGRLSRKLINGIRDKQSGKTILDFLKSDGFANRNFMQLIHDDSLTFKEDIQKAQVSGQGDSLHEHIANLAGSPAIKKGILQTVKVVDELVKVMGRHKPENIVIEMARENQTTQKGQKNSRERMKRIEEGIKELGSQILKEHPVENTQLQNEKLYLYYLQNGRDMYVDQELDINRLSDYDVDHIVPQSFLKDDSIDNKVLTRSDKARGKSDNVPSEEVVKKMKNYWRQLLNAKLITQRKFDNLTKAERGGLSELDKAGFIKRQLVETRQITKHVAQILDSRMNTKYDENDKLIREVKVITLKSKLVSDFRKDFQFYKVREINNYHHAHDAYLNAVVGTALIKKYPKLESEFVYGDYKVYDVRKMIAKSEQEIGKATAKYFFYSNIMNFFKTEITLANGEIRKRPLIETNGETGEIVWDKGRDFATVRKVLSMPQVNIVKKTEVQTGGFSKESILPKRNSDKLIARKKDWDPKKYGGFDSPTVAYSVLVVAKVEKGKSKKLKSVKELLGITIMERSSFEKNPIDFLEAKGYKEVKKDLIIKLPKYSLFELENGRKRMLASAGELQKGNELALPSKYVNFLYLASHYEKLKGSPEDNEQKQLFVEQHKHYLDEIIEQISEFSKRVILADANLDKVLSAYNKHRDKPIREQAENIIHLFTLTNLGAPAAFKYFDTTIDRKRYTSTKEVLDATLIHQSITGLYETRIDLSQLGGDGGGGGEAAAKPAPGGTLNIEDEYRLHETSKEPDVPLGSTWLSDFPQAWAETGGMGLAVRQAPLIIPLKATSTPVSIKQYPMSQEARLGIKPHIQRLLDQGILVPCQSPWNTPLLPVKKPGTNDYRPVQDLREVNKRVEDIHPTVPNPYNLLSGLPPSHQWYTVLDLKDAFFCLRLHPTSQPLFAFEWRDPEMGISGQLTWTRLPQGFKNSPTLFNEALHRDLADFRIQHPDLILLQYVDDLLLAATSEQDCQRGTRALLQTLGNLGYRASAKKAQICQKQVKYLGYLLKEGQRWLTEARKETVMGQPTPKTPRQLREFLGTAGFCRLWIPGFAEMAAPLYPLTKPGTLFNWGPDQQKAYQEIKQALLTAPALGLPDLTKPFELFVDEKQGYAKGVLTQKLGPWRRPVAYLSKKLDPVAAGWPPCLRMVAAIAVLTKDAGKLTMGQPLVILAPHAVEALVKQPPDRWLSNARMTHYQAMLLDTDRVQFGPVVALNPATLLPLPEKEAPHDCLEILAETHGTRPDLTDQPIPDADYTWYTDGSSFLQEGQRRAGAAVTTETEVIWARALPAGTSAQRAELIALTQALKMAEGKKLNVYTDSRYAFATAHVHGEIYRRRGWLTSEGREIKNKNEILALLKALFLPKRLSIIHCPGHQKGNSAEARGNRMADQAAREAAMKAVLETSTLLAGKRTADGSEFEKRTADGSEFESPKKKAKVE

SEQ ID NO: 986 - protein, 2094 aa, synthetic construct
  source 1..2094: note = Description of Artificial Sequence: Synthetic polypeptide
MPAAKRVKLDGGDKKYSIGLDIGTNSVGWAVITDEYKVPSKKFKVLGNTDRHSIKKNLIGALLFDSGETAEATRLKRTARRRYTRRKNRICYLQEIFSNEMAKVDDSFFHRLEESFLVEEDKKHERHPIFGNIVDEVAYHEKYPTIYHLRKKLVDSTDKADLRLIYLALAHMIKFRGHFLIEGDLNPDNSDVDKLFIQLVQTYNQLFEENPINASGVDAKAILSARLSKSRRLENLIAQLPGEKKNGLFGNLIALSLGLTPNFKSNFDLAEDAKLQLSKDTYDDDLDNLLAQIGDQYADLFLAAKNLSDAILLSDILRVNTEITKAPLSASMIKRYDEHHQDLTLLKALVRQQLPEKYKEIFFDQSKNGYAGYIDGGASQEEFYKFIKPILEKMDGTEELLVKLNREDLLRKQRTFDNGSIPHQIHLGELHAILRRQEDFYPFLKDNREKIEKILTFRIPYYVGPLARGNSRFAWMTRKSEETITPWNFEEVVDKGASAQSFIERMTNFDKNLPNEKVLPKHSLLYEYFTVYNELTKVKYVTEGMRKPAFLSGEQKKAIVDLLFKTNRKVTVKQLKEDYFKKIECFDSVEISGVEDRFNASLGTYHDLLKIIKDKDFLDNEENEDILEDIVLTLTLFEDREMIEERLKTYAHLFDDKVMKQLKRRRYTGWGRLSRKLINGIRDKQSGKTILDFLKSDGFANRNFMQLIHDDSLTFKEDIQKAQVSGQGDSLHEHIANLAGSPAIKKGILQTVKVVDELVKVMGRHKPENIVIEMARENQTTQKGQKNSRERMKRIEEGIKELGSQILKEHPVENTQLQNEKLYLYYLQNGRDMYVDQELDINRLSDYDVDHIVPQSFLKDDSIDNKVLTRSDKARGKSDNVPSEEVVKKMKNYWRQLLNAKLITQRKFDNLTKAERGGLSELDKAGFIKRQLVETRQITKHVAQILDSRMNTKYDENDKLIREVKVITLKSKLVSDFRKDFQFYKVREINNYHHAHDAYLNAVVGTALIKKYPKLESEFVYGDYKVYDVRKMIAKSEQEIGKATAKYFFYSNIMNFFKTEITLANGEIRKRPLIETNGETGEIVWDKGRDFATVRKVLSMPQVNIVKKTEVQTGGFSKESILPKRNSDKLIARKKDWDPKKYGGFDSPTVAYSVLVVAKVEKGKSKKLKSVKELLGITIMERSSFEKNPIDFLEAKGYKEVKKDLIIKLPKYSLFELENGRKRMLASAGELQKGNELALPSKYVNFLYLASHYEKLKGSPEDNEQKQLFVEQHKHYLDEIIEQISEFSKRVILADANLDKVLSAYNKHRDKPIREQAENIIHLFTLTNLGAPAAFKYFDTTIDRKRYTSTKEVLDATLIHQSITGLYETRIDLSQLGGDGGGGSPAPGSSGGTLNIEDEYRLHETSKEPDVPLGSTWLSDFPQAWAETGGMGLAVRQAPLIIPLKATSTPVSIKQYPMSQEARLGIKPHIQRLLDQGILVPCQSPWNTPLLPVKKPGTNDYRPVQDLREVNKRVEDIHPTVPNPYNLLSGLPPSHQWYTVLDLKDAFFCLRLHPTSQPLFAFEWRDPEMGISGQLTWTRLPQGFKNSPTLFNEALHRDLADFRIQHPDLILLQYVDDLLLAATSEQDCQRGTRALLQTLGNLGYRASAKKAQICQKQVKYLGYLLKEGQRWLTEARKETVMGQPTPKTPRQLREFLGTAGFCRLWIPGFAEMAAPLYPLTKPGTLFNWGPDQQKAYQEIKQALLTAPALGLPDLTKPFELFVDEKQGYAKGVLTQKLGPWRRPVAYLSKKLDPVAAGWPPCLRMVAAIAVLTKDAGKLTMGQPLVILAPHAVEALVKQPPDRWLSNARMTHYQAMLLDTDRVQFGPVVALNPATLLPLPEKEAPHDCLEILAETHGTRPDLTDQPIPDADYTWYTDGSSFLQEGQRRAGAAVTTETEVIWARALPAGTSAQRAELIALTQALKMAEGKKLNVYTDSRYAFATAHVHGEIYRRRGWLTSEGREIKNKNEILALLKALFLPKRLSIIHCPGHQKGNSAEARGNRMADQAAREAAMKAVLETSTLLAGKRTADGSEFEKRTADGSEFESPKKKAKVE

SEQ ID NO: 987 - protein, 2094 aa, synthetic construct
  source 1..2094: note = Description of Artificial Sequence: Synthetic polypeptide
MPAAKRVKLDGGDKKYSIGLDIGTNSVGWAVITDEYKVPSKKFKVLGNTDRHSIKKNLIGALLFDSGETAEATRLKRTARRRYTRRKNRICYLQEIFSNEMAKVDDSFFHRLEESFLVEEDKKHERHPIFGNIVDEVAYHEKYPTIYHLRKKLVDSTDKADLRLIYLALAHMIKFRGHFLIEGDLNPDNSDVDKLFIQLVQTYNQLFEENPINASGVDAKAILSARLSKSRRLENLIAQLPGEKKNGLFGNLIALSLGLTPNFKSNFDLAEDAKLQLSKDTYDDDLDNLLAQIGDQYADLFLAAKNLSDAILLSDILRVNTEITKAPLSASMIKRYDEHHQDLTLLKALVRQQLPEKYKEIFFDQSKNGYAGYIDGGASQEEFYKFIKPILEKMDGTEELLVKLNREDLLRKQRTFDNGSIPHQIHLGELHAILRRQEDFYPFLKDNREKIEKILTFRIPYYVGPLARGNSRFAWMTRKSEETITPWNFEEVVDKGASAQSFIERMTNFDKNLPNEKVLPKHSLLYEYFTVYNELTKVKYVTEGMRKPAFLSGEQKKAIVDLLFKTNRKVTVKQLKEDYFKKIECFDSVEISGVEDRFNASLGTYHDLLKIIKDKDFLDNEENEDILEDIVLTLTLFEDREMIEERLKTYAHLFDDKVMKQLKRRRYTGWGRLSRKLINGIRDKQSGKTILDFLKSDGFANRNFMQLIHDDSLTFKEDIQKAQVSGQGDSLHEHIANLAGSPAIKKGILQTVKVVDELVKVMGRHKPENIVIEMARENQTTQKGQKNSRERMKRIEEGIKELGSQILKEHPVENTQLQNEKLYLYYLQNGRDMYVDQELDINRLSDYDVDHIVPQSFLKDDSIDNKVLTRSDKARGKSDNVPSEEVVKKMKNYWRQLLNAKLITQRKFDNLTKAERGGLSELDKAGFIKRQLVETRQITKHVAQILDSRMNTKYDENDKLIREVKVITLKSKLVSDFRKDFQFYKVREINNYHHAHDAYLNAVVGTALIKKYPKLESEFVYGDYKVYDVRKMIAKSEQEIGKATAKYFFYSNIMNFFKTEITLANGEIRKRPLIETNGETGEIVWDKGRDFATVRKVLSMPQVNIVKKTEVQTGGFSKESILPKRNSDKLIARKKDWDPKKYGGFDSPTVAYSVLVVAKVEKGKSKKLKSVKELLGITIMERSSFEKNPIDFLEAKGYKEVKKDLIIKLPKYSLFELENGRKRMLASAGELQKGNELALPSKYVNFLYLASHYEKLKGSPEDNEQKQLFVEQHKHYLDEIIEQISEFSKRVILADANLDKVLSAYNKHRDKPIREQAENIIHLFTLTNLGAPAAFKYFDTTIDRKRYTSTKEVLDATLIHQSITGLYETRIDLSQLGGDGGGSSPAPGGSGGTLNIEDEYRLHETSKEPDVPLGSTWLSDFPQAWAETGGMGLAVRQAPLIIPLKATSTPVSIKQYPMSQEARLGIKPHIQRLLDQGILVPCQSPWNTPLLPVKKPGTNDYRPVQDLREVNKRVEDIHPTVPNPYNLLSGLPPSHQWYTVLDLKDAFFCLRLHPTSQPLFAFEWRDPEMGISGQLTWTRLPQGFKNSPTLFNEALHRDLADFRIQHPDLILLQYVDDLLLAATSEQDCQRGTRALLQTLGNLGYRASAKKAQICQKQVKYLGYLLKEGQRWLTEARKETVMGQPTPKTPRQLREFLGTAGFCRLWIPGFAEMAAPLYPLTKPGTLFNWGPDQQKAYQEIKQALLTAPALGLPDLTKPFELFVDEKQGYAKGVLTQKLGPWRRPVAYLSKKLDPVAAGWPPCLRMVAAIAVLTKDAGKLTMGQPLVILAPHAVEALVKQPPDRWLSNARMTHYQAMLLDTDRVQFGPVVALNPATLLPLPEKEAPHDCLEILAETHGTRPDLTDQPIPDADYTWYTDGSSFLQEGQRRAGAAVTTETEVIWARALPAGTSAQRAELIALTQALKMAEGKKLNVYTDSRYAFATAHVHGEIYRRRGWLTSEGREIKNKNEILALLKALFLPKRLSIIHCPGHQKGNSAEARGNRMADQAAREAAMKAVLETSTLLAGKRTADGSEFEKRTADGSEFESPKKKAKVE

SEQ ID NO: 988 - protein, 2090 aa, synthetic construct
  source 1..2090: note = Description of Artificial Sequence: Synthetic polypeptide
MPAAKRVKLDGGDKKYSIGLDIGTNSVGWAVITDEYKVPSKKFKVLGNTDRHSIKKNLIGALLFDSGETAEATRLKRTARRRYTRRKNRICYLQEIFSNEMAKVDDSFFHRLEESFLVEEDKKHERHPIFGNIVDEVAYHEKYPTIYHLRKKLVDSTDKADLRLIYLALAHMIKFRGHFLIEGDLNPDNSDVDKLFIQLVQTYNQLFEENPINASGVDAKAILSARLSKSRRLENLIAQLPGEKKNGLFGNLIALSLGLTPNFKSNFDLAEDAKLQLSKDTYDDDLDNLLAQIGDQYADLFLAAKNLSDAILLSDILRVNTEITKAPLSASMIKRYDEHHQDLTLLKALVRQQLPEKYKEIFFDQSKNGYAGYIDGGASQEEFYKFIKPILEKMDGTEELLVKLNREDLLRKQRTFDNGSIPHQIHLGELHAILRRQEDFYPFLKDNREKIEKILTFRIPYYVGPLARGNSRFAWMTRKSEETITPWNFEEVVDKGASAQSFIERMTNFDKNLPNEKVLPKHSLLYEYFTVYNELTKVKYVTEGMRKPAFLSGEQKKAIVDLLFKTNRKVTVKQLKEDYFKKIECFDSVEISGVEDRFNASLGTYHDLLKIIKDKDFLDNEENEDILEDIVLTLTLFEDREMIEERLKTYAHLFDDKVMKQLKRRRYTGWGRLSRKLINGIRDKQSGKTILDFLKSDGFANRNFMQLIHDDSLTFKEDIQKAQVSGQGDSLHEHIANLAGSPAIKKGILQTVKVVDELVKVMGRHKPENIVIEMARENQTTQKGQKNSRERMKRIEEGIKELGSQILKEHPVENTQLQNEKLYLYYLQNGRDMYVDQELDINRLSDYDVDHIVPQSFLKDDSIDNKVLTRSDKARGKSDNVPSEEVVKKMKNYWRQLLNAKLITQRKFDNLTKAERGGLSELDKAGFIKRQLVETRQITKHVAQILDSRMNTKYDENDKLIREVKVITLKSKLVSDFRKDFQFYKVREINNYHHAHDAYLNAVVGTALIKKYPKLESEFVYGDYKVYDVRKMIAKSEQEIGKATAKYFFYSNIMNFFKTEITLANGEIRKRPLIETNGETGEIVWDKGRDFATVRKVLSMPQVNIVKKTEVQTGGFSKESILPKRNSDKLIARKKDWDPKKYGGFDSPTVAYSVLVVAKVEKGKSKKLKSVKELLGITIMERSSFEKNPIDFLEAKGYKEVKKDLIIKLPKYSLFELENGRKRMLASAGELQKGNELALPSKYVNFLYLASHYEKLKGSPEDNEQKQLFVEQHKHYLDEIIEQISEFSKRVILADANLDKVLSAYNKHRDKPIREQAENIIHLFTLTNLGAPAAFKYFDTTIDRKRYTSTKEVLDATLIHQSITGLYETRIDLSQLGGDGGEAAAKGGTLNIEDEYRLHETSKEPDVPLGSTWLSDFPQAWAETGGMGLAVRQAPLIIPLKATSTPVSIKQYPMSQEARLGIKPHIQRLLDQGILVPCQSPWNTPLLPVKKPGTNDYRPVQDLREVNKRVEDIHPTVPNPYNLLSGLPPSHQWYTVLDLKDAFFCLRLHPTSQPLFAFEWRDPEMGISGQLTWTRLPQGFKNSPTLFNEALHRDLADFRIQHPDLILLQYVDDLLLAATSEQDCQRGTRALLQTLGNLGYRASAKKAQICQKQVKYLGYLLKEGQRWLTEARKETVMGQPTPKTPRQLREFLGTAGFCRLWIPGFAEMAAPLYPLTKPGTLFNWGPDQQKAYQEIKQALLTAPALGLPDLTKPFELFVDEKQGYAKGVLTQKLGPWRRPVAYLSKKLDPVAAGWPPCLRMVAAIAVLTKDAGKLTMGQPLVILAPHAVEALVKQPPDRWLSNARMTHYQAMLLDTDRVQFGPVVALNPATLLPLPEKEAPHDCLEILAETHGTRPDLTDQPIPDADYTWYTDGSSFLQEGQRRAGAAVTTETEVIWARALPAGTSAQRAELIALTQALKMAEGKKLNVYTDSRYAFATAHVHGEIYRRRGWLTSEGREIKNKNEILALLKALFLPKRLSIIHCPGHQKGNSAEARGNRMADQAAREAAMKAVLETSTLLAGKRTADGSEFEKRTADGSEFESPKKKAKVE

SEQ ID NO: 989 - protein, 2094 aa, synthetic construct
  source 1..2094: note = Description of Artificial Sequence: Synthetic polypeptide
MPAAKRVKLDGGDKKYSIGLDIGTNSVGWAVITDEYKVPSKKFKVLGNTDRHSIKKNLIGALLFDSGETAEATRLKRTARRRYTRRKNRICYLQEIFSNEMAKVDDSFFHRLEESFLVEEDKKHERHPIFGNIVDEVAYHEKYPTIYHLRKKLVDSTDKADLRLIYLALAHMIKFRGHFLIEGDLNPDNSDVDKLFIQLVQTYNQLFEENPINASGVDAKAILSARLSKSRRLENLIAQLPGEKKNGLFGNLIALSLGLTPNFKSNFDLAEDAKLQLSKDTYDDDLDNLLAQIGDQYADLFLAAKNLSDAILLSDILRVNTEITKAPLSASMIKRYDEHHQDLTLLKALVRQQLPEKYKEIFFDQSKNGYAGYIDGGASQEEFYKFIKPILEKMDGTEELLVKLNREDLLRKQRTFDNGSIPHQIHLGELHAILRRQEDFYPFLKDNREKIEKILTFRIPYYVGPLARGNSRFAWMTRKSEETITPWNFEEVVDKGASAQSFIERMTNFDKNLPNEKVLPKHSLLYEYFTVYNELTKVKYVTEGMRKPAFLSGEQKKAIVDLLFKTNRKVTVKQLKEDYFKKIECFDSVEISGVEDRFNASLGTYHDLLKIIKDKDFLDNEENEDILEDIVLTLTLFEDREMIEERLKTYAHLFDDKVMKQLKRRRYTGWGRLSRKLINGIRDKQSGKTILDFLKSDGFANRNFMQLIHDDSLTFKEDIQKAQVSGQGDSLHEHIANLAGSPAIKKGILQTVKVVDELVKVMGRHKPENIVIEMARENQTTQKGQKNSRERMKRIEEGIKELGSQILKEHPVENTQLQNEKLYLYYLQNGRDMYVDQELDINRLSDYDVDHIVPQSFLKDDSIDNKVLTRSDKARGKSDNVPSEEVVKKMKNYWRQLLNAKLITQRKFDNLTKAERGGLSELDKAGFIKRQLVETRQITKHVAQILDSRMNTKYDENDKLIREVKVITLKSKLVSDFRKDFQFYKVREINNYHHAHDAYLNAVVGTALIKKYPKLESEFVYGDYKVYDVRKMIAKSEQEIGKATAKYFFYSNIMNFFKTEITLANGEIRKRPLIETNGETGEIVWDKGRDFATVRKVLSMPQVNIVKKTEVQTGGFSKESILPKRNSDKLIARKKDWDPKKYGGFDSPTVAYSVLVVAKVEKGKSKKLKSVKELLGITIMERSSFEKNPIDFLEAKGYKEVKKDLIIKLPKYSLFELENGRKRMLASAGELQKGNELALPSKYVNFLYLASHYEKLKGSPEDNEQKQLFVEQHKHYLDEIIEQISEFSKRVILADANLDKVLSAYNKHRDKPIREQAENIIHLFTLTNLGAPAAFKYFDTTIDRKRYTSTKEVLDATLIHQSITGLYETRIDLSQLGGDGGGGGGGSGSSGGTLNIEDEYRLHETSKEPDVPLGSTWLSDFPQAWAETGGMGLAVRQAPLIIPLKATSTPVSIKQYPMSQEARLGIKPHIQRLLDQGILVPCQSPWNTPLLPVKKPGTNDYRPVQDLREVNKRVEDIHPTVPNPYNLLSGLPPSHQWYTVLDLKDAFFCLRLHPTSQPLFAFEWRDPEMGISGQLTWTRLPQGFKNSPTLFNEALHRDLADFRIQHPDLILLQYVDDLLLAATSEQDCQRGTRALLQTLGNLGYRASAKKAQICQKQVKYLGYLLKEGQRWLTEARKETVMGQPTPKTPRQLREFLGTAGFCRLWIPGFAEMAAPLYPLTKPGTLFNWGPDQQKAYQEIKQALLTAPALGLPDLTKPFELFVDEKQGYAKGVLTQKLGPWRRPVAYLSKKLDPVAAGWPPCLRMVAAIAVLTKDAGKLTMGQPLVILAPHAVEALVKQPPDRWLSNARMTHYQAMLLDTDRVQFGPVVALNPATLLPLPEKEAPHDCLEILAETHGTRPDLTDQPIPDADYTWYTDGSSFLQEGQRRAGAAVTTETEVIWARALPAGTSAQRAELIALTQALKMAEGKKLNVYTDSRYAFATAHVHGEIYRRRGWLTSEGREIKNKNEILALLKALFLPKRLSIIHCPGHQKGNSAEARGNRMADQAAREAAMKAVLETSTLLAGKRTADGSEFEKRTADGSEFESPKKKAKVE

SEQ ID NO: 990 - protein, 2091 aa, synthetic construct
  source 1..2091: note = Description of Artificial Sequence: Synthetic polypeptide
MPAAKRVKLDGGDKKYSIGLDIGTNSVGWAVITDEYKVPSKKFKVLGNTDRHSIKKNLIGALLFDSGETAEATRLKRTARRRYTRRKNRICYLQEIFSNEMAKVDDSFFHRLEESFLVEEDKKHERHPIFGNIVDEVAYHEKYPTIYHLRKKLVDSTDKADLRLIYLALAHMIKFRGHFLIEGDLNPDNSDVDKLFIQLVQTYNQLFEENPINASGVDAKAILSARLSKSRRLENLIAQLPGEKKNGLFGNLIALSLGLTPNFKSNFDLAEDAKLQLSKDTYDDDLDNLLAQIGDQYADLFLAAKNLSDAILLSDILRVNTEITKAPLSASMIKRYDEHHQDLTLLKALVRQQLPEKYKEIFFDQSKNGYAGYIDGGASQEEFYKFIKPILEKMDGTEELLVKLNREDLLRKQRTFDNGSIPHQIHLGELHAILRRQEDFYPFLKDNREKIEKILTFRIPYYVGPLARGNSRFAWMTRKSEETITPWNFEEVVDKGASAQSFIERMTNFDKNLPNEKVLPKHSLLYEYFTVYNELTKVKYVTEGMRKPAFLSGEQKKAIVDLLFKTNRKVTVKQLKEDYFKKIECFDSVEISGVEDRFNASLGTYHDLLKIIKDKDFLDNEENEDILEDIVLTLTLFEDREMIEERLKTYAHLFDDKVMKQLKRRRYTGWGRLSRKLINGIRDKQSGKTILDFLKSDGFANRNFMQLIHDDSLTFKEDIQKAQVSGQGDSLHEHIANLAGSPAIKKGILQTVKVVDELVKVMGRHKPENIVIEMARENQTTQKGQKNSRERMKRIEEGIKELGSQILKEHPVENTQLQNEKLYLYYLQNGRDMYVDQELDINRLSDYDVDHIVPQSFLKDDSIDNKVLTRSDKARGKSDNVPSEEVVKKMKNYWRQLLNAKLITQRKFDNLTKAERGGLSELDKAGFIKRQLVETRQITKHVAQILDSRMNTKYDENDKLIREVKVITLKSKLVSDFRKDFQFYKVREINNYHHAHDAYLNAVVGTALIKKYPKLESEFVYGDYKVYDVRKMIAKSEQEIGKATAKYFFYSNIMNFFKTEITLANGEIRKRPLIETNGETGEIVWDKGRDFATVRKVLSMPQVNIVKKTEVQTGGFSKESILPKRNSDKLIARKKDWDPKKYGGFDSPTVAYSVLVVAKVEKGKSKKLKSVKELLGITIMERSSFEKNPIDFLEAKGYKEVKKDLIIKLPKYSLFELENGRKRMLASAGELQKGNELALPSKYVNFLYLASHYEKLKGSPEDNEQKQLFVEQHKHYLDEIIEQISEFSKRVILADANLDKVLSAYNKHRDKPIREQAENIIHLFTLTNLGAPAAFKYFDTTIDRKRYTSTKEVLDATLIHQSITGLYETRIDLSQLGGDGGPAPGSSGGTLNIEDEYRLHETSKEPDVPLGSTWLSDFPQAWAETGGMGLAVRQAPLIIPLKATSTPVSIKQYPMSQEARLGIKPHIQRLLDQGILVPCQSPWNTPLLPVKKPGTNDYRPVQDLREVNKRVEDIHPTVPNPYNLLSGLPPSHQWYTVLDLKDAFFCLRLHPTSQPLFAFEWRDPEMGISGQLTWTRLPQGFKNSPTLFNEALHRDLADFRIQHPDLILLQYVDDLLLAATSEQDCQRGTRALLQTLGNLGYRASAKKAQICQKQVKYLGYLLKEGQRWLTEARKETVMGQPTPKTPRQLREFLGTAGFCRLWIPGFAEMAAPLYPLTKPGTLFNWGPDQQKAYQEIKQALLTAPALGLPDLTKPFELFVDEKQGYAKGVLTQKLGPWRRPVAYLSKKLDPVAAGWPPCLRMVAAIAVLTKDAGKLTMGQPLVILAPHAVEALVKQPPDRWLSNARMTHYQAMLLDTDRVQFGPVVALNPATLLPLPEKEAPHDCLEILAETHGTRPDLTDQPIPDADYTWYTDGSSFLQEGQRRAGAAVTTETEVIWARALPAGTSAQRAELIALTQALKMAEGKKLNVYTDSRYAFATAHVHGEIYRRRGWLTSEGREIKNKNEILALLKALFLPKRLSIIHCPGHQKGNSAEARGNRMADQAAREAAMKAVLETSTLLAGKRTADGSEFEKRTADGSEFESPKKKAKVE

SEQ ID NO: 991 - protein, 2095 aa, synthetic construct
  source 1..2095: note = Description of Artificial Sequence: Synthetic polypeptide
MPAAKRVKLDGGDKKYSIGLDIGTNSVGWAVITDEYKVPSKKFKVLGNTDRHSIKKNLIGALLFDSGETAEATRLKRTARRRYTRRKNRICYLQEIFSNEMAKVDDSFFHRLEESFLVEEDKKHERHPIFGNIVDEVAYHEKYPTIYHLRKKLVDSTDKADLRLIYLALAHMIKFRGHFLIEGDLNPDNSDVDKLFIQLVQTYNQLFEENPINASGVDAKAILSARLSKSRRLENLIAQLPGEKKNGLFGNLIALSLGLTPNFKSNFDLAEDAKLQLSKDTYDDDLDNLLAQIGDQYADLFLAAKNLSDAILLSDILRVNTEITKAPLSASMIKRYDEHHQDLTLLKALVRQQLPEKYKEIFFDQSKNGYAGYIDGGASQEEFYKFIKPILEKMDGTEELLVKLNREDLLRKQRTFDNGSIPHQIHLGELHAILRRQEDFYPFLKDNREKIEKILTFRIPYYVGPLARGNSRFAWMTRKSEETITPWNFEEVVDKGASAQSFIERMTNFDKNLPNEKVLPKHSLLYEYFTVYNELTKVKYVTEGMRKPAFLSGEQKKAIVDLLFKTNRKVTVKQLKEDYFKKIECFDSVEISGVEDRFNASLGTYHDLLKIIKDKDFLDNEENEDILEDIVLTLTLFEDREMIEERLKTYAHLFDDKVMKQLKRRRYTGWGRLSRKLINGIRDKQSGKTILDFLKSDGFANRNFMQLIHDDSLTFKEDIQKAQVSGQGDSLHEHIANLAGSPAIKKGILQTVKVVDELVKVMGRHKPENIVIEMARENQTTQKGQKNSRERMKRIEEGIKELGSQILKEHPVENTQLQNEKLYLYYLQNGRDMYVDQELDINRLSDYDVDHIVPQSFLKDDSIDNKVLTRSDKARGKSDNVPSEEVVKKMKNYWRQLLNAKLITQRKFDNLTKAERGGLSELDKAGFIKRQLVETRQITKHVAQILDSRMNTKYDENDKLIREVKVITLKSKLVSDFRKDFQFYKVREINNYHHAHDAYLNAVVGTALIKKYPKLESEFVYGDYKVYDVRKMIAKSEQEIGKATAKYFFYSNIMNFFKTEITLANGEIRKRPLIETNGETGEIVWDKGRDFATVRKVLSMPQVNIVKKTEVQTGGFSKESILPKRNSDKLIARKKDWDPKKYGGFDSPTVAYSVLVVAKVEKGKSKKLKSVKELLGITIMERSSFEKNPIDFLEAKGYKEVKKDLIIKLPKYSLFELENGRKRMLASAGELQKGNELALPSKYVNFLYLASHYEKLKGSPEDNEQKQLFVEQHKHYLDEIIEQISEFSKRVILADANLDKVLSAYNKHRDKPIREQAENIIHLFTLTNLGAPAAFKYFDTTIDRKRYTSTKEVLDATLIHQSITGLYETRIDLSQLGGDGGEAAAKEAAAKGGTLNIEDEYRLHETSKEPDVPLGSTWLSDFPQAWAETGGMGLAVRQAPLIIPLKATSTPVSIKQYPMSQEARLGIKPHIQRLLDQGILVPCQSPWNTPLLPVKKPGTNDYRPVQDLREVNKRVEDIHPTVPNPYNLLSGLPPSHQWYTVLDLKDAFFCLRLHPTSQPLFAFEWRDPEMGISGQLTWTRLPQGFKNSPTLFNEALHRDLADFRIQHPDLILLQYVDDLLLAATSEQDCQRGTRALLQTLGNLGYRASAKKAQICQKQVKYLGYLLKEGQRWLTEARKETVMGQPTPKTPRQLREFLGTAGFCRLWIPGFAEMAAPLYPLTKPGTLFNWGPDQQKAYQEIKQALLTAPALGLPDLTKPFELFVDEKQGYAKGVLTQKLGPWRRPVAYLSKKLDPVAAGWPPCLRMVAAIAVLTKDAGKLTMGQPLVILAPHAVEALVKQPPDRWLSNARMTHYQAMLLDTDRVQFGPVVALNPATLLPLPEKEAPHDCLEILAETHGTRPDLTDQPIPDADYTWYTDGSSFLQEGQRRAGAAVTTETEVIWARALPAGTSAQRAELIALTQALKMAEGKKLNVYTDSRYAFATAHVHGEIYRRRGWLTSEGREIKNKNEILALLKALFLPKRLSIIHCPGHQKGNSAEARGNRMADQAAREAAMKAVLETSTLLAGKRTADGSEFEKRTADGSEFESPKKKAKVE

SEQ ID NO: 992 - protein, 2091 aa, synthetic construct
  source 1..2091: note = Description of Artificial Sequence: Synthetic polypeptide
MPAAKRVKLDGGDKKYSIGLDIGTNSVGWAVITDEYKVPSKKFKVLGNTDRHSIKKNLIGALLFDSGETAEATRLKRTARRRYTRRKNRICYLQEIFSNEMAKVDDSFFHRLEESFLVEEDKKHERHPIFGNIVDEVAYHEKYPTIYHLRKKLVDSTDKADLRLIYLALAHMIKFRGHFLIEGDLNPDNSDVDKLFIQLVQTYNQLFEENPINASGVDAKAILSARLSKSRRLENLIAQLPGEKKNGLFGNLIALSLGLTPNFKSNFDLAEDAKLQLSKDTYDDDLDNLLAQIGDQYADLFLAAKNLSDAILLSDILRVNTEITKAPLSASMIKRYDEHHQDLTLLKALVRQQLPEKYKEIFFDQSKNGYAGYIDGGASQEEFYKFIKPILEKMDGTEELLVKLNREDLLRKQRTFDNGSIPHQIHLGELHAILRRQEDFYPFLKDNREKIEKILTFRIPYYVGPLARGNSRFAWMTRKSEETITPWNFEEVVDKGASAQSFIERMTNFDKNLPNEKVLPKHSLLYEYFTVYNELTKVKYVTEGMRKPAFLSGEQKKAIVDLLFKTNRKVTVKQLKEDYFKKIECFDSVEISGVEDRFNASLGTYHDLLKIIKDKDFLDNEENEDILEDIVLTLTLFEDREMIEERLKTYAHLFDDKVMKQLKRRRYTGWGRLSRKLINGIRDKQSGKTILDFLKSDGFANRNFMQLIHDDSLTFKEDIQKAQVSGQGDSLHEHIANLAGSPAIKKGILQTVKVVDELVKVMGRHKPENIVIEMARENQTTQKGQKNSRERMKRIEEGIKELGSQILKEHPVENTQLQNEKLYLYYLQNGRDMYVDQELDINRLSDYDVDHIVPQSFLKDDSIDNKVLTRSDKARGKSDNVPSEEVVKKMKNYWRQLLNAKLITQRKFDNLTKAERGGLSELDKAGFIKRQLVETRQITKHVAQILDSRMNTKYDENDKLIREVKVITLKSKLVSDFRKDFQFYKVREINNYHHAHDAYLNAVVGTALIKKYPKLESEFVYGDYKVYDVRKMIAKSEQEIGKATAKYFFYSNIMNFFKTEITLANGEIRKRPLIETNGETGEIVWDKGRDFATVRKVLSMPQVNIVKKTEVQTGGFSKESILPKRNSDKLIARKKDWDPKKYGGFDSPTVAYSVLVVAKVEKGKSKKLKSVKELLGITIMERSSFEKNPIDFLEAKGYKEVKKDLIIKLPKYSLFELENGRKRMLASAGELQKGNELALPSKYVNFLYLASHYEKLKGSPEDNEQKQLFVEQHKHYLDEIIEQISEFSKRVILADANLDKVLSAYNKHRDKPIREQAENIIHLFTLTNLGAPAAFKYFDTTIDRKRYTSTKEVLDATLIHQSITGLYETRIDLSQLGGDGGGSSGGGGGTLNIEDEYRLHETSKEPDVPLGSTWLSDFPQAWAETGGMGLAVRQAPLIIPLKATSTPVSIKQYPMSQEARLGIKPHIQRLLDQGILVPCQSPWNTPLLPVKKPGTNDYRPVQDLREVNKRVEDIHPTVPNPYNLLSGLPPSHQWYTVLDLKDAFFCLRLHPTSQPLFAFEWRDPEMGISGQLTWTRLPQGFKNSPTLFNEALHRDLADFRIQHPDLILLQYVDDLLLAATSEQDCQRGTRALLQTLGNLGYRASAKKAQICQKQVKYLGYLLKEGQRWLTEARKETVMGQPTPKTPRQLREFLGTAGFCRLWIPGFAEMAAPLYPLTKPGTLFNWGPDQQKAYQEIKQALLTAPALGLPDLTKPFELFVDEKQGYAKGVLTQKLGPWRRPVAYLSKKLDPVAAGWPPCLRMVAAIAVLTKDAGKLTMGQPLVILAPHAVEALVKQPPDRWLSNARMTHYQAMLLDTDRVQFGPVVALNPATLLPLPEKEAPHDCLEILAETHGTRPDLTDQPIPDADYTWYTDGSSFLQEGQRRAGAAVTTETEVIWARALPAGTSAQRAELIALTQALKMAEGKKLNVYTDSRYAFATAHVHGEIYRRRGWLTSEGREIKNKNEILALLKALFLPKRLSIIHCPGHQKGNSAEARGNRMADQAAREAAMKAVLETSTLLAGKRTADGSEFEKRTADGSEFESPKKKAKVE

SEQ ID NO: 993 - protein, 2093 aa, synthetic construct
  source 1..2093: note = Description of Artificial Sequence: Synthetic polypeptide
MPAAKRVKLDGGDKKYSIGLDIGTNSVGWAVITDEYKVPSKKFKVLGNTDRHSIKKNLIGALLFDSGETAEATRLKRTARRRYTRRKNRICYLQEIFSNEMAKVDDSFFHRLEESFLVEEDKKHERHPIFGNIVDEVAYHEKYPTIYHLRKKLVDSTDKADLRLIYLALAHMIKFRGHFLIEGDLNPDNSDVDKLFIQLVQTYNQLFEENPINASGVDAKAILSARLSKSRRLENLIAQLPGEKKNGLFGNLIALSLGLTPNFKSNFDLAEDAKLQLSKDTYDDDLDNLLAQIGDQYADLFLAAKNLSDAILLSDILRVNTEITKAPLSASMIKRYDEHHQDLTLLKALVRQQLPEKYKEIFFDQSKNGYAGYIDGGASQEEFYKFIKPILEKMDGTEELLVKLNREDLLRKQRTFDNGSIPHQIHLGELHAILRRQEDFYPFLKDNREKIEKILTFRIPYYVGPLARGNSRFAWMTRKSEETITPWNFEEVVDKGASAQSFIERMTNFDKNLPNEKVLPKHSLLYEYFTVYNELTKVKYVTEGMRKPAFLSGEQKKAIVDLLFKTNRKVTVKQLKEDYFKKIECFDSVEISGVEDRFNASLGTYHDLLKIIKDKDFLDNEENEDILEDIVLTLTLFEDREMIEERLKTYAHLFDDKVMKQLKRRRYTGWGRLSRKLINGIRDKQSGKTILDFLKSDGFANRNFMQLIHDDSLTFKEDIQKAQVSGQGDSLHEHIANLAGSPAIKKGILQTVKVVDELVKVMGRHKPENIVIEMARENQTTQKGQKNSRERMKRIEEGIKELGSQILKEHPVENTQLQNEKLYLYYLQNGRDMYVDQELDINRLSDYDVDHIVPQSFLKDDSIDNKVLTRSDKARGKSDNVPSEEVVKKMKNYWRQLLNAKLITQRKFDNLTKAERGGLSELDKAGFIKRQLVETRQITKHVAQILDSRMNTKYDENDKLIREVKVITLKSKLVSDFRKDFQFYKVREINNYHHAHDAYLNAVVGTALIKKYPKLESEFVYGDYKVYDVRKMIAKSEQEIGKATAKYFFYSNIMNFFKTEITLANGEIRKRPLIETNGETGEIVWDKGRDFATVRKVLSMPQVNIVKKTEVQTGGFSKESILPKRNSDKLIARKKDWDPKKYGGFDSPTVAYSVLVVAKVEKGKSKKLKSVKELLGITIMERSSFEKNPIDFLEAKGYKEVKKDLIIKLPKYSLFELENGRKRMLASAGELQKGNELALPSKYVNFLYLASHYEKLKGSPEDNEQKQLFVEQHKHYLDEIIEQISEFSKRVILADANLDKVLSAYNKHRDKPIREQAENIIHLFTLTNLGAPAAFKYFDTTIDRKRYTSTKEVLDATLIHQSITGLYETRIDLSQLGGDGGGGSEAAAKGGTLNIEDEYRLHETSKEPDVPLGSTWLSDFPQAWAETGGMGLAVRQAPLIIPLKATSTPVSIKQYPMSQEARLGIKPHIQRLLDQGILVPCQSPWNTPLLPVKKPGTNDYRPVQDLREVNKRVEDIHPTVPNPYNLLSGLPPSHQWYTVLDLKDAFFCLRLHPTSQPLFAFEWRDPEMGISGQLTWTRLPQGFKNSPTLFNEALHRDLADFRIQHPDLILLQYVDDLLLAATSEQDCQRGTRALLQTLGNLGYRASAKKAQICQKQVKYLGYLLKEGQRWLTEARKETVMGQPTPKTPRQLREFLGTAGFCRLWIPGFAEMAAPLYPLTKPGTLFNWGPDQQKAYQEIKQALLTAPALGLPDLTKPFELFVDEKQGYAKGVLTQKLGPWRRPVAYLSKKLDPVAAGWPPCLRMVAAIAVLTKDAGKLTMGQPLVILAPHAVEALVKQPPDRWLSNARMTHYQAMLLDTDRVQFGPVVALNPATLLPLPEKEAPHDCLEILAETHGTRPDLTDQPIPDADYTWYTDGSSFLQEGQRRAGAAVTTETEVIWARALPAGTSAQRAELIALTQALKMAEGKKLNVYTDSRYAFATAHVHGEIYRRRGWLTSEGREIKNKNEILALLKALFLPKRLSIIHCPGHQKGNSAEARGNRMADQAAREAAMKAVLETSTLLAGKRTADGSEFEKRTADGSEFESPKKKAKVE

SEQ ID NO: 994 - protein, 2100 aa, synthetic construct
  source 1..2100: note = Description of Artificial Sequence: Synthetic polypeptide
MPAAKRVKLDGGDKKYSIGLDIGTNSVGWAVITDEYKVPSKKFKVLGNTDRHSIKKNLIGALLFDSGETAEATRLKRTARRRYTRRKNRICYLQEIFSNEMAKVDDSFFHRLEESFLVEEDKKHERHPIFGNIVDEVAYHEKYPTIYHLRKKLVDSTDKADLRLIYLALAHMIKFRGHFLIEGDLNPDNSDVDKLFIQLVQTYNQLFEENPINASGVDAKAILSARLSKSRRLENLIAQLPGEKKNGLFGNLIALSLGLTPNFKSNFDLAEDAKLQLSKDTYDDDLDNLLAQIGDQYADLFLAAKNLSDAILLSDILRVNTEITKAPLSASMIKRYDEHHQDLTLLKALVRQQLPEKYKEIFFDQSKNGYAGYIDGGASQEEFYKFIKPILEKMDGTEELLVKLNREDLLRKQRTFDNGSIPHQIHLGELHAILRRQEDFYPFLKDNREKIEKILTFRIPYYVGPLARGNSRFAWMTRKSEETITPWNFEEVVDKGASAQSFIERMTNFDKNLPNEKVLPKHSLLYEYFTVYNELTKVKYVTEGMRKPAFLSGEQKKAIVDLLFKTNRKVTVKQLKEDYFKKIECFDSVEISGVEDRFNASLGTYHDLLKIIKDKDFLDNEENEDILEDIVLTLTLFEDREMIEERLKTYAHLFDDKVMKQLKRRRYTGWGRLSRKLINGIRDKQSGKTILDFLKSDGFANRNFMQLIHDDSLTFKEDIQKAQVSGQGDSLHEHIANLAGSPAIKKGILQTVKVVDELVKVMGRHKPENIVIEMARENQTTQKGQKNSRERMKRIEEGIKELGSQILKEHPVENTQLQNEKLYLYYLQNGRDMYVDQELDINRLSDYDVDHIVPQSFLKDDSIDNKVLTRSDKARGKSDNVPSEEVVKKMKNYWRQLLNAKLITQRKFDNLTKAERGGLSELDKAGFIKRQLVETRQITKHVAQILDSRMNTKYDENDKLIREVKVITLKSKLVSDFRKDFQFYKVREINNYHHAHDAYLNAVVGTALIKKYPKLESEFVYGDYKVYDVRKMIAKSEQEIGKATAKYFFYSNIMNFFKTEITLANGEIRKRPLIETNGETGEIVWDKGRDFATVRKVLSMPQVNIVKKTEVQTGGFSKESILPKRNSDKLIARKKDWDPKKYGGFDSPTVAYSVLVVAKVEKGKSKKLKSVKELLGITIMERSSFEKNPIDFLEAKGYKEVKKDLIIKLPKYSLFELENGRKRMLASAGELQKGNELALPSKYVNFLYLASHYEKLKGSPEDNEQKQLFVEQHKHYLDEIIEQISEFSKRVILADANLDKVLSAYNKHRDKPIREQAENIIHLFTLTNLGAPAAFKYFDTTIDRKRYTSTKEVLDATLIHQSITGLYETRIDLSQLGGDGGGGSGGSGGSGGSGGSGGTLNIEDEYRLHETSKEPDVPLGSTWLSDFPQAWAETGGMGLAVRQAPLIIPLKATSTPVSIKQYPMSQEARLGIKPHIQRLLDQGILVPCQSPWNTPLLPVKKPGTNDYRPVQDLREVNKRVEDIHPTVPNPYNLLSGLPPSHQWYTVLDLKDAFFCLRLHPTSQPLFAFEWRDPEMGISGQLTWTRLPQGFKNSPTLFNEALHRDLADFRIQHPDLILLQYVDDLLLAATSEQDCQRGTRALLQTLGNLGYRASAKKAQICQKQVKYLGYLLKEGQRWLTEARKETVMGQPTPKTPRQLREFLGTAGFCRLWIPGFAEMAAPLYPLTKPGTLFNWGPDQQKAYQEIKQALLTAPALGLPDLTKPFELFVDEKQGYAKGVLTQKLGPWRRPVAYLSKKLDPVAAGWPPCLRMVAAIAVLTKDAGKLTMGQPLVILAPHAVEALVKQPPDRWLSNARMTHYQAMLLDTDRVQFGPVVALNPATLLPLPEKEAPHDCLEILAETHGTRPDLTDQPIPDADYTWYTDGSSFLQEGQRRAGAAVTTETEVIWARALPAGTSAQRAELIALTQALKMAEGKKLNVYTDSRYAFATAHVHGEIYRRRGWLTSEGREIKNKNEILALLKALFLPKRLSIIHCPGHQKGNSAEARGNRMADQAAREAAMKAVLETSTLLAGKRTADGSEFEKRTADGSEFESPKKKAKVE

SEQ ID NO: 995 - protein, 2094 aa, synthetic construct
  source 1..2094: note = Description of Artificial Sequence: Synthetic polypeptide
MPAAKRVKLDGGDKKYSIGLDIGTNSVGWAVITDEYKVPSKKFKVLGNTDRHSIKKNLIGALLFDSGETAEATRLKRTARRRYTRRKNRICYLQEIFSNEMAKVDDSFFHRLEESFLVEEDKKHERHPIFGNIVDEVAYHEKYPTIYHLRKKLVDSTDKADLRLIYLALAHMIKFRGHFLIEGDLNPDNSDVDKLFIQLVQTYNQLFEENPINASGVDAKAILSARLSKSRRLENLIAQLPGEKKNGLFGNLIALSLGLTPNFKSNFDLAEDAKLQLSKDTYDDDLDNLLAQIGDQYADLFLAAKNLSDAILLSDILRVNTEITKAPLSASMIKRYDEHHQDLTLLKALVRQQLPEKYKEIFFDQSKNGYAGYIDGGASQEEFYKFIKPILEKMDGTEELLVKLNREDLLRKQRTFDNGSIPHQIHLGELHAILRRQEDFYPFLKDNREKIEKILTFRIPYYVGPLARGNSRFAWMTRKSEETITPWNFEEVVDKGASAQSFIERMTNFDKNLPNEKVLPKHSLLYEYFTVYNELTKVKYVTEGMRKPAFLSGEQKKAIVDLLFKTNRKVTVKQLKEDYFKKIECFDSVEISGVEDRFNASLGTYHDLLKIIKDKDFLDNEENEDILEDIVLTLTLFEDREMIEERLKTYAHLFDDKVMKQLKRRRYTGWGRLSRKLINGIRDKQSGKTILDFLKSDGFANRNFMQLIHDDSLTFKEDIQKAQVSGQGDSLHEHIANLAGSPAIKKGILQTVKVVDELVKVMGRHKPENIVIEMARENQTTQKGQKNSRERMKRIEEGIKELGSQILKEHPVENTQLQNEKLYLYYLQNGRDMYVDQELDINRLSDYDVDHIVPQSFLKDDSIDNKVLTRSDKARGKSDNVPSEEVVKKMKNYWRQLLNAKLITQRKFDNLTKAERGGLSELDKAGFIKRQLVETRQITKHVAQILDSRMNTKYDENDKLIREVKVITLKSKLVSDFRKDFQFYKVREINNYHHAHDAYLNAVVGTALIKKYPKLESEFVYGDYKVYDVRKMIAKSEQEIGKATAKYFFYSNIMNFFKTEITLANGEIRKRPLIETNGETGEIVWDKGRDFATVRKVLSMPQVNIVKKTEVQTGGFSKESILPKRNSDKLIARKKDWDPKKYGGFDSPTVAYSVLVVAKVEKGKSKKLKSVKELLGITIMERSSFEKNPIDFLEAKGYKEVKKDLIIKLPKYSLFELENGRKRMLASAGELQKGNELALPSKYVNFLYLASHYEKLKGSPEDNEQKQLFVEQHKHYLDEIIEQISEFSKRVILADANLDKVLSAYNKHRDKPIREQAENIIHLFTLTNLGAPAAFKYFDTTIDRKRYTSTKEVLDATLIHQSITGLYETRIDLSQLGGDGGGGSGSSGGGGGTLNIEDEYRLHETSKEPDVPLGSTWLSDFPQAWAETGGMGLAVRQAPLIIPLKATSTPVSIKQYPMSQEARLGIKPHIQRLLDQGILVPCQSPWNTPLLPVKKPGTNDYRPVQDLREVNKRVEDIHPTVPNPYNLLSGLPPSHQWYTVLDLKDAFFCLRLHPTSQPLFAFEWRDPEMGISGQLTWTRLPQGFKNSPTLFNEALHRDLADFRIQHPDLILLQYVDDLLLAATSEQDCQRGTRALLQTLGNLGYRASAKKAQICQKQVKYLGYLLKEGQRWLTEARKETVMGQPTPKTPRQLREFLGTAGFCRLWIPGFAEMAAPLYPLTKPGTLFNWGPDQQKAYQEIKQALLTAPALGLPDLTKPFELFVDEKQGYAKGVLTQKLGPWRRPVAYLSKKLDPVAAGWPPCLRMVAAIAVLTKDAGKLTMGQPLVILAPHAVEALVKQPPDRWLSNARMTHYQAMLLDTDRVQFGPVVALNPATLLPLPEKEAPHDCLEILAETHGTRPDLTDQPIPDADYTWYTDGSSFLQEGQRRAGAAVTTETEVIWARALPAGTSAQRAELIALTQALKMAEGKKLNVYTDSRYAFATAHVHGEIYRRRGWLTSEGREIKNKNEILALLKALFLPKRLSIIHCPGHQKGNSAEARGNRMADQAAREAAMKAVLETSTLLAGKRTADGSEFEKRTADGSEFESPKKKAKVE

SEQ ID NO: 996 - protein, 2100 aa, synthetic construct
  source 1..2100: note = Description of Artificial Sequence: Synthetic polypeptide
MPAAKRVKLDGGDKKYSIGLDIGTNSVGWAVITDEYKVPSKKFKVLGNTDRHSIKKNLIGALLFDSGETAEATRLKRTARRRYTRRKNRICYLQEIFSNEMAKVDDSFFHRLEESFLVEEDKKHERHPIFGNIVDEVAYHEKYPTIYHLRKKLVDSTDKADLRLIYLALAHMIKFRGHFLIEGDLNPDNSDVDKLFIQLVQTYNQLFEENPINASGVDAKAILSARLSKSRRLENLIAQLPGEKKNGLFGNLIALSLGLTPNFKSNFDLAEDAKLQLSKDTYDDDLDNLLAQIGDQYADLFLAAKNLSDAILLSDILRVNTEITKAPLSASMIKRYDEHHQDLTLLKALVRQQLPEKYKEIFFDQSKNGYAGYIDGGASQEEFYKFIKPILEKMDGTEELLVKLNREDLLRKQRTFDNGSIPHQIHLGELHAILRRQEDFYPFLKDNREKIEKILTFRIPYYVGPLARGNSRFAWMTRKSEETITPWNFEEVVDKGASAQSFIERMTNFDKNLPNEKVLPKHSLLYEYFTVYNELTKVKYVTEGMRKPAFLSGEQKKAIVDLLFKTNRKVTVKQLKEDYFKKIECFDSVEISGVEDRFNASLGTYHDLLKIIKDKDFLDNEENEDILEDIVLTLTLFEDREMIEERLKTYAHLFDDKVMKQLKRRRYTGWGRLSRKLINGIRDKQSGKTILDFLKSDGFANRNFMQLIHDDSLTFKEDIQKAQVSGQGDSLHEHIANLAGSPAIKKGILQTVKVVDELVKVMGRHKPENIVIEMARENQTTQKGQKNSRERMKRIEEGIKELGSQILKEHPVENTQLQNEKLYLYYLQNGRDMYVDQELDINRLSDYDVDHIVPQSFLKDDSIDNKVLTRSDKARGKSDNVPSEEVVKKMKNYWRQLLNAKLITQRKFDNLTKAERGGLSELDKAGFIKRQLVETRQITKHVAQILDSRMNTKYDENDKLIREVKVITLKSKLVSDFRKDFQFYKVREINNYHHAHDAYLNAVVGTALIKKYPKLESEFVYGDYKVYDVRKMIAKSEQEIGKATAKYFFYSNIMNFFKTEITLANGEIRKRPLIETNGETGEIVWDKGRDFATVRKVLSMPQVNIVKKTEVQTGGFSKESILPKRNSDKLIARKKDWDPKKYGGFDSPTVAYSVLVVAKVEKGKSKKLKSVKELLGITIMERSSFEKNPIDFLEAKGYKEVKKDLIIKLPKYSLFELENGRKRMLASAGELQKGNELALPSKYVNFLYLASHYEKLKGSPEDNEQKQLFVEQHKHYLDEIIEQISEFSKRVILADANLDKVLSAYNKHRDKPIREQAENIIHLFTLTNLGAPAAFKYFDTTIDRKRYTSTKEVLDATLIHQSITGLYETRIDLSQLGGDGGEAAAKEAAAKEAAAKGGTLNIEDEYRLHETSKEPDVPLGSTWLSDFPQAWAETGGMGLAVRQAPLIIPLKATSTPVSIKQYPMSQEARLGIKPHIQRLLDQGILVPCQSPWNTPLLPVKKPGTNDYRPVQDLREVNKRVEDIHPTVPNPYNLLSGLPPSHQWYTVLDLKDAFFCLRLHPTSQPLFAFEWRDPEMGISGQLTWTRLPQGFKNSPTLFNEALHRDLADFRIQHPDLILLQYVDDLLLAATSEQDCQRGTRALLQTLGNLGYRASAKKAQICQKQVKYLGYLLKEGQRWLTEARKETVMGQPTPKTPRQLREFLGTAGFCRLWIPGFAEMAAPLYPLTKPGTLFNWGPDQQKAYQEIKQALLTAPALGLPDLTKPFELFVDEKQGYAKGVLTQKLGPWRRPVAYLSKKLDPVAAGWPPCLRMVAAIAVLTKDAGKLTMGQPLVILAPHAVEALVKQPPDRWLSNARMTHYQAMLLDTDRVQFGPVVALNPATLLPLPEKEAPHDCLEILAETHGTRPDLTDQPIPDADYTWYTDGSSFLQEGQRRAGAAVTTETEVIWARALPAGTSAQRAELIALTQALKMAEGKKLNVYTDSRYAFATAHVHGEIYRRRGWLTSEGREIKNKNEILALLKALFLPKRLSIIHCPGHQKGNSAEARGNRMADQAAREAAMKAVLETSTLLAGKRTADGSEFEKRTADGSEFESPKKKAKVE

SEQ ID NO: 997 - protein, 2088 aa, synthetic construct
  source 1..2088: note = Description of Artificial Sequence: Synthetic polypeptide
MPAAKRVKLDGGDKKYSIGLDIGTNSVGWAVITDEYKVPSKKFKVLGNTDRHSIKKNLIGALLFDSGETAEATRLKRTARRRYTRRKNRICYLQEIFSNEMAKVDDSFFHRLEESFLVEEDKKHERHPIFGNIVDEVAYHEKYPTIYHLRKKLVDSTDKADLRLIYLALAHMIKFRGHFLIEGDLNPDNSDVDKLFIQLVQTYNQLFEENPINASGVDAKAILSARLSKSRRLENLIAQLPGEKKNGLFGNLIALSLGLTPNFKSNFDLAEDAKLQLSKDTYDDDLDNLLAQIGDQYADLFLAAKNLSDAILLSDILRVNTEITKAPLSASMIKRYDEHHQDLTLLKALVRQQLPEKYKEIFFDQSKNGYAGYIDGGASQEEFYKFIKPILEKMDGTEELLVKLNREDLLRKQRTFDNGSIPHQIHLGELHAILRRQEDFYPFLKDNREKIEKILTFRIPYYVGPLARGNSRFAWMTRKSEETITPWNFEEVVDKGASAQSFIERMTNFDKNLPNEKVLPKHSLLYEYFTVYNELTKVKYVTEGMRKPAFLSGEQKKAIVDLLFKTNRKVTVKQLKEDYFKKIECFDSVEISGVEDRFNASLGTYHDLLKIIKDKDFLDNEENEDILEDIVLTLTLFEDREMIEERLKTYAHLFDDKVMKQLKRRRYTGWGRLSRKLINGIRDKQSGKTILDFLKSDGFANRNFMQLIHDDSLTFKEDIQKAQVSGQGDSLHEHIANLAGSPAIKKGILQTVKVVDELVKVMGRHKPENIVIEMARENQTTQKGQKNSRERMKRIEEGIKELGSQILKEHPVENTQLQNEKLYLYYLQNGRDMYVDQELDINRLSDYDVDHIVPQSFLKDDSIDNKVLTRSDKARGKSDNVPSEEVVKKMKNYWRQLLNAKLITQRKFDNLTKAERGGLSELDKAGFIKRQLVETRQITKHVAQILDSRMNTKYDENDKLIREVKVITLKSKLVSDFRKDFQFYKVREINNYHHAHDAYLNAVVGTALIKKYPKLESEFVYGDYKVYDVRKMIAKSEQEIGKATAKYFFYSNIMNFFKTEITLANGEIRKRPLIETNGETGEIVWDKGRDFATVRKVLSMPQVNIVKKTEVQTGGFSKESILPKRNSDKLIARKKDWDPKKYGGFDSPTVAYSVLVVAKVEKGKSKKLKSVKELLGITIMERSSFEKNPIDFLEAKGYKEVKKDLIIKLPKYSLFELENGRKRMLASAGELQKGNELALPSKYVNFLYLASHYEKLKGSPEDNEQKQLFVEQHKHYLDEIIEQISEFSKRVILADANLDKVLSAYNKHRDKPIREQAENIIHLFTLTNLGAPAAFKYFDTTIDRKRYTSTKEVLDATLIHQSITGLYETRIDLSQLGGDGGGGGGGTLNIEDEYRLHETSKEPDVPLGSTWLSDFPQAWAETGGMGLAVRQAPLIIPLKATSTPVSIKQYPMSQEARLGIKPHIQRLLDQGILVPCQSPWNTPLLPVKKPGTNDYRPVQDLREVNKRVEDIHPTVPNPYNLLSGLPPSHQWYTVLDLKDAFFCLRLHPTSQPLFAFEWRDPEMGISGQLTWTRLPQGFKNSPTLFNEALHRDLADFRIQHPDLILLQYVDDLLLAATSEQDCQRGTRALLQTLGNLGYRASAKKAQICQKQVKYLGYLLKEGQRWLTEARKETVMGQPTPKTPRQLREFLGTAGFCRLWIPGFAEMAAPLYPLTKPGTLFNWGPDQQKAYQEIKQALLTAPALGLPDLTKPFELFVDEKQGYAKGVLTQKLGPWRRPVAYLSKKLDPVAAGWPPCLRMVAAIAVLTKDAGKLTMGQPLVILAPHAVEALVKQPPDRWLSNARMTHYQAMLLDTDRVQFGPVVALNPATLLPLPEKEAPHDCLEILAETHGTRPDLTDQPIPDADYTWYTDGSSFLQEGQRRAGAAVTTETEVIWARALPAGTSAQRAELIALTQALKMAEGKKLNVYTDSRYAFATAHVHGEIYRRRGWLTSEGREIKNKNEILALLKALFLPKRLSIIHCPGHQKGNSAEARGNRMADQAAREAAMKAVLETSTLLAGKRTADGSEFEKRTADGSEFESPKKKAKVE

SEQ ID NO: 998 - protein, 2090 aa, synthetic construct
  source 1..2090: note = Description of Artificial Sequence: Synthetic polypeptide
MPAAKRVKLDGGDKKYSIGLDIGTNSVGWAVITDEYKVPSKKFKVLGNTDRHSIKKNLIGALLFDSGETAEATRLKRTARRRYTRRKNRICYLQEIFSNEMAKVDDSFFHRLEESFLVEEDKKHERHPIFGNIVDEVAYHEKYPTIYHLRKKLVDSTDKADLRLIYLALAHMIKFRGHFLIEGDLNPDNSDVDKLFIQLVQTYNQLFEENPINASGVDAKAILSARLSKSRRLENLIAQLPGEKKNGLFGNLIALSLGLTPNFKSNFDLAEDAKLQLSKDTYDDDLDNLLAQIGDQYADLFLAAKNLSDAILLSDILRVNTEITKAPLSASMIKRYDEHHQDLTLLKALVRQQLPEKYKEIFFDQSKNGYAGYIDGGASQEEFYKFIKPILEKMDGTEELLVKLNREDLLRKQRTFDNGSIPHQIHLGELHAILRRQEDFYPFLKDNREKIEKILTFRIPYYVGPLARGNSRFAWMTRKSEETITPWNFEEVVDKGASAQSFIERMTNFDKNLPNEKVLPKHSLLYEYFTVYNELTKVKYVTEGMRKPAFLSGEQKKAIVDLLFKTNRKVTVKQLKEDYFKKIECFDSVEISGVEDRFNASLGTYHDLLKIIKDKDFLDNEENEDILEDIVLTLTLFEDREMIEERLKTYAHLFDDKVMKQLKRRRYTGWGRLSRKLINGIRDKQSGKTILDFLKSDGFANRNFMQLIHDDSLTFKEDIQKAQVSGQGDSLHEHIANLAGSPAIKKGILQTVKVVDELVKVMGRHKPENIVIEMARENQTTQKGQKNSRERMKRIEEGIKELGSQILKEHPVENTQLQNEKLYLYYLQNGRDMYVDQELDINRLSDYDVDHIVPQSFLKDDSIDNKVLTRSDKARGKSDNVPSEEVVKKMKNYWRQLLNAKLITQRKFDNLTKAERGGLSELDKAGFIKRQLVETRQITKHVAQILDSRMNTKYDENDKLIREVKVITLKSKLVSDFRKDFQFYKVREINNYHHAHDAYLNAVVGTALIKKYPKLESEFVYGDYKVYDVRKMIAKSEQEIGKATAKYFFYSNIMNFFKTEITLANGEIRKRPLIETNGETGEIVWDKGRDFATVRKVLSMPQVNIVKKTEVQTGGFSKESILPKRNSDKLIARKKDWDPKKYGGFDSPTVAYSVLVVAKVEKGKSKKLKSVKELLGITIMERSSFEKNPIDFLEAKGYKEVKKDLIIKLPKYSLFELENGRKRMLASAGELQKGNELALPSKYVNFLYLASHYEKLKGSPEDNEQKQLFVEQHKHYLDEIIEQISEFSKRVILADANLDKVLSAYNKHRDKPIREQAENIIHLFTLTNLGAPAAFKYFDTTIDRKRYTSTKEVLDATLIHQSITGLYETRIDLSQLGGDGGGGGGSGGTLNIEDEYRLHETSKEPDVPLGSTWLSDFPQAWAETGGMGLAVRQAPLIIPLKATSTPVSIKQYPMSQEARLGIKPHIQRLLDQGILVPCQSPWNTPLLPVKKPGTNDYRPVQDLREVNKRVEDIHPTVPNPYNLLSGLPPSHQWYTVLDLKDAFFCLRLHPTSQPLFAFEWRDPEMGISGQLTWTRLPQGFKNSPTLFNEALHRDLADFRIQHPDLILLQYVDDLLLAATSEQDCQRGTRALLQTLGNLGYRASAKKAQICQKQVKYLGYLLKEGQRWLTEARKETVMGQPTPKTPRQLREFLGTAGFCRLWIPGFAEMAAPLYPLTKPGTLFNWGPDQQKAYQEIKQALLTAPALGLPDLTKPFELFVDEKQGYAKGVLTQKLGPWRRPVAYLSKKLDPVAAGWPPCLRMVAAIAVLTKDAGKLTMGQPLVILAPHAVEALVKQPPDRWLSNARMTHYQAMLLDTDRVQFGPVVALNPATLLPLPEKEAPHDCLEILAETHGTRPDLTDQPIPDADYTWYTDGSSFLQEGQRRAGAAVTTETEVIWARALPAGTSAQRAELIALTQALKMAEGKKLNVYTDSRYAFATAHVHGEIYRRRGWLTSEGREIKNKNEILALLKALFLPKRLSIIHCPGHQKGNSAEARGNRMADQAAREAAMKAVLETSTLLAGKRTADGSEFEKRTADGSEFESPKKKAKVE

SEQ ID NO: 999 - protein, 2094 aa, synthetic construct
  source 1..2094: note = Description of Artificial Sequence: Synthetic polypeptide
MPAAKRVKLDGGDKKYSIGLDIGTNSVGWAVITDEYKVPSKKFKVLGNTDRHSIKKNLIGALLFDSGETAEATRLKRTARRRYTRRKNRICYLQEIFSNEMAKVDDSFFHRLEESFLVEEDKKHERHPIFGNIVDEVAYHEKYPTIYHLRKKLVDSTDKADLRLIYLALAHMIKFRGHFLIEGDLNPDNSDVDKLFIQLVQTYNQLFEENPINASGVDAKAILSARLSKSRRLENLIAQLPGEKKNGLFGNLIALSLGLTPNFKSNFDLAEDAKLQLSKDTYDDDLDNLLAQIGDQYADLFLAAKNLSDAILLSDILRVNTEITKAPLSASMIKRYDEHHQDLTLLKALVRQQLPEKYKEIFFDQSKNGYAGYIDGGASQEEFYKFIKPILEKMDGTEELLVKLNREDLLRKQRTFDNGSIPHQIHLGELHAILRRQEDFYPFLKDNREKIEKILTFRIPYYVGPLARGNSRFAWMTRKSEETITPWNFEEVVDKGASAQSFIERMTNFDKNLPNEKVLPKHSLLYEYFTVYNELTKVKYVTEGMRKPAFLSGEQKKAIVDLLFKTNRKVTVKQLKEDYFKKIECFDSVEISGVEDRFNASLGTYHDLLKIIKDKDFLDNEENEDILEDIVLTLTLFEDREMIEERLKTYAHLFDDKVMKQLKRRRYTGWGRLSRKLINGIRDKQSGKTILDFLKSDGFANRNFMQLIHDDSLTFKEDIQKAQVSGQGDSLHEHIANLAGSPAIKKGILQTVKVVDELVKVMGRHKPENIVIEMARENQTTQKGQKNSRERMKRIEEGIKELGSQILKEHPVENTQLQNEKLYLYYLQNGRDMYVDQELDINRLSDYDVDHIVPQSFLKDDSIDNKVLTRSDKARGKSDNVPSEEVVKKMKNYWRQLLNAKLITQRKFDNLTKAERGGLSELDKAGFIKRQLVETRQITKHVAQILDSRMNTKYDENDKLIREVKVITLKSKLVSDFRKDFQFYKVREINNYHHAHDAYLNAVVGTALIKKYPKLESEFVYGDYKVYDVRKMIAKSEQEIGKATAKYFFYSNIMNFFKTEITLANGEIRKRPLIETNGETGEIVWDKGRDFATVRKVLSMPQVNIVKKTEVQTGGFSKESILPKRNSDKLIARKKDWDPKKYGGFDSPTVAYSVLVVAKVEKGKSKKLKSVKELLGITIMERSSFEKNPIDFLEAKGYKEVKKDLIIKLPKYSLFELENGRKRMLASAGELQKGNELALPSKYVNFLYLASHYEKLKGSPEDNEQKQLFVEQHKHYLDEIIEQISEFSKRVILADANLDKVLSAYNKHRDKPIREQAENIIHLFTLTNLGAPAAFKYFDTTIDRKRYTSTKEVLDATLIHQSITGLYETRIDLSQLGGDGGGGGGGSPAPGGTLNIEDEYRLHETSKEPDVPLGSTWLSDFPQAWAETGGMGLAVRQAPLIIPLKATSTPVSIKQYPMSQEARLGIKPHIQRLLDQGILVPCQSPWNTPLLPVKKPGTNDYRPVQDLREVNKRVEDIHPTVPNPYNLLSGLPPSHQWYTVLDLKDAFFCLRLHPTSQPLFAFEWRDPEMGISGQLTWTRLPQGFKNSPTLFNEALHRDLADFRIQHPDLILLQYVDDLLLAATSEQDCQRGTRALLQTLGNLGYRASAKKAQICQKQVKYLGYLLKEGQRWLTEARKETVMGQPTPKTPRQLREFLGTAGFCRLWIPGFAEMAAPLYPLTKPGTLFNWGPDQQKAYQEIKQALLTAPALGLPDLTKPFELFVDEKQGYAKGVLTQKLGPWRRPVAYLSKKLDPVAAGWPPCLRMVAAIAVLTKDAGKLTMGQPLVILAPHAVEALVKQPPDRWLSNARMTHYQAMLLDTDRVQFGPVVALNPATLLPLPEKEAPHDCLEILAETHGTRPDLTDQPIPDADYTWYTDGSSFLQEGQRRAGAAVTTETEVIWARALPAGTSAQRAELIALTQALKMAEGKKLNVYTDSRYAFATAHVHGEIYRRRGWLTSEGREIKNKNEILALLKALFLPKRLSIIHCPGHQKGNSAEARGNRMADQAAREAAMKAVLETSTLLAGKRTADGSEFEKRTADGSEFESPKKKAKVE

SEQ ID NO: 1000 - protein, 2094 aa, synthetic construct
  source 1..2094: note = Description of Artificial Sequence: Synthetic polypeptide
MPAAKRVKLDGGDKKYSIGLDIGTNSVGWAVITDEYKVPSKKFKVLGNTDRHSIKKNLIGALLFDSGETAEATRLKRTARRRYTRRKNRICYLQEIFSNEMAKVDDSFFHRLEESFLVEEDKKHERHPIFGNIVDEVAYHEKYPTIYHLRKKLVDSTDKADLRLIYLALAHMIKFRGHFLIEGDLNPDNSDVDKLFIQLVQTYNQLFEENPINASGVDAKAILSARLSKSRRLENLIAQLPGEKKNGLFGNLIALSLGLTPNFKSNFDLAEDAKLQLSKDTYDDDLDNLLAQIGDQYADLFLAAKNLSDAILLSDILRVNTEITKAPLSASMIKRYDEHHQDLTLLKALVRQQLPEKYKEIFFDQSKNGYAGYIDGGASQEEFYKFIKPILEKMDGTEELLVKLNREDLLRKQRTFDNGSIPHQIHLGELHAILRRQEDFYPFLKDNREKIEKILTFRIPYYVGPLARGNSRFAWMTRKSEETITPWNFEEVVDKGASAQSFIERMTNFDKNLPNEKVLPKHSLLYEYFTVYNELTKVKYVTEGMRKPAFLSGEQKKAIVDLLFKTNRKVTVKQLKEDYFKKIECFDSVEISGVEDRFNASLGTYHDLLKIIKDKDFLDNEENEDILEDIVLTLTLFEDREMIEERLKTYAHLFDDKVMKQLKRRRYTGWGRLSRKLINGIRDKQSGKTILDFLKSDGFANRNFMQLIHDDSLTFKEDIQKAQVSGQGDSLHEHIANLAGSPAIKKGILQTVKVVDELVKVMGRHKPENIVIEMARENQTTQKGQKNSRERMKRIEEGIKELGSQILKEHPVENTQLQNEKLYLYYLQNGRDMYVDQELDINRLSDYDVDHIVPQSFLKDDSIDNKVLTRSDKARGKSDNVPSEEVVKKMKNYWRQLLNAKLITQRKFDNLTKAERGGLSELDKAGFIKRQLVETRQITKHVAQILDSRMNTKYDENDKLIREVKVITLKSKLVSDFRKDFQFYKVREINNYHHAHDAYLNAVVGTALIKKYPKLESEFVYGDYKVYDVRKMIAKSEQEIGKATAKYFFYSNIMNFFKTEITLANGEIRKRPLIETNGETGEIVWDKGRDFATVRKVLSMPQVNIVKKTEVQTGGFSKESILPKRNSDKLIARKKDWDPKKYGGFDSPTVAYSVLVVAKVEKGKSKKLKSVKELLGITIMERSSFEKNPIDFLEAKGYKEVKKDLIIKLPKYSLFELENGRKRMLASAGELQKGNELALPSKYVNFLYLASHYEKLKGSPEDNEQKQLFVEQHKHYLDEIIEQISEFSKRVILADANLDKVLSAYNKHRDKPIREQAENIIHLFTLTNLGAPAAFKYFDTTIDRKRYTSTKEVLDATLIHQSITGLYETRIDLSQLGGDGGGSSPAPGGGGGTLNIEDEYRLHETSKEPDVPLGSTWLSDFPQAWAETGGMGLAVRQAPLIIPLKATSTPVSIKQYPMSQEARLGIKPHIQRLLDQGILVPCQSPWNTPLLPVKKPGTNDYRPVQDLREVNKRVEDIHPTVPNPYNLLSGLPPSHQWYTVLDLKDAFFCLRLHPTSQPLFAFEWRDPEMGISGQLTWTRLPQGFKNSPTLFNEALHRDLADFRIQHPDLILLQYVDDLLLAATSEQDCQRGTRALLQTLGNLGYRASAKKAQICQKQVKYLGYLLKEGQRWLTEARKETVMGQPTPKTPRQLREFLGTAGFCRLWIPGFAEMAAPLYPLTKPGTLFNWGPDQQKAYQEIKQALLTAPALGLPDLTKPFELFVDEKQGYAKGVLTQKLGPWRRPVAYLSKKLDPVAAGWPPCLRMVAAIAVLTKDAGKLTMGQPLVILAPHAVEALVKQPPDRWLSNARMTHYQAMLLDTDRVQFGPVVALNPATLLPLPEKEAPHDCLEILAETHGTRPDLTDQPIPDADYTWYTDGSSFLQEGQRRAGAAVTTETEVIWARALPAGTSAQRAELIALTQALKMAEGKKLNVYTDSRYAFATAHVHGEIYRRRGWLTSEGREIKNKNEILALLKALFLPKRLSIIHCPGHQKGNSAEARGNRMADQAAREAAMKAVLETSTLLAGKRTADGSEFEKRTADGSEFESPKKKAKVE

SEQ ID NO: 1001 - protein, 2094 aa, synthetic construct
  source 1..2094: note = Description of Artificial Sequence: Synthetic polypeptide
MPAAKRVKLDGGDKKYSIGLDIGTNSVGWAVITDEYKVPSKKFKVLGNTDRHSIKKNLIGALLFDSGETAEATRLKRTARRRYTRRKNRICYLQEIFSNEMAKVDDSFFHRLEESFLVEEDKKHERHPIFGNIVDEVAYHEKYPTIYHLRKKLVDSTDKADLRLIYLALAHMIKFRGHFLIEGDLNPDNSDVDKLFIQLVQTYNQLFEENPINASGVDAKAILSARLSKSRRLENLIAQLPGEKKNGLFGNLIALSLGLTPNFKSNFDLAEDAKLQLSKDTYDDDLDNLLAQIGDQYADLFLAAKNLSDAILLSDILRVNTEITKAPLSASMIKRYDEHHQDLTLLKALVRQQLPEKYKEIFFDQSKNGYAGYIDGGASQEEFYKFIKPILEKMDGTEELLVKLNREDLLRKQRTFDNGSIPHQIHLGELHAILRRQEDFYPFLKDNREKIEKILTFRIPYYVGPLARGNSRFAWMTRKSEETITPWNFEEVVDKGASAQSFIERMTNFDKNLPNEKVLPKHSLLYEYFTVYNELTKVKYVTEGMRKPAFLSGEQKKAIVDLLFKTNRKVTVKQLKEDYFKKIECFDSVEISGVEDRFNASLGTYHDLLKIIKDKDFLDNEENEDILEDIVLTLTLFEDREMIEERLKTYAHLFDDKVMKQLKRRRYTGWGRLSRKLINGIRDKQSGKTILDFLKSDGFANRNFMQLIHDDSLTFKEDIQKAQVSGQGDSLHEHIANLAGSPAIKKGILQTVKVVDELVKVMGRHKPENIVIEMARENQTTQKGQKNSRERMKRIEEGIKELGSQILKEHPVENTQLQNEKLYLYYLQNGRDMYVDQELDINRLSDYDVDHIVPQSFLKDDSIDNKVLTRSDKARGKSDNVPSEEVVKKMKNYWRQLLNAKLITQRKFDNLTKAERGGLSELDKAGFIKRQLVETRQITKHVAQILDSRMNTKYDENDKLIREVKVITLKSKLVSDFRKDFQFYKVREINNYHHAHDAYLNAVVGTALIKKYPKLESEFVYGDYKVYDVRKMIAKSEQEIGKATAKYFFYSNIMNFFKTEITLANGEIRKRPLIETNGETGEIVWDKGRDFATVRKVLSMPQVNIVKKTEVQTGGFSKESILPKRNSDKLIARKKDWDPKKYGGFDSPTVAYSVLVVAKVEKGKSKKLKSVKELLGITIMERSSFEKNPIDFLEAKGYKEVKKDLIIKLPKYSLFELENGRKRMLASAGELQKGNELALPSKYVNFLYLASHYEKLKGSPEDNEQKQLFVEQHKHYLDEIIEQISEFSKRVILADANLDKVLSAYNKHRDKPIREQAENIIHLFTLTNLGAPAAFKYFDTTIDRKRYTSTKEVLDATLIHQSITGLYETRIDLSQLGGDGGGGSPAPGGGGGTLNIEDEYRLHETSKEPDVPLGSTWLSDFPQAWAETGGMGLAVRQAPLIIPLKATSTPVSIKQYPMSQEARLGIKPHIQRLLDQGILVPCQSPWNTPLLPVKKPGTNDYRPVQDLREVNKRVEDIHPTVPNPYNLLSGLPPSHQWYTVLDLKDAFFCLRLHPTSQPLFAFEWRDPEMGISGQLTWTRLPQGFKNSPTLFNEALHRDLADFRIQHPDLILLQYVDDLLLAATSEQDCQRGTRALLQTLGNLGYRASAKKAQICQKQVKYLGYLLKEGQRWLTEARKETVMGQPTPKTPRQLREFLGTAGFCRLWIPGFAEMAAPLYPLTKPGTLFNWGPDQQKAYQEIKQALLTAPALGLPDLTKPFELFVDEKQGYAKGVLTQKLGPWRRPVAYLSKKLDPVAAGWPPCLRMVAAIAVLTKDAGKLTMGQPLVILAPHAVEALVKQPPDRWLSNARMTHYQAMLLDTDRVQFGPVVALNPATLLPLPEKEAPHDCLEILAETHGTRPDLTDQPIPDADYTWYTDGSSFLQEGQRRAGAAVTTETEVIWARALPAGTSAQRAELIALTQALKMAEGKKLNVYTDSRYAFATAHVHGEIYRRRGWLTSEGREIKNKNEILALLKALFLPKRLSIIHCPGHQKGNSAEARGNRMADQAAREAAMKAVLETSTLLAGKRTADGSEFEKRTADGSEFESPKKKAKVE

SEQ ID NO: 1002 - protein, 2095 aa, synthetic construct
  source 1..2095: note = Description of Artificial Sequence: Synthetic polypeptide
MPAAKRVKLDGGDKKYSIGLDIGTNSVGWAVITDEYKVPSKKFKVLGNTDRHSIKKNLIGALLFDSGETAEATRLKRTARRRYTRRKNRICYLQEIFSNEMAKVDDSFFHRLEESFLVEEDKKHERHPIFGNIVDEVAYHEKYPTIYHLRKKLVDSTDKADLRLIYLALAHMIKFRGHFLIEGDLNPDNSDVDKLFIQLVQTYNQLFEENPINASGVDAKAILSARLSKSRRLENLIAQLPGEKKNGLFGNLIALSLGLTPNFKSNFDLAEDAKLQLSKDTYDDDLDNLLAQIGDQYADLFLAAKNLSDAILLSDILRVNTEITKAPLSASMIKRYDEHHQDLTLLKALVRQQLPEKYKEIFFDQSKNGYAGYIDGGASQEEFYKFIKPILEKMDGTEELLVKLNREDLLRKQRTFDNGSIPHQIHLGELHAILRRQEDFYPFLKDNREKIEKILTFRIPYYVGPLARGNSRFAWMTRKSEETITPWNFEEVVDKGASAQSFIERMTNFDKNLPNEKVLPKHSLLYEYFTVYNELTKVKYVTEGMRKPAFLSGEQKKAIVDLLFKTNRKVTVKQLKEDYFKKIECFDSVEISGVEDRFNASLGTYHDLLKIIKDKDFLDNEENEDILEDIVLTLTLFEDREMIEERLKTYAHLFDDKVMKQLKRRRYTGWGRLSRKLINGIRDKQSGKTILDFLKSDGFANRNFMQLIHDDSLTFKEDIQKAQVSGQGDSLHEHIANLAGSPAIKKGILQTVKVVDELVKVMGRHKPENIVIEMARENQTTQKGQKNSRERMKRIEEGIKELGSQILKEHPVENTQLQNEKLYLYYLQNGRDMYVDQELDINRLSDYDVDHIVPQSFLKDDSIDNKVLTRSDKARGKSDNVPSEEVVKKMKNYWRQLLNAKLITQRKFDNLTKAERGGLSELDKAGFIKRQLVETRQITKHVAQILDSRMNTKYDENDKLIREVKVITLKSKLVSDFRKDFQFYKVREINNYHHAHDAYLNAVVGTALIKKYPKLESEFVYGDYKVYDVRKMIAKSEQEIGKATAKYFFYSNIMNFFKTEITLANGEIRKRPLIETNGETGEIVWDKGRDFATVRKVLSMPQVNIVKKTEVQTGGFSKESILPKRNSDKLIARKKDWDPKKYGGFDSPTVAYSVLVVAKVEKGKSKKLKSVKELLGITIMERSSFEKNPIDFLEAKGYKEVKKDLIIKLPKYSLFELENGRKRMLASAGELQKGNELALPSKYVNFLYLASHYEKLKGSPEDNEQKQLFVEQHKHYLDEIIEQISEFSKRVILADANLDKVLSAYNKHRDKPIREQAENIIHLFTLTNLGAPAAFKYFDTTIDRKRYTSTKEVLDATLIHQSITGLYETRIDLSQLGGDGGGGGGSGGGGSGGTLNIEDEYRLHETSKEPDVPLGSTWLSDFPQAWAETGGMGLAVRQAPLIIPLKATSTPVSIKQYPMSQEARLGIKPHIQRLLDQGILVPCQSPWNTPLLPVKKPGTNDYRPVQDLREVNKRVEDIHPTVPNPYNLLSGLPPSHQWYTVLDLKDAFFCLRLHPTSQPLFAFEWRDPEMGISGQLTWTRLPQGFKNSPTLFNEALHRDLADFRIQHPDLILLQYVDDLLLAATSEQDCQRGTRALLQTLGNLGYRASAKKAQICQKQVKYLGYLLKEGQRWLTEARKETVMGQPTPKTPRQLREFLGTAGFCRLWIPGFAEMAAPLYPLTKPGTLFNWGPDQQKAYQEIKQALLTAPALGLPDLTKPFELFVDEKQGYAKGVLTQKLGPWRRPVAYLSKKLDPVAAGWPPCLRMVAAIAVLTKDAGKLTMGQPLVILAPHAVEALVKQPPDRWLSNARMTHYQAMLLDTDRVQFGPVVALNPATLLPLPEKEAPHDCLEILAETHGTRPDLTDQPIPDADYTWYTDGSSFLQEGQRRAGAAVTTETEVIWARALPAGTSAQRAELIALTQALKMAEGKKLNVYTDSRYAFATAHVHGEIYRRRGWLTSEGREIKNKNEILALLKALFLPKRLSIIHCPGHQKGNSAEARGNRMADQAAREAAMKAVLETSTLLAGKRTADGSEFEKRTADGSEFESPKKKAKVE

SEQ ID NO: 1003 - protein, 2088 aa, synthetic construct
  source 1..2088: note = Description of Artificial Sequence: Synthetic polypeptide
MPAAKRVKLDGGDKKYSIGLDIGTNSVGWAVITDEYKVPSKKFKVLGNTDRHSIKKNLIGALLFDSGETAEATRLKRTARRRYTRRKNRICYLQEIFSNEMAKVDDSFFHRLEESFLVEEDKKHERHPIFGNIVDEVAYHEKYPTIYHLRKKLVDSTDKADLRLIYLALAHMIKFRGHFLIEGDLNPDNSDVDKLFIQLVQTYNQLFEENPINASGVDAKAILSARLSKSRRLENLIAQLPGEKKNGLFGNLIALSLGLTPNFKSNFDLAEDAKLQLSKDTYDDDLDNLLAQIGDQYADLFLAAKNLSDAILLSDILRVNTEITKAPLSASMIKRYDEHHQDLTLLKALVRQQLPEKYKEIFFDQSKNGYAGYIDGGASQEEFYKFIKPILEKMDGTEELLVKLNREDLLRKQRTFDNGSIPHQIHLGELHAILRRQEDFYPFLKDNREKIEKILTFRIPYYVGPLARGNSRFAWMTRKSEETITPWNFEEVVDKGASAQSFIERMTNFDKNLPNEKVLPKHSLLYEYFTVYNELTKVKYVTEGMRKPAFLSGEQKKAIVDLLFKTNRKVTVKQLKEDYFKKIECFDSVEISGVEDRFNASLGTYHDLLKIIKDKDFLDNEENEDILEDIVLTLTLFEDREMIEERLKTYAHLFDDKVMKQLKRRRYTGWGRLSRKLINGIRDKQSGKTILDFLKSDGFANRNFMQLIHDDSLTFKEDIQKAQVSGQGDSLHEHIANLAGSPAIKKGILQTVKVVDELVKVMGRHKPENIVIEMARENQTTQKGQKNSRERMKRIEEGIKELGSQILKEHPVENTQLQNEKLYLYYLQNGRDMYVDQELDINRLSDYDVDHIVPQSFLKDDSIDNKVLTRSDKARGKSDNVPSEEVVKKMKNYWRQLLNAKLITQRKFDNLTKAERGGLSELDKAGFIKRQLVETRQITKHVAQILDSRMNTKYDENDKLIREVKVITLKSKLVSDFRKDFQFYKVREINNYHHAHDAYLNAVVGTALIKKYPKLESEFVYGDYKVYDVRKMIAKSEQEIGKATAKYFFYSNIMNFFKTEITLANGEIRKRPLIETNGETGEIVWDKGRDFATVRKVLSMPQVNIVKKTEVQTGGFSKESILPKRNSDKLIARKKDWDPKKYGGFDSPTVAYSVLVVAKVEKGKSKKLKSVKELLGITIMERSSFEKNPIDFLEAKGYKEVKKDLIIKLPKYSLFELENGRKRMLASAGELQKGNELALPSKYVNFLYLASHYEKLKGSPEDNEQKQLFVEQHKHYLDEIIEQISEFSKRVILADANLDKVLSAYNKHRDKPIREQAENIIHLFTLTNLGAPAAFKYFDTTIDRKRYTSTKEVLDATLIHQSITGLYETRIDLSQLGGDGGGGSGGTLNIEDEYRLHETSKEPDVPLGSTWLSDFPQAWAETGGMGLAVRQAPLIIPLKATSTPVSIKQYPMSQEARLGIKPHIQRLLDQGILVPCQSPWNTPLLPVKKPGTNDYRPVQDLREVNKRVEDIHPTVPNPYNLLSGLPPSHQWYTVLDLKDAFFCLRLHPTSQPLFAFEWRDPEMGISGQLTWTRLPQGFKNSPTLFNEALHRDLADFRIQHPDLILLQYVDDLLLAATSEQDCQRGTRALLQTLGNLGYRASAKKAQICQKQVKYLGYLLKEGQRWLTEARKETVMGQPTPKTPRQLREFLGTAGFCRLWIPGFAEMAAPLYPLTKPGTLFNWGPDQQKAYQEIKQALLTAPALGLPDLTKPFELFVDEKQGYAKGVLTQKLGPWRRPVAYLSKKLDPVAAGWPPCLRMVAAIAVLTKDAGKLTMGQPLVILAPHAVEALVKQPPDRWLSNARMTHYQAMLLDTDRVQFGPVVALNPATLLPLPEKEAPHDCLEILAETHGTRPDLTDQPIPDADYTWYTDGSSFLQEGQRRAGAAVTTETEVIWARALPAGTSAQRAELIALTQALKMAEGKKLNVYTDSRYAFATAHVHGEIYRRRGWLTSEGREIKNKNEILALLKALFLPKRLSIIHCPGHQKGNSAEARGNRMADQAAREAAMKAVLETSTLLAGKRTADGSEFEKRTADGSEFESPKKKAKVE

SEQ ID NO: 1004 - protein, 2094 aa, synthetic construct
  source 1..2094: note = Description of Artificial Sequence: Synthetic polypeptide
MPAAKRVKLDGGDKKYSIGLDIGTNSVGWAVITDEYKVPSKKFKVLGNTDRHSIKKNLIGALLFDSGETAEATRLKRTARRRYTRRKNRICYLQEIFSNEMAKVDDSFFHRLEESFLVEEDKKHERHPIFGNIVDEVAYHEKYPTIYHLRKKLVDSTDKADLRLIYLALAHMIKFRGHFLIEGDLNPDNSDVDKLFIQLVQTYNQLFEENPINASGVDAKAILSARLSKSRRLENLIAQLPGEKKNGLFGNLIALSLGLTPNFKSNFDLAEDAKLQLSKDTYDDDLDNLLAQIGDQYADLFLAAKNLSDAILLSDILRVNTEITKAPLSASMIKRYDEHHQDLTLLKALVRQQLPEKYKEIFFDQSKNGYAGYIDGGASQEEFYKFIKPILEKMDGTEELLVKLNREDLLRKQRTFDNGSIPHQIHLGELHAILRRQEDFYPFLKDNREKIEKILTFRIPYYVGPLARGNSRFAWMTRKSEETITPWNFEEVVDKGASAQSFIERMTNFDKNLPNEKVLPKHSLLYEYFTVYNELTKVKYVTEGMRKPAFLSGEQKKAIVDLLFKTNRKVTVKQLKEDYFKKIECFDSVEISGVEDRFNASLGTYHDLLKIIKDKDFLDNEENEDILEDIVLTLTLFEDREMIEERLKTYAHLFDDKVMKQLKRRRYTGWGRLSRKLINGIRDKQSGKTILDFLKSDGFANRNFMQLIHDDSLTFKEDIQKAQVSGQGDSLHEHIANLAGSPAIKKGILQTVKVVDELVKVMGRHKPENIVIEMARENQTTQKGQKNSRERMKRIEEGIKELGSQILKEHPVENTQLQNEKLYLYYLQNGRDMYVDQELDINRLSDYDVDHIVPQSFLKDDSIDNKVLTRSDKARGKSDNVPSEEVVKKMKNYWRQLLNAKLITQRKFDNLTKAERGGLSELDKAGFIKRQLVETRQITKHVAQILDSRMNTKYDENDKLIREVKVITLKSKLVSDFRKDFQFYKVREINNYHHAHDAYLNAVVGTALIKKYPKLESEFVYGDYKVYDVRKMIAKSEQEIGKATAKYFFYSNIMNFFKTEITLANGEIRKRPLIETNGETGEIVWDKGRDFATVRKVLSMPQVNIVKKTEVQTGGFSKESILPKRNSDKLIARKKDWDPKKYGGFDSPTVAYSVLVVAKVEKGKSKKLKSVKELLGITIMERSSFEKNPIDFLEAKGYKEVKKDLIIKLPKYSLFELENGRKRMLASAGELQKGNELALPSKYVNFLYLASHYEKLKGSPEDNEQKQLFVEQHKHYLDEIIEQISEFSKRVILADANLDKVLSAYNKHRDKPIREQAENIIHLFTLTNLGAPAAFKYFDTTIDRKRYTSTKEVLDATLIHQSITGLYETRIDLSQLGGDGGGSSGGSGGGGGTLNIEDEYRLHETSKEPDVPLGSTWLSDFPQAWAETGGMGLAVRQAPLIIPLKATSTPVSIKQYPMSQEARLGIKPHIQRLLDQGILVPCQSPWNTPLLPVKKPGTNDYRPVQDLREVNKRVEDIHPTVPNPYNLLSGLPPSHQWYTVLDLKDAFFCLRLHPTSQPLFAFEWRDPEMGISGQLTWTRLPQGFKNSPTLFNEALHRDLADFRIQHPDLILLQYVDDLLLAATSEQDCQRGTRALLQTLGNLGYRASAKKAQICQKQVKYLGYLLKEGQRWLTEARKETVMGQPTPKTPRQLREFLGTAGFCRLWIPGFAEMAAPLYPLTKPGTLFNWGPDQQKAYQEIKQALLTAPALGLPDLTKPFELFVDEKQGYAKGVLTQKLGPWRRPVAYLSKKLDPVAAGWPPCLRMVAAIAVLTKDAGKLTMGQPLVILAPHAVEALVKQPPDRWLSNARMTHYQAMLLDTDRVQFGPVVALNPATLLPLPEKEAPHDCLEILAETHGTRPDLTDQPIPDADYTWYTDGSSFLQEGQRRAGAAVTTETEVIWARALPAGTSAQRAELIALTQALKMAEGKKLNVYTDSRYAFATAHVHGEIYRRRGWLTSEGREIKNKNEILALLKALFLPKRLSIIHCPGHQKGNSAEARGNRMADQAAREAAMKAVLETSTLLAGKRTADGSEFEKRTADGSEFESPKKKAKVE

SEQ ID NO: 1005 - protein, 2096 aa, synthetic construct
  source 1..2096: note = Description of Artificial Sequence: Synthetic polypeptide
MPAAKRVKLDGGDKKYSIGLDIGTNSVGWAVITDEYKVPSKKFKVLGNTDRHSIKKNLIGALLFDSGETAEATRLKRTARRRYTRRKNRICYLQEIFSNEMAKVDDSFFHRLEESFLVEEDKKHERHPIFGNIVDEVAYHEKYPTIYHLRKKLVDSTDKADLRLIYLALAHMIKFRGHFLIEGDLNPDNSDVDKLFIQLVQTYNQLFEENPINASGVDAKAILSARLSKSRRLENLIAQLPGEKKNGLFGNLIALSLGLTPNFKSNFDLAEDAKLQLSKDTYDDDLDNLLAQIGDQYADLFLAAKNLSDAILLSDILRVNTEITKAPLSASMIKRYDEHHQDLTLLKALVRQQLPEKYKEIFFDQSKNGYAGYIDGGASQEEFYKFIKPILEKMDGTEELLVKLNREDLLRKQRTFDNGSIPHQIHLGELHAILRRQEDFYPFLKDNREKIEKILTFRIPYYVGPLARGNSRFAWMTRKSEETITPWNFEEVVDKGASAQSFIERMTNFDKNLPNEKVLPKHSLLYEYFTVYNELTKVKYVTEGMRKPAFLSGEQKKAIVDLLFKTNRKVTVKQLKEDYFKKIECFDSVEISGVEDRFNASLGTYHDLLKIIKDKDFLDNEENEDILEDIVLTLTLFEDREMIEERLKTYAHLFDDKVMKQLKRRRYTGWGRLSRKLINGIRDKQSGKTILDFLKSDGFANRNFMQLIHDDSLTFKEDIQKAQVSGQGDSLHEHIANLAGSPAIKKGILQTVKVVDELVKVMGRHKPENIVIEMARENQTTQKGQKNSRERMKRIEEGIKELGSQILKEHPVENTQLQNEKLYLYYLQNGRDMYVDQELDINRLSDYDVDHIVPQSFLKDDSIDNKVLTRSDKARGKSDNVPSEEVVKKMKNYWRQLLNAKLITQRKFDNLTKAERGGLSELDKAGFIKRQLVETRQITKHVAQILDSRMNTKYDENDKLIREVKVITLKSKLVSDFRKDFQFYKVREINNYHHAHDAYLNAVVGTALIKKYPKLESEFVYGDYKVYDVRKMIAKSEQEIGKATAKYFFYSNIMNFFKTEITLANGEIRKRPLIETNGETGEIVWDKGRDFATVRKVLSMPQVNIVKKTEVQTGGFSKESILPKRNSDKLIARKKDWDPKKYGGFDSPTVAYSVLVVAKVEKGKSKKLKSVKELLGITIMERSSFEKNPIDFLEAKGYKEVKKDLIIKLPKYSLFELENGRKRMLASAGELQKGNELALPSKYVNFLYLASHYEKLKGSPEDNEQKQLFVEQHKHYLDEIIEQISEFSKRVILADANLDKVLSAYNKHRDKPIREQAENIIHLFTLTNLGAPAAFKYFDTTIDRKRYTSTKEVLDATLIHQSITGLYETRIDLSQLGGDGGGGSGSSEAAAKGGTLNIEDEYRLHETSKEPDVPLGSTWLSDFPQAWAETGGMGLAVRQAPLIIPLKATSTPVSIKQYPMSQEARLGIKPHIQRLLDQGILVPCQSPWNTPLLPVKKPGTNDYRPVQDLREVNKRVEDIHPTVPNPYNLLSGLPPSHQWYTVLDLKDAFFCLRLHPTSQPLFAFEWRDPEMGISGQLTWTRLPQGFKNSPTLFNEALHRDLADFRIQHPDLILLQYVDDLLLAATSEQDCQRGTRALLQTLGNLGYRASAKKAQICQKQVKYLGYLLKEGQRWLTEARKETVMGQPTPKTPRQLREFLGTAGFCRLWIPGFAEMAAPLYPLTKPGTLFNWGPDQQKAYQEIKQALLTAPALGLPDLTKPFELFVDEKQGYAKGVLTQKLGPWRRPVAYLSKKLDPVAAGWPPCLRMVAAIAVLTKDAGKLTMGQPLVILAPHAVEALVKQPPDRWLSNARMTHYQAMLLDTDRVQFGPVVALNPATLLPLPEKEAPHDCLEILAETHGTRPDLTDQPIPDADYTWYTDGSSFLQEGQRRAGAAVTTETEVIWARALPAGTSAQRAELIALTQALKMAEGKKLNVYTDSRYAFATAHVHGEIYRRRGWLTSEGREIKNKNEILALLKALFLPKRLSIIHCPGHQKGNSAEARGNRMADQAAREAAMKAVLETSTLLAGKRTADGSEFEKRTADGSEFESPKKKAKVE

SEQ ID NO: 1006 - protein, 2131 aa, synthetic construct
  source 1..2131: note = Description of Artificial Sequence: Synthetic polypeptide
MPAAKRVKLDGGDKKYSIGLDIGTNSVGWAVITDEYKVPSKKFKVLGNTDRHSIKKNLIGALLFDSGETAEATRLKRTARRRYTRRKNRICYLQEIFSNEMAKVDDSFFHRLEESFLVEEDKKHERHPIFGNIVDEVAYHEKYPTIYHLRKKLVDSTDKADLRLIYLALAHMIKFRGHFLIEGDLNPDNSDVDKLFIQLVQTYNQLFEENPINASGVDAKAILSARLSKSRRLENLIAQLPGEKKNGLFGNLIALSLGLTPNFKSNFDLAEDAKLQLSKDTYDDDLDNLLAQIGDQYADLFLAAKNLSDAILLSDILRVNTEITKAPLSASMIKRYDEHHQDLTLLKALVRQQLPEKYKEIFFDQSKNGYAGYIDGGASQEEFYKFIKPILEKMDGTEELLVKLNREDLLRKQRTFDNGSIPHQIHLGELHAILRRQEDFYPFLKDNREKIEKILTFRIPYYVGPLARGNSRFAWMTRKSEETITPWNFEEVVDKGASAQSFIERMTNFDKNLPNEKVLPKHSLLYEYFTVYNELTKVKYVTEGMRKPAFLSGEQKKAIVDLLFKTNRKVTVKQLKEDYFKKIECFDSVEISGVEDRFNASLGTYHDLLKIIKDKDFLDNEENEDILEDIVLTLTLFEDREMIEERLKTYAHLFDDKVMKQLKRRRYTGWGRLSRKLINGIRDKQSGKTILDFLKSDGFANRNFMQLIHDDSLTFKEDIQKAQVSGQGDSLHEHIANLAGSPAIKKGILQTVKVVDELVKVMGRHKPENIVIEMARENQTTQKGQKNSRERMKRIEEGIKELGSQILKEHPVENTQLQNEKLYLYYLQNGRDMYVDQELDINRLSDYDVDHIVPQSFLKDDSIDNKVLTRSDKARGKSDNVPSEEVVKKMKNYWRQLLNAKLITQRKFDNLTKAERGGLSELDKAGFIKRQLVETRQITKHVAQILDSRMNTKYDENDKLIREVKVITLKSKLVSDFRKDFQFYKVREINNYHHAHDAYLNAVVGTALIKKYPKLESEFVYGDYKVYDVRKMIAKSEQEIGKATAKYFFYSNIMNFFKTEITLANGEIRKRPLIETNGETGEIVWDKGRDFATVRKVLSMPQVNIVKKTEVQTGGFSKESILPKRNSDKLIARKKDWDPKKYGGFDSPTVAYSVLVVAKVEKGKSKKLKSVKELLGITIMERSSFEKNPIDFLEAKGYKEVKKDLIIKLPKYSLFELENGRKRMLASAGELQKGNELALPSKYVNFLYLASHYEKLKGSPEDNEQKQLFVEQHKHYLDEIIEQISEFSKRVILADANLDKVLSAYNKHRDKPIREQAENIIHLFTLTNLGAPAAFKYFDTTIDRKRYTSTKEVLDATLIHQSITGLYETRIDLSQLGGDGGAEAAAKEAAAKEAAAKEAAAKALEAEAAAKEAAAKEAAAKEAAAKAGGTLNIEDEYRLHETSKEPDVPLGSTWLSDFPQAWAETGGMGLAVRQAPLIIPLKATSTPVSIKQYPMSQEARLGIKPHIQRLLDQGILVPCQSPWNTPLLPVKKPGTNDYRPVQDLREVNKRVEDIHPTVPNPYNLLSGLPPSHQWYTVLDLKDAFFCLRLHPTSQPLFAFEWRDPEMGISGQLTWTRLPQGFKNSPTLFNEALHRDLADFRIQHPDLILLQYVDDLLLAATSEQDCQRGTRALLQTLGNLGYRASAKKAQICQKQVKYLGYLLKEGQRWLTEARKETVMGQPTPKTPRQLREFLGKAGFCRLFIPGFAEMAAPLYPLTKPGTLFNWGPDQQKAYQEIKQALLTAPALGLPDLTKPFELFVDEKQGYAKGVLTQKLGPWRRPVAYLSKKLDPVAAGWPPCLRMVAAIAVLTKDAGKLTMGQPLVILAPHAVEALVKQPPDRWLSNARMTHYQAMLLDTDRVQFGPVVALNPATLLPLPEKEAPHDCLEILAETHGTRPDLTDQPIPDADYTWYTDGSSFLQEGQRRAGAAVTTETEVIWARALPAGTSAQRAELIALTQALKMAEGKKLNVYTDSRYAFATAHVHGEIYRRRGWLTSEGREIKNKNEILALLKALFLPKRLSIIHCPGHQKGNSAEARGNRMADQAAREAAMKAVLETSTLLAGKRTADGSEFEKRTADGSEFESPKKKAKVE

SEQ ID NO: 1007 - protein, 2096 aa, synthetic construct
  source 1..2096: note = Description of Artificial Sequence: Synthetic polypeptide
MPAAKRVKLDGGDKKYSIGLDIGTNSVGWAVITDEYKVPSKKFKVLGNTDRHSIKKNLIGALLFDSGETAEATRLKRTARRRYTRRKNRICYLQEIFSNEMAKVDDSFFHRLEESFLVEEDKKHERHPIFGNIVDEVAYHEKYPTIYHLRKKLVDSTDKADLRLIYLALAHMIKFRGHFLIEGDLNPDNSDVDKLFIQLVQTYNQLFEENPINASGVDAKAILSARLSKSRRLENLIAQLPGEKKNGLFGNLIALSLGLTPNFKSNFDLAEDAKLQLSKDTYDDDLDNLLAQIGDQYADLFLAAKNLSDAILLSDILRVNTEITKAPLSASMIKRYDEHHQDLTLLKALVRQQLPEKYKEIFFDQSKNGYAGYIDGGASQEEFYKFIKPILEKMDGTEELLVKLNREDLLRKQRTFDNGSIPHQIHLGELHAILRRQEDFYPFLKDNREKIEKILTFRIPYYVGPLARGNSRFAWMTRKSEETITPWNFEEVVDKGASAQSFIERMTNFDKNLPNEKVLPKHSLLYEYFTVYNELTKVKYVTEGMRKPAFLSGEQKKAIVDLLFKTNRKVTVKQLKEDYFKKIECFDSVEISGVEDRFNASLGTYHDLLKIIKDKDFLDNEENEDILEDIVLTLTLFEDREMIEERLKTYAHLFDDKVMKQLKRRRYTGWGRLSRKLINGIRDKQSGKTILDFLKSDGFANRNFMQLIHDDSLTFKEDIQKAQVSGQGDSLHEHIANLAGSPAIKKGILQTVKVVDELVKVMGRHKPENIVIEMARENQTTQKGQKNSRERMKRIEEGIKELGSQILKEHPVENTQLQNEKLYLYYLQNGRDMYVDQELDINRLSDYDVDHIVPQSFLKDDSIDNKVLTRSDKARGKSDNVPSEEVVKKMKNYWRQLLNAKLITQRKFDNLTKAERGGLSELDKAGFIKRQLVETRQITKHVAQILDSRMNTKYDENDKLIREVKVITLKSKLVSDFRKDFQFYKVREINNYHHAHDAYLNAVVGTALIKKYPKLESEFVYGDYKVYDVRKMIAKSEQEIGKATAKYFFYSNIMNFFKTEITLANGEIRKRPLIETNGETGEIVWDKGRDFATVRKVLSMPQVNIVKKTEVQTGGFSKESILPKRNSDKLIARKKDWDPKKYGGFDSPTVAYSVLVVAKVEKGKSKKLKSVKELLGITIMERSSFEKNPIDFLEAKGYKEVKKDLIIKLPKYSLFELENGRKRMLASAGELQKGNELALPSKYVNFLYLASHYEKLKGSPEDNEQKQLFVEQHKHYLDEIIEQISEFSKRVILADANLDKVLSAYNKHRDKPIREQAENIIHLFTLTNLGAPAAFKYFDTTIDRKRYTSTKEVLDATLIHQSITGLYETRIDLSQLGGDGGPAPEAAAKGSSGGTLNIEDEYRLHETSKEPDVPLGSTWLSDFPQAWAETGGMGLAVRQAPLIIPLKATSTPVSIKQYPMSQEARLGIKPHIQRLLDQGILVPCQSPWNTPLLPVKKPGTNDYRPVQDLREVNKRVEDIHPTVPNPYNLLSGLPPSHQWYTVLDLKDAFFCLRLHPTSQPLFAFEWRDPEMGISGQLTWTRLPQGFKNSPTLFNEALHRDLADFRIQHPDLILLQYVDDLLLAATSEQDCQRGTRALLQTLGNLGYRASAKKAQICQKQVKYLGYLLKEGQRWLTEARKETVMGQPTPKTPRQLREFLGKAGFCRLFIPGFAEMAAPLYPLTKPGTLFNWGPDQQKAYQEIKQALLTAPALGLPDLTKPFELFVDEKQGYAKGVLTQKLGPWRRPVAYLSKKLDPVAAGWPPCLRMVAAIAVLTKDAGKLTMGQPLVILAPHAVEALVKQPPDRWLSNARMTHYQAMLLDTDRVQFGPVVALNPATLLPLPEKEAPHDCLEILAETHGTRPDLTDQPIPDADYTWYTDGSSFLQEGQRRAGAAVTTETEVIWARALPAGTSAQRAELIALTQALKMAEGKKLNVYTDSRYAFATAHVHGEIYRRRGWLTSEGREIKNKNEILALLKALFLPKRLSIIHCPGHQKGNSAEARGNRMADQAAREAAMKAVLETSTLLAGKRTADGSEFEKRTADGSEFESPKKKAKVE

SEQ ID NO: 1008 - protein, 2105 aa, synthetic construct
  source 1..2105: note = Description of Artificial Sequence: Synthetic polypeptide
MPAAKRVKLDGGDKKYSIGLDIGTNSVGWAVITDEYKVPSKKFKVLGNTDRHSIKKNLIGALLFDSGETAEATRLKRTARRRYTRRKNRICYLQEIFSNEMAKVDDSFFHRLEESFLVEEDKKHERHPIFGNIVDEVAYHEKYPTIYHLRKKLVDSTDKADLRLIYLALAHMIKFRGHFLIEGDLNPDNSDVDKLFIQLVQTYNQLFEENPINASGVDAKAILSARLSKSRRLENLIAQLPGEKKNGLFGNLIALSLGLTPNFKSNFDLAEDAKLQLSKDTYDDDLDNLLAQIGDQYADLFLAAKNLSDAILLSDILRVNTEITKAPLSASMIKRYDEHHQDLTLLKALVRQQLPEKYKEIFFDQSKNGYAGYIDGGASQEEFYKFIKPILEKMDGTEELLVKLNREDLLRKQRTFDNGSIPHQIHLGELHAILRRQEDFYPFLKDNREKIEKILTFRIPYYVGPLARGNSRFAWMTRKSEETITPWNFEEVVDKGASAQSFIERMTNFDKNLPNEKVLPKHSLLYEYFTVYNELTKVKYVTEGMRKPAFLSGEQKKAIVDLLFKTNRKVTVKQLKEDYFKKIECFDSVEISGVEDRFNASLGTYHDLLKIIKDKDFLDNEENEDILEDIVLTLTLFEDREMIEERLKTYAHLFDDKVMKQLKRRRYTGWGRLSRKLINGIRDKQSGKTILDFLKSDGFANRNFMQLIHDDSLTFKEDIQKAQVSGQGDSLHEHIANLAGSPAIKKGILQTVKVVDELVKVMGRHKPENIVIEMARENQTTQKGQKNSRERMKRIEEGIKELGSQILKEHPVENTQLQNEKLYLYYLQNGRDMYVDQELDINRLSDYDVDHIVPQSFLKDDSIDNKVLTRSDKARGKSDNVPSEEVVKKMKNYWRQLLNAKLITQRKFDNLTKAERGGLSELDKAGFIKRQLVETRQITKHVAQILDSRMNTKYDENDKLIREVKVITLKSKLVSDFRKDFQFYKVREINNYHHAHDAYLNAVVGTALIKKYPKLESEFVYGDYKVYDVRKMIAKSEQEIGKATAKYFFYSNIMNFFKTEITLANGEIRKRPLIETNGETGEIVWDKGRDFATVRKVLSMPQVNIVKKTEVQTGGFSKESILPKRNSDKLIARKKDWDPKKYGGFDSPTVAYSVLVVAKVEKGKSKKLKSVKELLGITIMERSSFEKNPIDFLEAKGYKEVKKDLIIKLPKYSLFELENGRKRMLASAGELQKGNELALPSKYVNFLYLASHYEKLKGSPEDNEQKQLFVEQHKHYLDEIIEQISEFSKRVILADANLDKVLSAYNKHRDKPIREQAENIIHLFTLTNLGAPAAFKYFDTTIDRKRYTSTKEVLDATLIHQSITGLYETRIDLSQLGGDGGEAAAKEAAAKEAAAKEAAAKGGTLNIEDEYRLHETSKEPDVPLGSTWLSDFPQAWAETGGMGLAVRQAPLIIPLKATSTPVSIKQYPMSQEARLGIKPHIQRLLDQGILVPCQSPWNTPLLPVKKPGTNDYRPVQDLREVNKRVEDIHPTVPNPYNLLSGLPPSHQWYTVLDLKDAFFCLRLHPTSQPLFAFEWRDPEMGISGQLTWTRLPQGFKNSPTLFNEALHRDLADFRIQHPDLILLQYVDDLLLAATSEQDCQRGTRALLQTLGNLGYRASAKKAQICQKQVKYLGYLLKEGQRWLTEARKETVMGQPTPKTPRQLREFLGKAGFCRLFIPGFAEMAAPLYPLTKPGTLFNWGPDQQKAYQEIKQALLTAPALGLPDLTKPFELFVDEKQGYAKGVLTQKLGPWRRPVAYLSKKLDPVAAGWPPCLRMVAAIAVLTKDAGKLTMGQPLVILAPHAVEALVKQPPDRWLSNARMTHYQAMLLDTDRVQFGPVVALNPATLLPLPEKEAPHDCLEILAETHGTRPDLTDQPIPDADYTWYTDGSSFLQEGQRRAGAAVTTETEVIWARALPAGTSAQRAELIALTQALKMAEGKKLNVYTDSRYAFATAHVHGEIYRRRGWLTSEGREIKNKNEILALLKALFLPKRLSIIHCPGHQKGNSAEARGNRMADQAAREAAMKAVLETSTLLAGKRTADGSEFEKRTADGSEFESPKKKAKVE

SEQ ID NO: 1009 - protein, 2090 aa, synthetic construct
  source 1..2090: note = Description of Artificial Sequence: Synthetic polypeptide
MPAAKRVKLDGGDKKYSIGLDIGTNSVGWAVITDEYKVPSKKFKVLGNTDRHSIKKNLIGALLFDSGETAEATRLKRTARRRYTRRKNRICYLQEIFSNEMAKVDDSFFHRLEESFLVEEDKKHERHPIFGNIVDEVAYHEKYPTIYHLRKKLVDSTDKADLRLIYLALAHMIKFRGHFLIEGDLNPDNSDVDKLFIQLVQTYNQLFEENPINASGVDAKAILSARLSKSRRLENLIAQLPGEKKNGLFGNLIALSLGLTPNFKSNFDLAEDAKLQLSKDTYDDDLDNLLAQIGDQYADLFLAAKNLSDAILLSDILRVNTEITKAPLSASMIKRYDEHHQDLTLLKALVRQQLPEKYKEIFFDQSKNGYAGYIDGGASQEEFYKFIKPILEKMDGTEELLVKLNREDLLRKQRTFDNGSIPHQIHLGELHAILRRQEDFYPFLKDNREKIEKILTFRIPYYVGPLARGNSRFAWMTRKSEETITPWNFEEVVDKGASAQSFIERMTNFDKNLPNEKVLPKHSLLYEYFTVYNELTKVKYVTEGMRKPAFLSGEQKKAIVDLLFKTNRKVTVKQLKEDYFKKIECFDSVEISGVEDRFNASLGTYHDLLKIIKDKDFLDNEENEDILEDIVLTLTLFEDREMIEERLKTYAHLFDDKVMKQLKRRRYTGWGRLSRKLINGIRDKQSGKTILDFLKSDGFANRNFMQLIHDDSLTFKEDIQKAQVSGQGDSLHEHIANLAGSPAIKKGILQTVKVVDELVKVMGRHKPENIVIEMARENQTTQKGQKNSRERMKRIEEGIKELGSQILKEHPVENTQLQNEKLYLYYLQNGRDMYVDQELDINRLSDYDVDHIVPQSFLKDDSIDNKVLTRSDKARGKSDNVPSEEVVKKMKNYWRQLLNAKLITQRKFDNLTKAERGGLSELDKAGFIKRQLVETRQITKHVAQILDSRMNTKYDENDKLIREVKVITLKSKLVSDFRKDFQFYKVREINNYHHAHDAYLNAVVGTALIKKYPKLESEFVYGDYKVYDVRKMIAKSEQEIGKATAKYFFYSNIMNFFKTEITLANGEIRKRPLIETNGETGEIVWDKGRDFATVRKVLSMPQVNIVKKTEVQTGGFSKESILPKRNSDKLIARKKDWDPKKYGGFDSPTVAYSVLVVAKVEKGKSKKLKSVKELLGITIMERSSFEKNPIDFLEAKGYKEVKKDLIIKLPKYSLFELENGRKRMLASAGELQKGNELALPSKYVNFLYLASHYEKLKGSPEDNEQKQLFVEQHKHYLDEIIEQISEFSKRVILADANLDKVLSAYNKHRDKPIREQAENIIHLFTLTNLGAPAAFKYFDTTIDRKRYTSTKEVLDATLIHQSITGLYETRIDLSQLGGDGGEAAAKGGTLNIEDEYRLHETSKEPDVPLGSTWLSDFPQAWAETGGMGLAVRQAPLIIPLKATSTPVSIKQYPMSQEARLGIKPHIQRLLDQGILVPCQSPWNTPLLPVKKPGTNDYRPVQDLREVNKRVEDIHPTVPNPYNLLSGLPPSHQWYTVLDLKDAFFCLRLHPTSQPLFAFEWRDPEMGISGQLTWTRLPQGFKNSPTLFNEALHRDLADFRIQHPDLILLQYVDDLLLAATSEQDCQRGTRALLQTLGNLGYRASAKKAQICQKQVKYLGYLLKEGQRWLTEARKETVMGQPTPKTPRQLREFLGKAGFCRLFIPGFAEMAAPLYPLTKPGTLFNWGPDQQKAYQEIKQALLTAPALGLPDLTKPFELFVDEKQGYAKGVLTQKLGPWRRPVAYLSKKLDPVAAGWPPCLRMVAAIAVLTKDAGKLTMGQPLVILAPHAVEALVKQPPDRWLSNARMTHYQAMLLDTDRVQFGPVVALNPATLLPLPEKEAPHDCLEILAETHGTRPDLTDQPIPDADYTWYTDGSSFLQEGQRRAGAAVTTETEVIWARALPAGTSAQRAELIALTQALKMAEGKKLNVYTDSRYAFATAHVHGEIYRRRGWLTSEGREIKNKNEILALLKALFLPKRLSIIHCPGHQKGNSAEARGNRMADQAAREAAMKAVLETSTLLAGKRTADGSEFEKRTADGSEFESPKKKAKVE

SEQ ID NO: 1010 - protein, 2096 aa, synthetic construct
  source 1..2096: note = Description of Artificial Sequence: Synthetic polypeptide
MPAAKRVKLDGGDKKYSIGLDIGTNSVGWAVITDEYKVPSKKFKVLGNTDRHSIKKNLIGALLFDSGETAEATRLKRTARRRYTRRKNRICYLQEIFSNEMAKVDDSFFHRLEESFLVEEDKKHERHPIFGNIVDEVAYHEKYPTIYHLRKKLVDSTDKADLRLIYLALAHMIKFRGHFLIEGDLNPDNSDVDKLFIQLVQTYNQLFEENPINASGVDAKAILSARLSKSRRLENLIAQLPGEKKNGLFGNLIALSLGLTPNFKSNFDLAEDAKLQLSKDTYDDDLDNLLAQIGDQYADLFLAAKNLSDAILLSDILRVNTEITKAPLSASMIKRYDEHHQDLTLLKALVRQQLPEKYKEIFFDQSKNGYAGYIDGGASQEEFYKFIKPILEKMDGTEELLVKLNREDLLRKQRTFDNGSIPHQIHLGELHAILRRQEDFYPFLKDNREKIEKILTFRIPYYVGPLARGNSRFAWMTRKSEETITPWNFEEVVDKGASAQSFIERMTNFDKNLPNEKVLPKHSLLYEYFTVYNELTKVKYVTEGMRKPAFLSGEQKKAIVDLLFKTNRKVTVKQLKEDYFKKIECFDSVEISGVEDRFNASLGTYHDLLKIIKDKDFLDNEENEDILEDIVLTLTLFEDREMIEERLKTYAHLFDDKVMKQLKRRRYTGWGRLSRKLINGIRDKQSGKTILDFLKSDGFANRNFMQLIHDDSLTFKEDIQKAQVSGQGDSLHEHIANLAGSPAIKKGILQTVKVVDELVKVMGRHKPENIVIEMARENQTTQKGQKNSRERMKRIEEGIKELGSQILKEHPVENTQLQNEKLYLYYLQNGRDMYVDQELDINRLSDYDVDHIVPQSFLKDDSIDNKVLTRSDKARGKSDNVPSEEVVKKMKNYWRQLLNAKLITQRKFDNLTKAERGGLSELDKAGFIKRQLVETRQITKHVAQILDSRMNTKYDENDKLIREVKVITLKSKLVSDFRKDFQFYKVREINNYHHAHDAYLNAVVGTALIKKYPKLESEFVYGDYKVYDVRKMIAKSEQEIGKATAKYFFYSNIMNFFKTEITLANGEIRKRPLIETNGETGEIVWDKGRDFATVRKVLSMPQVNIVKKTEVQTGGFSKESILPKRNSDKLIARKKDWDPKKYGGFDSPTVAYSVLVVAKVEKGKSKKLKSVKELLGITIMERSSFEKNPIDFLEAKGYKEVKKDLIIKLPKYSLFELENGRKRMLASAGELQKGNELALPSKYVNFLYLASHYEKLKGSPEDNEQKQLFVEQHKHYLDEIIEQISEFSKRVILADANLDKVLSAYNKHRDKPIREQAENIIHLFTLTNLGAPAAFKYFDTTIDRKRYTSTKEVLDATLIHQSITGLYETRIDLSQLGGDGGGSSPAPEAAAKGGTLNIEDEYRLHETSKEPDVPLGSTWLSDFPQAWAETGGMGLAVRQAPLIIPLKATSTPVSIKQYPMSQEARLGIKPHIQRLLDQGILVPCQSPWNTPLLPVKKPGTNDYRPVQDLREVNKRVEDIHPTVPNPYNLLSGLPPSHQWYTVLDLKDAFFCLRLHPTSQPLFAFEWRDPEMGISGQLTWTRLPQGFKNSPTLFNEALHRDLADFRIQHPDLILLQYVDDLLLAATSEQDCQRGTRALLQTLGNLGYRASAKKAQICQKQVKYLGYLLKEGQRWLTEARKETVMGQPTPKTPRQLREFLGKAGFCRLFIPGFAEMAAPLYPLTKPGTLFNWGPDQQKAYQEIKQALLTAPALGLPDLTKPFELFVDEKQGYAKGVLTQKLGPWRRPVAYLSKKLDPVAAGWPPCLRMVAAIAVLTKDAGKLTMGQPLVILAPHAVEALVKQPPDRWLSNARMTHYQAMLLDTDRVQFGPVVALNPATLLPLPEKEAPHDCLEILAETHGTRPDLTDQPIPDADYTWYTDGSSFLQEGQRRAGAAVTTETEVIWARALPAGTSAQRAELIALTQALKMAEGKKLNVYTDSRYAFATAHVHGEIYRRRGWLTSEGREIKNKNEILALLKALFLPKRLSIIHCPGHQKGNSAEARGNRMADQAAREAAMKAVLETSTLLAGKRTADGSEFEKRTADGSEFESPKKKAKVE

SEQ ID NO: 1011 - protein, 2088 aa, synthetic construct
  source 1..2088: note = Description of Artificial Sequence: Synthetic polypeptide
MPAAKRVKLDGGDKKYSIGLDIGTNSVGWAVITDEYKVPSKKFKVLGNTDRHSIKKNLIGALLFDSGETAEATRLKRTARRRYTRRKNRICYLQEIFSNEMAKVDDSFFHRLEESFLVEEDKKHERHPIFGNIVDEVAYHEKYPTIYHLRKKLVDSTDKADLRLIYLALAHMIKFRGHFLIEGDLNPDNSDVDKLFIQLVQTYNQLFEENPINASGVDAKAILSARLSKSRRLENLIAQLPGEKKNGLFGNLIALSLGLTPNFKSNFDLAEDAKLQLSKDTYDDDLDNLLAQIGDQYADLFLAAKNLSDAILLSDILRVNTEITKAPLSASMIKRYDEHHQDLTLLKALVRQQLPEKYKEIFFDQSKNGYAGYIDGGASQEEFYKFIKPILEKMDGTEELLVKLNREDLLRKQRTFDNGSIPHQIHLGELHAILRRQEDFYPFLKDNREKIEKILTFRIPYYVGPLARGNSRFAWMTRKSEETITPWNFEEVVDKGASAQSFIERMTNFDKNLPNEKVLPKHSLLYEYFTVYNELTKVKYVTEGMRKPAFLSGEQKKAIVDLLFKTNRKVTVKQLKEDYFKKIECFDSVEISGVEDRFNASLGTYHDLLKIIKDKDFLDNEENEDILEDIVLTLTLFEDREMIEERLKTYAHLFDDKVMKQLKRRRYTGWGRLSRKLINGIRDKQSGKTILDFLKSDGFANRNFMQLIHDDSLTFKEDIQKAQVSGQGDSLHEHIANLAGSPAIKKGILQTVKVVDELVKVMGRHKPENIVIEMARENQTTQKGQKNSRERMKRIEEGIKELGSQILKEHPVENTQLQNEKLYLYYLQNGRDMYVDQELDINRLSDYDVDHIVPQSFLKDDSIDNKVLTRSDKARGKSDNVPSEEVVKKMKNYWRQLLNAKLITQRKFDNLTKAERGGLSELDKAGFIKRQLVETRQITKHVAQILDSRMNTKYDENDKLIREVKVITLKSKLVSDFRKDFQFYKVREINNYHHAHDAYLNAVVGTALIKKYPKLESEFVYGDYKVYDVRKMIAKSEQEIGKATAKYFFYSNIMNFFKTEITLANGEIRKRPLIETNGETGEIVWDKGRDFATVRKVLSMPQVNIVKKTEVQTGGFSKESILPKRNSDKLIARKKDWDPKKYGGFDSPTVAYSVLVVAKVEKGKSKKLKSVKELLGITIMERSSFEKNPIDFLEAKGYKEVKKDLIIKLPKYSLFELENGRKRMLASAGELQKGNELALPSKYVNFLYLASHYEKLKGSPEDNEQKQLFVEQHKHYLDEIIEQISEFSKRVILADANLDKVLSAYNKHRDKPIREQAENIIHLFTLTNLGAPAAFKYFDTTIDRKRYTSTKEVLDATLIHQSITGLYETRIDLSQLGGDGGGSSGGTLNIEDEYRLHETSKEPDVPLGSTWLSDFPQAWAETGGMGLAVRQAPLIIPLKATSTPVSIKQYPMSQEARLGIKPHIQRLLDQGILVPCQSPWNTPLLPVKKPGTNDYRPVQDLREVNKRVEDIHPTVPNPYNLLSGLPPSHQWYTVLDLKDAFFCLRLHPTSQPLFAFEWRDPEMGISGQLTWTRLPQGFKNSPTLFNEALHRDLADFRIQHPDLILLQYVDDLLLAATSEQDCQRGTRALLQTLGNLGYRASAKKAQICQKQVKYLGYLLKEGQRWLTEARKETVMGQPTPKTPRQLREFLGKAGFCRLFIPGFAEMAAPLYPLTKPGTLFNWGPDQQKAYQEIKQALLTAPALGLPDLTKPFELFVDEKQGYAKGVLTQKLGPWRRPVAYLSKKLDPVAAGWPPCLRMVAAIAVLTKDAGKLTMGQPLVILAPHAVEALVKQPPDRWLSNARMTHYQAMLLDTDRVQFGPVVALNPATLLPLPEKEAPHDCLEILAETHGTRPDLTDQPIPDADYTWYTDGSSFLQEGQRRAGAAVTTETEVIWARALPAGTSAQRAELIALTQALKMAEGKKLNVYTDSRYAFATAHVHGEIYRRRGWLTSEGREIKNKNEILALLKALFLPKRLSIIHCPGHQKGNSAEARGNRMADQAAREAAMKAVLETSTLLAGKRTADGSEFEKRTADGSEFESPKKKAKVE

SEQ ID NO: 1012 - protein, 2096 aa, synthetic construct
  source 1..2096: note = Description of Artificial Sequence: Synthetic polypeptide
MPAAKRVKLDGGDKKYSIGLDIGTNSVGWAVITDEYKVPSKKFKVLGNTDRHSIKKNLIGALLFDSGETAEATRLKRTARRRYTRRKNRICYLQEIFSNEMAKVDDSFFHRLEESFLVEEDKKHERHPIFGNIVDEVAYHEKYPTIYHLRKKLVDSTDKADLRLIYLALAHMIKFRGHFLIEGDLNPDNSDVDKLFIQLVQTYNQLFEENPINASGVDAKAILSARLSKSRRLENLIAQLPGEKKNGLFGNLIALSLGLTPNFKSNFDLAEDAKLQLSKDTYDDDLDNLLAQIGDQYADLFLAAKNLSDAILLSDILRVNTEITKAPLSASMIKRYDEHHQDLTLLKALVRQQLPEKYKEIFFDQSKNGYAGYIDGGASQEEFYKFIKPILEKMDGTEELLVKLNREDLLRKQRTFDNGSIPHQIHLGELHAILRRQEDFYPFLKDNREKIEKILTFRIPYYVGPLARGNSRFAWMTRKSEETITPWNFEEVVDKGASAQSFIERMTNFDKNLPNEKVLPKHSLLYEYFTVYNELTKVKYVTEGMRKPAFLSGEQKKAIVDLLFKTNRKVTVKQLKEDYFKKIECFDSVEISGVEDRFNASLGTYHDLLKIIKDKDFLDNEENEDILEDIVLTLTLFEDREMIEERLKTYAHLFDDKVMKQLKRRRYTGWGRLSRKLINGIRDKQSGKTILDFLKSDGFANRNFMQLIHDDSLTFKEDIQKAQVSGQGDSLHEHIANLAGSPAIKKGILQTVKVVDELVKVMGRHKPENIVIEMARENQTTQKGQKNSRERMKRIEEGIKELGSQILKEHPVENTQLQNEKLYLYYLQNGRDMYVDQELDINRLSDYDVDHIVPQSFLKDDSIDNKVLTRSDKARGKSDNVPSEEVVKKMKNYWRQLLNAKLITQRKFDNLTKAERGGLSELDKAGFIKRQLVETRQITKHVAQILDSRMNTKYDENDKLIREVKVITLKSKLVSDFRKDFQFYKVREINNYHHAHDAYLNAVVGTALIKKYPKLESEFVYGDYKVYDVRKMIAKSEQEIGKATAKYFFYSNIMNFFKTEITLANGEIRKRPLIETNGETGEIVWDKGRDFATVRKVLSMPQVNIVKKTEVQTGGFSKESILPKRNSDKLIARKKDWDPKKYGGFDSPTVAYSVLVVAKVEKGKSKKLKSVKELLGITIMERSSFEKNPIDFLEAKGYKEVKKDLIIKLPKYSLFELENGRKRMLASAGELQKGNELALPSKYVNFLYLASHYEKLKGSPEDNEQKQLFVEQHKHYLDEIIEQISEFSKRVILADANLDKVLSAYNKHRDKPIREQAENIIHLFTLTNLGAPAAFKYFDTTIDRKRYTSTKEVLDATLIHQSITGLYETRIDLSQLGGDGGEAAAKGSSGGGGGTLNIEDEYRLHETSKEPDVPLGSTWLSDFPQAWAETGGMGLAVRQAPLIIPLKATSTPVSIKQYPMSQEARLGIKPHIQRLLDQGILVPCQSPWNTPLLPVKKPGTNDYRPVQDLREVNKRVEDIHPTVPNPYNLLSGLPPSHQWYTVLDLKDAFFCLRLHPTSQPLFAFEWRDPEMGISGQLTWTRLPQGFKNSPTLFNEALHRDLADFRIQHPDLILLQYVDDLLLAATSEQDCQRGTRALLQTLGNLGYRASAKKAQICQKQVKYLGYLLKEGQRWLTEARKETVMGQPTPKTPRQLREFLGKAGFCRLFIPGFAEMAAPLYPLTKPGTLFNWGPDQQKAYQEIKQALLTAPALGLPDLTKPFELFVDEKQGYAKGVLTQKLGPWRRPVAYLSKKLDPVAAGWPPCLRMVAAIAVLTKDAGKLTMGQPLVILAPHAVEALVKQPPDRWLSNARMTHYQAMLLDTDRVQFGPVVALNPATLLPLPEKEAPHDCLEILAETHGTRPDLTDQPIPDADYTWYTDGSSFLQEGQRRAGAAVTTETEVIWARALPAGTSAQRAELIALTQALKMAEGKKLNVYTDSRYAFATAHVHGEIYRRRGWLTSEGREIKNKNEILALLKALFLPKRLSIIHCPGHQKGNSAEARGNRMADQAAREAAMKAVLETSTLLAGKRTADGSEFEKRTADGSEFESPKKKAKVE

SEQ ID NO: 1013 - protein, 2094 aa, synthetic construct
  source 1..2094: note = Description of Artificial Sequence: Synthetic polypeptide
MPAAKRVKLDGGDKKYSIGLDIGTNSVGWAVITDEYKVPSKKFKVLGNTDRHSIKKNLIGALLFDSGETAEATRLKRTARRRYTRRKNRICYLQEIFSNEMAKVDDSFFHRLEESFLVEEDKKHERHPIFGNIVDEVAYHEKYPTIYHLRKKLVDSTDKADLRLIYLALAHMIKFRGHFLIEGDLNPDNSDVDKLFIQLVQTYNQLFEENPINASGVDAKAILSARLSKSRRLENLIAQLPGEKKNGLFGNLIALSLGLTPNFKSNFDLAEDAKLQLSKDTYDDDLDNLLAQIGDQYADLFLAAKNLSDAILLSDILRVNTEITKAPLSASMIKRYDEHHQDLTLLKALVRQQLPEKYKEIFFDQSKNGYAGYIDGGASQEEFYKFIKPILEKMDGTEELLVKLNREDLLRKQRTFDNGSIPHQIHLGELHAILRRQEDFYPFLKDNREKIEKILTFRIPYYVGPLARGNSRFAWMTRKSEETITPWNFEEVVDKGASAQSFIERMTNFDKNLPNEKVLPKHSLLYEYFTVYNELTKVKYVTEGMRKPAFLSGEQKKAIVDLLFKTNRKVTVKQLKEDYFKKIECFDSVEISGVEDRFNASLGTYHDLLKIIKDKDFLDNEENEDILEDIVLTLTLFEDREMIEERLKTYAHLFDDKVMKQLKRRRYTGWGRLSRKLINGIRDKQSGKTILDFLKSDGFANRNFMQLIHDDSLTFKEDIQKAQVSGQGDSLHEHIANLAGSPAIKKGILQTVKVVDELVKVMGRHKPENIVIEMARENQTTQKGQKNSRERMKRIEEGIKELGSQILKEHPVENTQLQNEKLYLYYLQNGRDMYVDQELDINRLSDYDVDHIVPQSFLKDDSIDNKVLTRSDKARGKSDNVPSEEVVKKMKNYWRQLLNAKLITQRKFDNLTKAERGGLSELDKAGFIKRQLVETRQITKHVAQILDSRMNTKYDENDKLIREVKVITLKSKLVSDFRKDFQFYKVREINNYHHAHDAYLNAVVGTALIKKYPKLESEFVYGDYKVYDVRKMIAKSEQEIGKATAKYFFYSNIMNFFKTEITLANGEIRKRPLIETNGETGEIVWDKGRDFATVRKVLSMPQVNIVKKTEVQTGGFSKESILPKRNSDKLIARKKDWDPKKYGGFDSPTVAYSVLVVAKVEKGKSKKLKSVKELLGITIMERSSFEKNPIDFLEAKGYKEVKKDLIIKLPKYSLFELENGRKRMLASAGELQKGNELALPSKYVNFLYLASHYEKLKGSPEDNEQKQLFVEQHKHYLDEIIEQISEFSKRVILADANLDKVLSAYNKHRDKPIREQAENIIHLFTLTNLGAPAAFKYFDTTIDRKRYTSTKEVLDATLIHQSITGLYETRIDLSQLGGDGGGGGPAPGSSGGTLNIEDEYRLHETSKEPDVPLGSTWLSDFPQAWAETGGMGLAVRQAPLIIPLKATSTPVSIKQYPMSQEARLGIKPHIQRLLDQGILVPCQSPWNTPLLPVKKPGTNDYRPVQDLREVNKRVEDIHPTVPNPYNLLSGLPPSHQWYTVLDLKDAFFCLRLHPTSQPLFAFEWRDPEMGISGQLTWTRLPQGFKNSPTLFNEALHRDLADFRIQHPDLILLQYVDDLLLAATSEQDCQRGTRALLQTLGNLGYRASAKKAQICQKQVKYLGYLLKEGQRWLTEARKETVMGQPTPKTPRQLREFLGKAGFCRLFIPGFAEMAAPLYPLTKPGTLFNWGPDQQKAYQEIKQALLTAPALGLPDLTKPFELFVDEKQGYAKGVLTQKLGPWRRPVAYLSKKLDPVAAGWPPCLRMVAAIAVLTKDAGKLTMGQPLVILAPHAVEALVKQPPDRWLSNARMTHYQAMLLDTDRVQFGPVVALNPATLLPLPEKEAPHDCLEILAETHGTRPDLTDQPIPDADYTWYTDGSSFLQEGQRRAGAAVTTETEVIWARALPAGTSAQRAELIALTQALKMAEGKKLNVYTDSRYAFATAHVHGEIYRRRGWLTSEGREIKNKNEILALLKALFLPKRLSIIHCPGHQKGNSAEARGNRMADQAAREAAMKAVLETSTLLAGKRTADGSEFEKRTADGSEFESPKKKAKVE

SEQ ID NO: 1014 - protein, 2094 aa, synthetic construct
  source 1..2094: note = Description of Artificial Sequence: Synthetic polypeptide
MPAAKRVKLDGGDKKYSIGLDIGTNSVGWAVITDEYKVPSKKFKVLGNTDRHSIKKNLIGALLFDSGETAEATRLKRTARRRYTRRKNRICYLQEIFSNEMAKVDDSFFHRLEESFLVEEDKKHERHPIFGNIVDEVAYHEKYPTIYHLRKKLVDSTDKADLRLIYLALAHMIKFRGHFLIEGDLNPDNSDVDKLFIQLVQTYNQLFEENPINASGVDAKAILSARLSKSRRLENLIAQLPGEKKNGLFGNLIALSLGLTPNFKSNFDLAEDAKLQLSKDTYDDDLDNLLAQIGDQYADLFLAAKNLSDAILLSDILRVNTEITKAPLSASMIKRYDEHHQDLTLLKALVRQQLPEKYKEIFFDQSKNGYAGYIDGGASQEEFYKFIKPILEKMDGTEELLVKLNREDLLRKQRTFDNGSIPHQIHLGELHAILRRQEDFYPFLKDNREKIEKILTFRIPYYVGPLARGNSRFAWMTRKSEETITPWNFEEVVDKGASAQSFIERMTNFDKNLPNEKVLPKHSLLYEYFTVYNELTKVKYVTEGMRKPAFLSGEQKKAIVDLLFKTNRKVTVKQLKEDYFKKIECFDSVEISGVEDRFNASLGTYHDLLKIIKDKDFLDNEENEDILEDIVLTLTLFEDREMIEERLKTYAHLFDDKVMKQLKRRRYTGWGRLSRKLINGIRDKQSGKTILDFLKSDGFANRNFMQLIHDDSLTFKEDIQKAQVSGQGDSLHEHIANLAGSPAIKKGILQTVKVVDELVKVMGRHKPENIVIEMARENQTTQKGQKNSRERMKRIEEGIKELGSQILKEHPVENTQLQNEKLYLYYLQNGRDMYVDQELDINRLSDYDVDHIVPQSFLKDDSIDNKVLTRSDKARGKSDNVPSEEVVKKMKNYWRQLLNAKLITQRKFDNLTKAERGGLSELDKAGFIKRQLVETRQITKHVAQILDSRMNTKYDENDKLIREVKVITLKSKLVSDFRKDFQFYKVREINNYHHAHDAYLNAVVGTALIKKYPKLESEFVYGDYKVYDVRKMIAKSEQEIGKATAKYFFYSNIMNFFKTEITLANGEIRKRPLIETNGETGEIVWDKGRDFATVRKVLSMPQVNIVKKTEVQTGGFSKESILPKRNSDKLIARKKDWDPKKYGGFDSPTVAYSVLVVAKVEKGKSKKLKSVKELLGITIMERSSFEKNPIDFLEAKGYKEVKKDLIIKLPKYSLFELENGRKRMLASAGELQKGNELALPSKYVNFLYLASHYEKLKGSPEDNEQKQLFVEQHKHYLDEIIEQISEFSKRVILADANLDKVLSAYNKHRDKPIREQAENIIHLFTLTNLGAPAAFKYFDTTIDRKRYTSTKEVLDATLIHQSITGLYETRIDLSQLGGDGGGSSPAPGGSGGTLNIEDEYRLHETSKEPDVPLGSTWLSDFPQAWAETGGMGLAVRQAPLIIPLKATSTPVSIKQYPMSQEARLGIKPHIQRLLDQGILVPCQSPWNTPLLPVKKPGTNDYRPVQDLREVNKRVEDIHPTVPNPYNLLSGLPPSHQWYTVLDLKDAFFCLRLHPTSQPLFAFEWRDPEMGISGQLTWTRLPQGFKNSPTLFNEALHRDLADFRIQHPDLILLQYVDDLLLAATSEQDCQRGTRALLQTLGNLGYRASAKKAQICQKQVKYLGYLLKEGQRWLTEARKETVMGQPTPKTPRQLREFLGKAGFCRLFIPGFAEMAAPLYPLTKPGTLFNWGPDQQKAYQEIKQALLTAPALGLPDLTKPFELFVDEKQGYAKGVLTQKLGPWRRPVAYLSKKLDPVAAGWPPCLRMVAAIAVLTKDAGKLTMGQPLVILAPHAVEALVKQPPDRWLSNARMTHYQAMLLDTDRVQFGPVVALNPATLLPLPEKEAPHDCLEILAETHGTRPDLTDQPIPDADYTWYTDGSSFLQEGQRRAGAAVTTETEVIWARALPAGTSAQRAELIALTQALKMAEGKKLNVYTDSRYAFATAHVHGEIYRRRGWLTSEGREIKNKNEILALLKALFLPKRLSIIHCPGHQKGNSAEARGNRMADQAAREAAMKAVLETSTLLAGKRTADGSEFEKRTADGSEFESPKKKAKVE

SEQ ID NO: 1015 - protein, 2094 aa, synthetic construct
  source 1..2094: note = Description of Artificial Sequence: Synthetic polypeptide
MPAAKRVKLDGGDKKYSIGLDIGTNSVGWAVITDEYKVPSKKFKVLGNTDRHSIKKNLIGALLFDSGETAEATRLKRTARRRYTRRKNRICYLQEIFSNEMAKVDDSFFHRLEESFLVEEDKKHERHPIFGNIVDEVAYHEKYPTIYHLRKKLVDSTDKADLRLIYLALAHMIKFRGHFLIEGDLNPDNSDVDKLFIQLVQTYNQLFEENPINASGVDAKAILSARLSKSRRLENLIAQLPGEKKNGLFGNLIALSLGLTPNFKSNFDLAEDAKLQLSKDTYDDDLDNLLAQIGDQYADLFLAAKNLSDAILLSDILRVNTEITKAPLSASMIKRYDEHHQDLTLLKALVRQQLPEKYKEIFFDQSKNGYAGYIDGGASQEEFYKFIKPILEKMDGTEELLVKLNREDLLRKQRTFDNGSIPHQIHLGELHAILRRQEDFYPFLKDNREKIEKILTFRIPYYVGPLARGNSRFAWMTRKSEETITPWNFEEVVDKGASAQSFIERMTNFDKNLPNEKVLPKHSLLYEYFTVYNELTKVKYVTEGMRKPAFLSGEQKKAIVDLLFKTNRKVTVKQLKEDYFKKIECFDSVEISGVEDRFNASLGTYHDLLKIIKDKDFLDNEENEDILEDIVLTLTLFEDREMIEERLKTYAHLFDDKVMKQLKRRRYTGWGRLSRKLINGIRDKQSGKTILDFLKSDGFANRNFMQLIHDDSLTFKEDIQKAQVSGQGDSLHEHIANLAGSPAIKKGILQTVKVVDELVKVMGRHKPENIVIEMARENQTTQKGQKNSRERMKRIEEGIKELGSQILKEHPVENTQLQNEKLYLYYLQNGRDMYVDQELDINRLSDYDVDHIVPQSFLKDDSIDNKVLTRSDKARGKSDNVPSEEVVKKMKNYWRQLLNAKLITQRKFDNLTKAERGGLSELDKAGFIKRQLVETRQITKHVAQILDSRMNTKYDENDKLIREVKVITLKSKLVSDFRKDFQFYKVREINNYHHAHDAYLNAVVGTALIKKYPKLESEFVYGDYKVYDVRKMIAKSEQEIGKATAKYFFYSNIMNFFKTEITLANGEIRKRPLIETNGETGEIVWDKGRDFATVRKVLSMPQVNIVKKTEVQTGGFSKESILPKRNSDKLIARKKDWDPKKYGGFDSPTVAYSVLVVAKVEKGKSKKLKSVKELLGITIMERSSFEKNPIDFLEAKGYKEVKKDLIIKLPKYSLFELENGRKRMLASAGELQKGNELALPSKYVNFLYLASHYEKLKGSPEDNEQKQLFVEQHKHYLDEIIEQISEFSKRVILADANLDKVLSAYNKHRDKPIREQAENIIHLFTLTNLGAPAAFKYFDTTIDRKRYTSTKEVLDATLIHQSITGLYETRIDLSQLGGDGGGGGGGSPAPGGTLNIEDEYRLHETSKEPDVPLGSTWLSDFPQAWAETGGMGLAVRQAPLIIPLKATSTPVSIKQYPMSQEARLGIKPHIQRLLDQGILVPCQSPWNTPLLPVKKPGTNDYRPVQDLREVNKRVEDIHPTVPNPYNLLSGLPPSHQWYTVLDLKDAFFCLRLHPTSQPLFAFEWRDPEMGISGQLTWTRLPQGFKNSPTLFNEALHRDLADFRIQHPDLILLQYVDDLLLAATSEQDCQRGTRALLQTLGNLGYRASAKKAQICQKQVKYLGYLLKEGQRWLTEARKETVMGQPTPKTPRQLREFLGKAGFCRLFIPGFAEMAAPLYPLTKPGTLFNWGPDQQKAYQEIKQALLTAPALGLPDLTKPFELFVDEKQGYAKGVLTQKLGPWRRPVAYLSKKLDPVAAGWPPCLRMVAAIAVLTKDAGKLTMGQPLVILAPHAVEALVKQPPDRWLSNARMTHYQAMLLDTDRVQFGPVVALNPATLLPLPEKEAPHDCLEILAETHGTRPDLTDQPIPDADYTWYTDGSSFLQEGQRRAGAAVTTETEVIWARALPAGTSAQRAELIALTQALKMAEGKKLNVYTDSRYAFATAHVHGEIYRRRGWLTSEGREIKNKNEILALLKALFLPKRLSIIHCPGHQKGNSAEARGNRMADQAAREAAMKAVLETSTLLAGKRTADGSEFEKRTADGSEFESPKKKAKVE

SEQ ID NO: 1016 - protein, 2091 aa, synthetic construct
  source 1..2091: note = Description of Artificial Sequence: Synthetic polypeptide
MPAAKRVKLDGGDKKYSIGLDIGTNSVGWAVITDEYKVPSKKFKVLGNTDRHSIKKNLIGALLFDSGETAEATRLKRTARRRYTRRKNRICYLQEIFSNEMAKVDDSFFHRLEESFLVEEDKKHERHPIFGNIVDEVAYHEKYPTIYHLRKKLVDSTDKADLRLIYLALAHMIKFRGHFLIEGDLNPDNSDVDKLFIQLVQTYNQLFEENPINASGVDAKAILSARLSKSRRLENLIAQLPGEKKNGLFGNLIALSLGLTPNFKSNFDLAEDAKLQLSKDTYDDDLDNLLAQIGDQYADLFLAAKNLSDAILLSDILRVNTEITKAPLSASMIKRYDEHHQDLTLLKALVRQQLPEKYKEIFFDQSKNGYAGYIDGGASQEEFYKFIKPILEKMDGTEELLVKLNREDLLRKQRTFDNGSIPHQIHLGELHAILRRQEDFYPFLKDNREKIEKILTFRIPYYVGPLARGNSRFAWMTRKSEETITPWNFEEVVDKGASAQSFIERMTNFDKNLPNEKVLPKHSLLYEYFTVYNELTKVKYVTEGMRKPAFLSGEQKKAIVDLLFKTNRKVTVKQLKEDYFKKIECFDSVEISGVEDRFNASLGTYHDLLKIIKDKDFLDNEENEDILEDIVLTLTLFEDREMIEERLKTYAHLFDDKVMKQLKRRRYTGWGRLSRKLINGIRDKQSGKTILDFLKSDGFANRNFMQLIHDDSLTFKEDIQKAQVSGQGDSLHEHIANLAGSPAIKKGILQTVKVVDELVKVMGRHKPENIVIEMARENQTTQKGQKNSRERMKRIEEGIKELGSQILKEHPVENTQLQNEKLYLYYLQNGRDMYVDQELDINRLSDYDVDHIVPQSFLKDDSIDNKVLTRSDKARGKSDNVPSEEVVKKMKNYWRQLLNAKLITQRKFDNLTKAERGGLSELDKAGFIKRQLVETRQITKHVAQILDSRMNTKYDENDKLIREVKVITLKSKLVSDFRKDFQFYKVREINNYHHAHDAYLNAVVGTALIKKYPKLESEFVYGDYKVYDVRKMIAKSEQEIGKATAKYFFYSNIMNFFKTEITLANGEIRKRPLIETNGETGEIVWDKGRDFATVRKVLSMPQVNIVKKTEVQTGGFSKESILPKRNSDKLIARKKDWDPKKYGGFDSPTVAYSVLVVAKVEKGKSKKLKSVKELLGITIMERSSFEKNPIDFLEAKGYKEVKKDLIIKLPKYSLFELENGRKRMLASAGELQKGNELALPSKYVNFLYLASHYEKLKGSPEDNEQKQLFVEQHKHYLDEIIEQISEFSKRVILADANLDKVLSAYNKHRDKPIREQAENIIHLFTLTNLGAPAAFKYFDTTIDRKRYTSTKEVLDATLIHQSITGLYETRIDLSQLGGDGGGGSGSSGGTLNIEDEYRLHETSKEPDVPLGSTWLSDFPQAWAETGGMGLAVRQAPLIIPLKATSTPVSIKQYPMSQEARLGIKPHIQRLLDQGILVPCQSPWNTPLLPVKKPGTNDYRPVQDLREVNKRVEDIHPTVPNPYNLLSGLPPSHQWYTVLDLKDAFFCLRLHPTSQPLFAFEWRDPEMGISGQLTWTRLPQGFKNSPTLFNEALHRDLADFRIQHPDLILLQYVDDLLLAATSEQDCQRGTRALLQTLGNLGYRASAKKAQICQKQVKYLGYLLKEGQRWLTEARKETVMGQPTPKTPRQLREFLGKAGFCRLFIPGFAEMAAPLYPLTKPGTLFNWGPDQQKAYQEIKQALLTAPALGLPDLTKPFELFVDEKQGYAKGVLTQKLGPWRRPVAYLSKKLDPVAAGWPPCLRMVAAIAVLTKDAGKLTMGQPLVILAPHAVEALVKQPPDRWLSNARMTHYQAMLLDTDRVQFGPVVALNPATLLPLPEKEAPHDCLEILAETHGTRPDLTDQPIPDADYTWYTDGSSFLQEGQRRAGAAVTTETEVIWARALPAGTSAQRAELIALTQALKMAEGKKLNVYTDSRYAFATAHVHGEIYRRRGWLTSEGREIKNKNEILALLKALFLPKRLSIIHCPGHQKGNSAEARGNRMADQAAREAAMKAVLETSTLLAGKRTADGSEFEKRTADGSEFESPKKKAKVE

SEQ ID NO: 1017 - protein, 2091 aa, synthetic construct
  source 1..2091: note = Description of Artificial Sequence: Synthetic polypeptide
MPAAKRVKLDGGDKKYSIGLDIGTNSVGWAVITDEYKVPSKKFKVLGNTDRHSIKKNLIGALLFDSGETAEATRLKRTARRRYTRRKNRICYLQEIFSNEMAKVDDSFFHRLEESFLVEEDKKHERHPIFGNIVDEVAYHEKYPTIYHLRKKLVDSTDKADLRLIYLALAHMIKFRGHFLIEGDLNPDNSDVDKLFIQLVQTYNQLFEENPINASGVDAKAILSARLSKSRRLENLIAQLPGEKKNGLFGNLIALSLGLTPNFKSNFDLAEDAKLQLSKDTYDDDLDNLLAQIGDQYADLFLAAKNLSDAILLSDILRVNTEITKAPLSASMIKRYDEHHQDLTLLKALVRQQLPEKYKEIFFDQSKNGYAGYIDGGASQEEFYKFIKPILEKMDGTEELLVKLNREDLLRKQRTFDNGSIPHQIHLGELHAILRRQEDFYPFLKDNREKIEKILTFRIPYYVGPLARGNSRFAWMTRKSEETITPWNFEEVVDKGASAQSFIERMTNFDKNLPNEKVLPKHSLLYEYFTVYNELTKVKYVTEGMRKPAFLSGEQKKAIVDLLFKTNRKVTVKQLKEDYFKKIECFDSVEISGVEDRFNASLGTYHDLLKIIKDKDFLDNEENEDILEDIVLTLTLFEDREMIEERLKTYAHLFDDKVMKQLKRRRYTGWGRLSRKLINGIRDKQSGKTILDFLKSDGFANRNFMQLIHDDSLTFKEDIQKAQVSGQGDSLHEHIANLAGSPAIKKGILQTVKVVDELVKVMGRHKPENIVIEMARENQTTQKGQKNSRERMKRIEEGIKELGSQILKEHPVENTQLQNEKLYLYYLQNGRDMYVDQELDINRLSDYDVDHIVPQSFLKDDSIDNKVLTRSDKARGKSDNVPSEEVVKKMKNYWRQLLNAKLITQRKFDNLTKAERGGLSELDKAGFIKRQLVETRQITKHVAQILDSRMNTKYDENDKLIREVKVITLKSKLVSDFRKDFQFYKVREINNYHHAHDAYLNAVVGTALIKKYPKLESEFVYGDYKVYDVRKMIAKSEQEIGKATAKYFFYSNIMNFFKTEITLANGEIRKRPLIETNGETGEIVWDKGRDFATVRKVLSMPQVNIVKKTEVQTGGFSKESILPKRNSDKLIARKKDWDPKKYGGFDSPTVAYSVLVVAKVEKGKSKKLKSVKELLGITIMERSSFEKNPIDFLEAKGYKEVKKDLIIKLPKYSLFELENGRKRMLASAGELQKGNELALPSKYVNFLYLASHYEKLKGSPEDNEQKQLFVEQHKHYLDEIIEQISEFSKRVILADANLDKVLSAYNKHRDKPIREQAENIIHLFTLTNLGAPAAFKYFDTTIDRKRYTSTKEVLDATLIHQSITGLYETRIDLSQLGGDGGGGSPAPGGTLNIEDEYRLHETSKEPDVPLGSTWLSDFPQAWAETGGMGLAVRQAPLIIPLKATSTPVSIKQYPMSQEARLGIKPHIQRLLDQGILVPCQSPWNTPLLPVKKPGTNDYRPVQDLREVNKRVEDIHPTVPNPYNLLSGLPPSHQWYTVLDLKDAFFCLRLHPTSQPLFAFEWRDPEMGISGQLTWTRLPQGFKNSPTLFNEALHRDLADFRIQHPDLILLQYVDDLLLAATSEQDCQRGTRALLQTLGNLGYRASAKKAQICQKQVKYLGYLLKEGQRWLTEARKETVMGQPTPKTPRQLREFLGKAGFCRLFIPGFAEMAAPLYPLTKPGTLFNWGPDQQKAYQEIKQALLTAPALGLPDLTKPFELFVDEKQGYAKGVLTQKLGPWRRPVAYLSKKLDPVAAGWPPCLRMVAAIAVLTKDAGKLTMGQPLVILAPHAVEALVKQPPDRWLSNARMTHYQAMLLDTDRVQFGPVVALNPATLLPLPEKEAPHDCLEILAETHGTRPDLTDQPIPDADYTWYTDGSSFLQEGQRRAGAAVTTETEVIWARALPAGTSAQRAELIALTQALKMAEGKKLNVYTDSRYAFATAHVHGEIYRRRGWLTSEGREIKNKNEILALLKALFLPKRLSIIHCPGHQKGNSAEARGNRMADQAAREAAMKAVLETSTLLAGKRTADGSEFEKRTADGSEFESPKKKAKVE

SEQ ID NO: 1018 - protein, 2096 aa, synthetic construct
  source 1..2096: note = Description of Artificial Sequence: Synthetic polypeptide
MPAAKRVKLDGGDKKYSIGLDIGTNSVGWAVITDEYKVPSKKFKVLGNTDRHSIKKNLIGALLFDSGETAEATRLKRTARRRYTRRKNRICYLQEIFSNEMAKVDDSFFHRLEESFLVEEDKKHERHPIFGNIVDEVAYHEKYPTIYHLRKKLVDSTDKADLRLIYLALAHMIKFRGHFLIEGDLNPDNSDVDKLFIQLVQTYNQLFEENPINASGVDAKAILSARLSKSRRLENLIAQLPGEKKNGLFGNLIALSLGLTPNFKSNFDLAEDAKLQLSKDTYDDDLDNLLAQIGDQYADLFLAAKNLSDAILLSDILRVNTEITKAPLSASMIKRYDEHHQDLTLLKALVRQQLPEKYKEIFFDQSKNGYAGYIDGGASQEEFYKFIKPILEKMDGTEELLVKLNREDLLRKQRTFDNGSIPHQIHLGELHAILRRQEDFYPFLKDNREKIEKILTFRIPYYVGPLARGNSRFAWMTRKSEETITPWNFEEVVDKGASAQSFIERMTNFDKNLPNEKVLPKHSLLYEYFTVYNELTKVKYVTEGMRKPAFLSGEQKKAIVDLLFKTNRKVTVKQLKEDYFKKIECFDSVEISGVEDRFNASLGTYHDLLKIIKDKDFLDNEENEDILEDIVLTLTLFEDREMIEERLKTYAHLFDDKVMKQLKRRRYTGWGRLSRKLINGIRDKQSGKTILDFLKSDGFANRNFMQLIHDDSLTFKEDIQKAQVSGQGDSLHEHIANLAGSPAIKKGILQTVKVVDELVKVMGRHKPENIVIEMARENQTTQKGQKNSRERMKRIEEGIKELGSQILKEHPVENTQLQNEKLYLYYLQNGRDMYVDQELDINRLSDYDVDHIVPQSFLKDDSIDNKVLTRSDKARGKSDNVPSEEVVKKMKNYWRQLLNAKLITQRKFDNLTKAERGGLSELDKAGFIKRQLVETRQITKHVAQILDSRMNTKYDENDKLIREVKVITLKSKLVSDFRKDFQFYKVREINNYHHAHDAYLNAVVGTALIKKYPKLESEFVYGDYKVYDVRKMIAKSEQEIGKATAKYFFYSNIMNFFKTEITLANGEIRKRPLIETNGETGEIVWDKGRDFATVRKVLSMPQVNIVKKTEVQTGGFSKESILPKRNSDKLIARKKDWDPKKYGGFDSPTVAYSVLVVAKVEKGKSKKLKSVKELLGITIMERSSFEKNPIDFLEAKGYKEVKKDLIIKLPKYSLFELENGRKRMLASAGELQKGNELALPSKYVNFLYLASHYEKLKGSPEDNEQKQLFVEQHKHYLDEIIEQISEFSKRVILADANLDKVLSAYNKHRDKPIREQAENIIHLFTLTNLGAPAAFKYFDTTIDRKRYTSTKEVLDATLIHQSITGLYETRIDLSQLGGDGGGGGEAAAKGGSGGTLNIEDEYRLHETSKEPDVPLGSTWLSDFPQAWAETGGMGLAVRQAPLIIPLKATSTPVSIKQYPMSQEARLGIKPHIQRLLDQGILVPCQSPWNTPLLPVKKPGTNDYRPVQDLREVNKRVEDIHPTVPNPYNLLSGLPPSHQWYTVLDLKDAFFCLRLHPTSQPLFAFEWRDPEMGISGQLTWTRLPQGFKNSPTLFNEALHRDLADFRIQHPDLILLQYVDDLLLAATSEQDCQRGTRALLQTLGNLGYRASAKKAQICQKQVKYLGYLLKEGQRWLTEARKETVMGQPTPKTPRQLREFLGKAGFCRLFIPGFAEMAAPLYPLTKPGTLFNWGPDQQKAYQEIKQALLTAPALGLPDLTKPFELFVDEKQGYAKGVLTQKLGPWRRPVAYLSKKLDPVAAGWPPCLRMVAAIAVLTKDAGKLTMGQPLVILAPHAVEALVKQPPDRWLSNARMTHYQAMLLDTDRVQFGPVVALNPATLLPLPEKEAPHDCLEILAETHGTRPDLTDQPIPDADYTWYTDGSSFLQEGQRRAGAAVTTETEVIWARALPAGTSAQRAELIALTQALKMAEGKKLNVYTDSRYAFATAHVHGEIYRRRGWLTSEGREIKNKNEILALLKALFLPKRLSIIHCPGHQKGNSAEARGNRMADQAAREAAMKAVLETSTLLAGKRTADGSEFEKRTADGSEFESPKKKAKVE

SEQ ID NO: 1019 - protein, 2097 aa, synthetic construct
  source 1..2097: note = Description of Artificial Sequence: Synthetic polypeptide
MPAAKRVKLDGGDKKYSIGLDIGTNSVGWAVITDEYKVPSKKFKVLGNTDRHSIKKNLIGALLFDSGETAEATRLKRTARRRYTRRKNRICYLQEIFSNEMAKVDDSFFHRLEESFLVEEDKKHERHPIFGNIVDEVAYHEKYPTIYHLRKKLVDSTDKADLRLIYLALAHMIKFRGHFLIEGDLNPDNSDVDKLFIQLVQTYNQLFEENPINASGVDAKAILSARLSKSRRLENLIAQLPGEKKNGLFGNLIALSLGLTPNFKSNFDLAEDAKLQLSKDTYDDDLDNLLAQIGDQYADLFLAAKNLSDAILLSDILRVNTEITKAPLSASMIKRYDEHHQDLTLLKALVRQQLPEKYKEIFFDQSKNGYAGYIDGGASQEEFYKFIKPILEKMDGTEELLVKLNREDLLRKQRTFDNGSIPHQIHLGELHAILRRQEDFYPFLKDNREKIEKILTFRIPYYVGPLARGNSRFAWMTRKSEETITPWNFEEVVDKGASAQSFIERMTNFDKNLPNEKVLPKHSLLYEYFTVYNELTKVKYVTEGMRKPAFLSGEQKKAIVDLLFKTNRKVTVKQLKEDYFKKIECFDSVEISGVEDRFNASLGTYHDLLKIIKDKDFLDNEENEDILEDIVLTLTLFEDREMIEERLKTYAHLFDDKVMKQLKRRRYTGWGRLSRKLINGIRDKQSGKTILDFLKSDGFANRNFMQLIHDDSLTFKEDIQKAQVSGQGDSLHEHIANLAGSPAIKKGILQTVKVVDELVKVMGRHKPENIVIEMARENQTTQKGQKNSRERMKRIEEGIKELGSQILKEHPVENTQLQNEKLYLYYLQNGRDMYVDQELDINRLSDYDVDHIVPQSFLKDDSIDNKVLTRSDKARGKSDNVPSEEVVKKMKNYWRQLLNAKLITQRKFDNLTKAERGGLSELDKAGFIKRQLVETRQITKHVAQILDSRMNTKYDENDKLIREVKVITLKSKLVSDFRKDFQFYKVREINNYHHAHDAYLNAVVGTALIKKYPKLESEFVYGDYKVYDVRKMIAKSEQEIGKATAKYFFYSNIMNFFKTEITLANGEIRKRPLIETNGETGEIVWDKGRDFATVRKVLSMPQVNIVKKTEVQTGGFSKESILPKRNSDKLIARKKDWDPKKYGGFDSPTVAYSVLVVAKVEKGKSKKLKSVKELLGITIMERSSFEKNPIDFLEAKGYKEVKKDLIIKLPKYSLFELENGRKRMLASAGELQKGNELALPSKYVNFLYLASHYEKLKGSPEDNEQKQLFVEQHKHYLDEIIEQISEFSKRVILADANLDKVLSAYNKHRDKPIREQAENIIHLFTLTNLGAPAAFKYFDTTIDRKRYTSTKEVLDATLIHQSITGLYETRIDLSQLGGDGGGGSGGSGGSGGSGGTLNIEDEYRLHETSKEPDVPLGSTWLSDFPQAWAETGGMGLAVRQAPLIIPLKATSTPVSIKQYPMSQEARLGIKPHIQRLLDQGILVPCQSPWNTPLLPVKKPGTNDYRPVQDLREVNKRVEDIHPTVPNPYNLLSGLPPSHQWYTVLDLKDAFFCLRLHPTSQPLFAFEWRDPEMGISGQLTWTRLPQGFKNSPTLFNEALHRDLADFRIQHPDLILLQYVDDLLLAATSEQDCQRGTRALLQTLGNLGYRASAKKAQICQKQVKYLGYLLKEGQRWLTEARKETVMGQPTPKTPRQLREFLGKAGFCRLFIPGFAEMAAPLYPLTKPGTLFNWGPDQQKAYQEIKQALLTAPALGLPDLTKPFELFVDEKQGYAKGVLTQKLGPWRRPVAYLSKKLDPVAAGWPPCLRMVAAIAVLTKDAGKLTMGQPLVILAPHAVEALVKQPPDRWLSNARMTHYQAMLLDTDRVQFGPVVALNPATLLPLPEKEAPHDCLEILAETHGTRPDLTDQPIPDADYTWYTDGSSFLQEGQRRAGAAVTTETEVIWARALPAGTSAQRAELIALTQALKMAEGKKLNVYTDSRYAFATAHVHGEIYRRRGWLTSEGREIKNKNEILALLKALFLPKRLSIIHCPGHQKGNSAEARGNRMADQAAREAAMKAVLETSTLLAGKRTADGSEFEKRTADGSEFESPKKKAKVE

SEQ ID NO: 1020 - protein, 2098 aa, synthetic construct
  source 1..2098: note = Description of Artificial Sequence: Synthetic polypeptide
MPAAKRVKLDGGDKKYSIGLDIGTNSVGWAVITDEYKVPSKKFKVLGNTDRHSIKKNLIGALLFDSGETAEATRLKRTARRRYTRRKNRICYLQEIFSNEMAKVDDSFFHRLEESFLVEEDKKHERHPIFGNIVDEVAYHEKYPTIYHLRKKLVDSTDKADLRLIYLALAHMIKFRGHFLIEGDLNPDNSDVDKLFIQLVQTYNQLFEENPINASGVDAKAILSARLSKSRRLENLIAQLPGEKKNGLFGNLIALSLGLTPNFKSNFDLAEDAKLQLSKDTYDDDLDNLLAQIGDQYADLFLAAKNLSDAILLSDILRVNTEITKAPLSASMIKRYDEHHQDLTLLKALVRQQLPEKYKEIFFDQSKNGYAGYIDGGASQEEFYKFIKPILEKMDGTEELLVKLNREDLLRKQRTFDNGSIPHQIHLGELHAILRRQEDFYPFLKDNREKIEKILTFRIPYYVGPLARGNSRFAWMTRKSEETITPWNFEEVVDKGASAQSFIERMTNFDKNLPNEKVLPKHSLLYEYFTVYNELTKVKYVTEGMRKPAFLSGEQKKAIVDLLFKTNRKVTVKQLKEDYFKKIECFDSVEISGVEDRFNASLGTYHDLLKIIKDKDFLDNEENEDILEDIVLTLTLFEDREMIEERLKTYAHLFDDKVMKQLKRRRYTGWGRLSRKLINGIRDKQSGKTILDFLKSDGFANRNFMQLIHDDSLTFKEDIQKAQVSGQGDSLHEHIANLAGSPAIKKGILQTVKVVDELVKVMGRHKPENIVIEMARENQTTQKGQKNSRERMKRIEEGIKELGSQILKEHPVENTQLQNEKLYLYYLQNGRDMYVDQELDINRLSDYDVDHIVPQSFLKDDSIDNKVLTRSDKARGKSDNVPSEEVVKKMKNYWRQLLNAKLITQRKFDNLTKAERGGLSELDKAGFIKRQLVETRQITKHVAQILDSRMNTKYDENDKLIREVKVITLKSKLVSDFRKDFQFYKVREINNYHHAHDAYLNAVVGTALIKKYPKLESEFVYGDYKVYDVRKMIAKSEQEIGKATAKYFFYSNIMNFFKTEITLANGEIRKRPLIETNGETGEIVWDKGRDFATVRKVLSMPQVNIVKKTEVQTGGFSKESILPKRNSDKLIARKKDWDPKKYGGFDSPTVAYSVLVVAKVEKGKSKKLKSVKELLGITIMERSSFEKNPIDFLEAKGYKEVKKDLIIKLPKYSLFELENGRKRMLASAGELQKGNELALPSKYVNFLYLASHYEKLKGSPEDNEQKQLFVEQHKHYLDEIIEQISEFSKRVILADANLDKVLSAYNKHRDKPIREQAENIIHLFTLTNLGAPAAFKYFDTTIDRKRYTSTKEVLDATLIHQSITGLYETRIDLSQLGGDGGPAPAPAPAPAPAPGGTLNIEDEYRLHETSKEPDVPLGSTWLSDFPQAWAETGGMGLAVRQAPLIIPLKATSTPVSIKQYPMSQEARLGIKPHIQRLLDQGILVPCQSPWNTPLLPVKKPGTNDYRPVQDLREVNKRVEDIHPTVPNPYNLLSGLPPSHQWYTVLDLKDAFFCLRLHPTSQPLFAFEWRDPEMGISGQLTWTRLPQGFKNSPTLFNEALHRDLADFRIQHPDLILLQYVDDLLLAATSEQDCQRGTRALLQTLGNLGYRASAKKAQICQKQVKYLGYLLKEGQRWLTEARKETVMGQPTPKTPRQLREFLGKAGFCRLFIPGFAEMAAPLYPLTKPGTLFNWGPDQQKAYQEIKQALLTAPALGLPDLTKPFELFVDEKQGYAKGVLTQKLGPWRRPVAYLSKKLDPVAAGWPPCLRMVAAIAVLTKDAGKLTMGQPLVILAPHAVEALVKQPPDRWLSNARMTHYQAMLLDTDRVQFGPVVALNPATLLPLPEKEAPHDCLEILAETHGTRPDLTDQPIPDADYTWYTDGSSFLQEGQRRAGAAVTTETEVIWARALPAGTSAQRAELIALTQALKMAEGKKLNVYTDSRYAFATAHVHGEIYRRRGWLTSEGREIKNKNEILALLKALFLPKRLSIIHCPGHQKGNSAEARGNRMADQAAREAAMKAVLETSTLLAGKRTADGSEFEKRTADGSEFESPKKKAKVE

SEQ ID NO: 1021 - protein, 2115 aa, synthetic construct
  source 1..2115: note = Description of Artificial Sequence: Synthetic polypeptide
MPAAKRVKLDGGDKKYSIGLDIGTNSVGWAVITDEYKVPSKKFKVLGNTDRHSIKKNLIGALLFDSGETAEATRLKRTARRRYTRRKNRICYLQEIFSNEMAKVDDSFFHRLEESFLVEEDKKHERHPIFGNIVDEVAYHEKYPTIYHLRKKLVDSTDKADLRLIYLALAHMIKFRGHFLIEGDLNPDNSDVDKLFIQLVQTYNQLFEENPINASGVDAKAILSARLSKSRRLENLIAQLPGEKKNGLFGNLIALSLGLTPNFKSNFDLAEDAKLQLSKDTYDDDLDNLLAQIGDQYADLFLAAKNLSDAILLSDILRVNTEITKAPLSASMIKRYDEHHQDLTLLKALVRQQLPEKYKEIFFDQSKNGYAGYIDGGASQEEFYKFIKPILEKMDGTEELLVKLNREDLLRKQRTFDNGSIPHQIHLGELHAILRRQEDFYPFLKDNREKIEKILTFRIPYYVGPLARGNSRFAWMTRKSEETITPWNFEEVVDKGASAQSFIERMTNFDKNLPNEKVLPKHSLLYEYFTVYNELTKVKYVTEGMRKPAFLSGEQKKAIVDLLFKTNRKVTVKQLKEDYFKKIECFDSVEISGVEDRFNASLGTYHDLLKIIKDKDFLDNEENEDILEDIVLTLTLFEDREMIEERLKTYAHLFDDKVMKQLKRRRYTGWGRLSRKLINGIRDKQSGKTILDFLKSDGFANRNFMQLIHDDSLTFKEDIQKAQVSGQGDSLHEHIANLAGSPAIKKGILQTVKVVDELVKVMGRHKPENIVIEMARENQTTQKGQKNSRERMKRIEEGIKELGSQILKEHPVENTQLQNEKLYLYYLQNGRDMYVDQELDINRLSDYDVDHIVPQSFLKDDSIDNKVLTRSDKARGKSDNVPSEEVVKKMKNYWRQLLNAKLITQRKFDNLTKAERGGLSELDKAGFIKRQLVETRQITKHVAQILDSRMNTKYDENDKLIREVKVITLKSKLVSDFRKDFQFYKVREINNYHHAHDAYLNAVVGTALIKKYPKLESEFVYGDYKVYDVRKMIAKSEQEIGKATAKYFFYSNIMNFFKTEITLANGEIRKRPLIETNGETGEIVWDKGRDFATVRKVLSMPQVNIVKKTEVQTGGFSKESILPKRNSDKLIARKKDWDPKKYGGFDSPTVAYSVLVVAKVEKGKSKKLKSVKELLGITIMERSSFEKNPIDFLEAKGYKEVKKDLIIKLPKYSLFELENGRKRMLASAGELQKGNELALPSKYVNFLYLASHYEKLKGSPEDNEQKQLFVEQHKHYLDEIIEQISEFSKRVILADANLDKVLSAYNKHRDKPIREQAENIIHLFTLTNLGAPAAFKYFDTTIDRKRYTSTKEVLDATLIHQSITGLYETRIDLSQLGGDGGGGGGSGGGGSGGGGSGGGGSGGGGSGGGGSGGTLNIEDEYRLHETSKEPDVPLGSTWLSDFPQAWAETGGMGLAVRQAPLIIPLKATSTPVSIKQYPMSQEARLGIKPHIQRLLDQGILVPCQSPWNTPLLPVKKPGTNDYRPVQDLREVNKRVEDIHPTVPNPYNLLSGLPPSHQWYTVLDLKDAFFCLRLHPTSQPLFAFEWRDPEMGISGQLTWTRLPQGFKNSPTLFNEALHRDLADFRIQHPDLILLQYVDDLLLAATSEQDCQRGTRALLQTLGNLGYRASAKKAQICQKQVKYLGYLLKEGQRWLTEARKETVMGQPTPKTPRQLREFLGKAGFCRLFIPGFAEMAAPLYPLTKPGTLFNWGPDQQKAYQEIKQALLTAPALGLPDLTKPFELFVDEKQGYAKGVLTQKLGPWRRPVAYLSKKLDPVAAGWPPCLRMVAAIAVLTKDAGKLTMGQPLVILAPHAVEALVKQPPDRWLSNARMTHYQAMLLDTDRVQFGPVVALNPATLLPLPEKEAPHDCLEILAETHGTRPDLTDQPIPDADYTWYTDGSSFLQEGQRRAGAAVTTETEVIWARALPAGTSAQRAELIALTQALKMAEGKKLNVYTDSRYAFATAHVHGEIYRRRGWLTSEGREIKNKNEILALLKALFLPKRLSIIHCPGHQKGNSAEARGNRMADQAAREAAMKAVLETSTLLAGKRTADGSEFEKRTADGSEFESPKKKAKVE

SEQ ID NO: 1022 - protein, 2094 aa, synthetic construct
  source 1..2094: note = Description of Artificial Sequence: Synthetic polypeptide
MPAAKRVKLDGGDKKYSIGLDIGTNSVGWAVITDEYKVPSKKFKVLGNTDRHSIKKNLIGALLFDSGETAEATRLKRTARRRYTRRKNRICYLQEIFSNEMAKVDDSFFHRLEESFLVEEDKKHERHPIFGNIVDEVAYHEKYPTIYHLRKKLVDSTDKADLRLIYLALAHMIKFRGHFLIEGDLNPDNSDVDKLFIQLVQTYNQLFEENPINASGVDAKAILSARLSKSRRLENLIAQLPGEKKNGLFGNLIALSLGLTPNFKSNFDLAEDAKLQLSKDTYDDDLDNLLAQIGDQYADLFLAAKNLSDAILLSDILRVNTEITKAPLSASMIKRYDEHHQDLTLLKALVRQQLPEKYKEIFFDQSKNGYAGYIDGGASQEEFYKFIKPILEKMDGTEELLVKLNREDLLRKQRTFDNGSIPHQIHLGELHAILRRQEDFYPFLKDNREKIEKILTFRIPYYVGPLARGNSRFAWMTRKSEETITPWNFEEVVDKGASAQSFIERMTNFDKNLPNEKVLPKHSLLYEYFTVYNELTKVKYVTEGMRKPAFLSGEQKKAIVDLLFKTNRKVTVKQLKEDYFKKIECFDSVEISGVEDRFNASLGTYHDLLKIIKDKDFLDNEENEDILEDIVLTLTLFEDREMIEERLKTYAHLFDDKVMKQLKRRRYTGWGRLSRKLINGIRDKQSGKTILDFLKSDGFANRNFMQLIHDDSLTFKEDIQKAQVSGQGDSLHEHIANLAGSPAIKKGILQTVKVVDELVKVMGRHKPENIVIEMARENQTTQKGQKNSRERMKRIEEGIKELGSQILKEHPVENTQLQNEKLYLYYLQNGRDMYVDQELDINRLSDYDVDHIVPQSFLKDDSIDNKVLTRSDKARGKSDNVPSEEVVKKMKNYWRQLLNAKLITQRKFDNLTKAERGGLSELDKAGFIKRQLVETRQITKHVAQILDSRMNTKYDENDKLIREVKVITLKSKLVSDFRKDFQFYKVREINNYHHAHDAYLNAVVGTALIKKYPKLESEFVYGDYKVYDVRKMIAKSEQEIGKATAKYFFYSNIMNFFKTEITLANGEIRKRPLIETNGETGEIVWDKGRDFATVRKVLSMPQVNIVKKTEVQTGGFSKESILPKRNSDKLIARKKDWDPKKYGGFDSPTVAYSVLVVAKVEKGKSKKLKSVKELLGITIMERSSFEKNPIDFLEAKGYKEVKKDLIIKLPKYSLFELENGRKRMLASAGELQKGNELALPSKYVNFLYLASHYEKLKGSPEDNEQKQLFVEQHKHYLDEIIEQISEFSKRVILADANLDKVLSAYNKHRDKPIREQAENIIHLFTLTNLGAPAAFKYFDTTIDRKRYTSTKEVLDATLIHQSITGLYETRIDLSQLGGDGGGGSGSSGGGGGTLNIEDEYRLHETSKEPDVPLGSTWLSDFPQAWAETGGMGLAVRQAPLIIPLKATSTPVSIKQYPMSQEARLGIKPHIQRLLDQGILVPCQSPWNTPLLPVKKPGTNDYRPVQDLREVNKRVEDIHPTVPNPYNLLSGLPPSHQWYTVLDLKDAFFCLRLHPTSQPLFAFEWRDPEMGISGQLTWTRLPQGFKNSPTLFNEALHRDLADFRIQHPDLILLQYVDDLLLAATSEQDCQRGTRALLQTLGNLGYRASAKKAQICQKQVKYLGYLLKEGQRWLTEARKETVMGQPTPKTPRQLREFLGKAGFCRLFIPGFAEMAAPLYPLTKPGTLFNWGPDQQKAYQEIKQALLTAPALGLPDLTKPFELFVDEKQGYAKGVLTQKLGPWRRPVAYLSKKLDPVAAGWPPCLRMVAAIAVLTKDAGKLTMGQPLVILAPHAVEALVKQPPDRWLSNARMTHYQAMLLDTDRVQFGPVVALNPATLLPLPEKEAPHDCLEILAETHGTRPDLTDQPIPDADYTWYTDGSSFLQEGQRRAGAAVTTETEVIWARALPAGTSAQRAELIALTQALKMAEGKKLNVYTDSRYAFATAHVHGEIYRRRGWLTSEGREIKNKNEILALLKALFLPKRLSIIHCPGHQKGNSAEARGNRMADQAAREAAMKAVLETSTLLAGKRTADGSEFEKRTADGSEFESPKKKAKVE

SEQ ID NO: 1023 - protein, 2093 aa, synthetic construct
  source 1..2093: note = Description of Artificial Sequence: Synthetic polypeptide
MPAAKRVKLDGGDKKYSIGLDIGTNSVGWAVITDEYKVPSKKFKVLGNTDRHSIKKNLIGALLFDSGETAEATRLKRTARRRYTRRKNRICYLQEIFSNEMAKVDDSFFHRLEESFLVEEDKKHERHPIFGNIVDEVAYHEKYPTIYHLRKKLVDSTDKADLRLIYLALAHMIKFRGHFLIEGDLNPDNSDVDKLFIQLVQTYNQLFEENPINASGVDAKAILSARLSKSRRLENLIAQLPGEKKNGLFGNLIALSLGLTPNFKSNFDLAEDAKLQLSKDTYDDDLDNLLAQIGDQYADLFLAAKNLSDAILLSDILRVNTEITKAPLSASMIKRYDEHHQDLTLLKALVRQQLPEKYKEIFFDQSKNGYAGYIDGGASQEEFYKFIKPILEKMDGTEELLVKLNREDLLRKQRTFDNGSIPHQIHLGELHAILRRQEDFYPFLKDNREKIEKILTFRIPYYVGPLARGNSRFAWMTRKSEETITPWNFEEVVDKGASAQSFIERMTNFDKNLPNEKVLPKHSLLYEYFTVYNELTKVKYVTEGMRKPAFLSGEQKKAIVDLLFKTNRKVTVKQLKEDYFKKIECFDSVEISGVEDRFNASLGTYHDLLKIIKDKDFLDNEENEDILEDIVLTLTLFEDREMIEERLKTYAHLFDDKVMKQLKRRRYTGWGRLSRKLINGIRDKQSGKTILDFLKSDGFANRNFMQLIHDDSLTFKEDIQKAQVSGQGDSLHEHIANLAGSPAIKKGILQTVKVVDELVKVMGRHKPENIVIEMARENQTTQKGQKNSRERMKRIEEGIKELGSQILKEHPVENTQLQNEKLYLYYLQNGRDMYVDQELDINRLSDYDVDHIVPQSFLKDDSIDNKVLTRSDKARGKSDNVPSEEVVKKMKNYWRQLLNAKLITQRKFDNLTKAERGGLSELDKAGFIKRQLVETRQITKHVAQILDSRMNTKYDENDKLIREVKVITLKSKLVSDFRKDFQFYKVREINNYHHAHDAYLNAVVGTALIKKYPKLESEFVYGDYKVYDVRKMIAKSEQEIGKATAKYFFYSNIMNFFKTEITLANGEIRKRPLIETNGETGEIVWDKGRDFATVRKVLSMPQVNIVKKTEVQTGGFSKESILPKRNSDKLIARKKDWDPKKYGGFDSPTVAYSVLVVAKVEKGKSKKLKSVKELLGITIMERSSFEKNPIDFLEAKGYKEVKKDLIIKLPKYSLFELENGRKRMLASAGELQKGNELALPSKYVNFLYLASHYEKLKGSPEDNEQKQLFVEQHKHYLDEIIEQISEFSKRVILADANLDKVLSAYNKHRDKPIREQAENIIHLFTLTNLGAPAAFKYFDTTIDRKRYTSTKEVLDATLIHQSITGLYETRIDLSQLGGDGGEAAAKGGSGGTLNIEDEYRLHETSKEPDVPLGSTWLSDFPQAWAETGGMGLAVRQAPLIIPLKATSTPVSIKQYPMSQEARLGIKPHIQRLLDQGILVPCQSPWNTPLLPVKKPGTNDYRPVQDLREVNKRVEDIHPTVPNPYNLLSGLPPSHQWYTVLDLKDAFFCLRLHPTSQPLFAFEWRDPEMGISGQLTWTRLPQGFKNSPTLFNEALHRDLADFRIQHPDLILLQYVDDLLLAATSEQDCQRGTRALLQTLGNLGYRASAKKAQICQKQVKYLGYLLKEGQRWLTEARKETVMGQPTPKTPRQLREFLGKAGFCRLFIPGFAEMAAPLYPLTKPGTLFNWGPDQQKAYQEIKQALLTAPALGLPDLTKPFELFVDEKQGYAKGVLTQKLGPWRRPVAYLSKKLDPVAAGWPPCLRMVAAIAVLTKDAGKLTMGQPLVILAPHAVEALVKQPPDRWLSNARMTHYQAMLLDTDRVQFGPVVALNPATLLPLPEKEAPHDCLEILAETHGTRPDLTDQPIPDADYTWYTDGSSFLQEGQRRAGAAVTTETEVIWARALPAGTSAQRAELIALTQALKMAEGKKLNVYTDSRYAFATAHVHGEIYRRRGWLTSEGREIKNKNEILALLKALFLPKRLSIIHCPGHQKGNSAEARGNRMADQAAREAAMKAVLETSTLLAGKRTADGSEFEKRTADGSEFESPKKKAKVE

SEQ ID NO: 1024 - protein, 2094 aa, synthetic construct
  source 1..2094: note = Description of Artificial Sequence: Synthetic polypeptide
MPAAKRVKLDGGDKKYSIGLDIGTNSVGWAVITDEYKVPSKKFKVLGNTDRHSIKKNLIGALLFDSGETAEATRLKRTARRRYTRRKNRICYLQEIFSNEMAKVDDSFFHRLEESFLVEEDKKHERHPIFGNIVDEVAYHEKYPTIYHLRKKLVDSTDKADLRLIYLALAHMIKFRGHFLIEGDLNPDNSDVDKLFIQLVQTYNQLFEENPINASGVDAKAILSARLSKSRRLENLIAQLPGEKKNGLFGNLIALSLGLTPNFKSNFDLAEDAKLQLSKDTYDDDLDNLLAQIGDQYADLFLAAKNLSDAILLSDILRVNTEITKAPLSASMIKRYDEHHQDLTLLKALVRQQLPEKYKEIFFDQSKNGYAGYIDGGASQEEFYKFIKPILEKMDGTEELLVKLNREDLLRKQRTFDNGSIPHQIHLGELHAILRRQEDFYPFLKDNREKIEKILTFRIPYYVGPLARGNSRFAWMTRKSEETITPWNFEEVVDKGASAQSFIERMTNFDKNLPNEKVLPKHSLLYEYFTVYNELTKVKYVTEGMRKPAFLSGEQKKAIVDLLFKTNRKVTVKQLKEDYFKKIECFDSVEISGVEDRFNASLGTYHDLLKIIKDKDFLDNEENEDILEDIVLTLTLFEDREMIEERLKTYAHLFDDKVMKQLKRRRYTGWGRLSRKLINGIRDKQSGKTILDFLKSDGFANRNFMQLIHDDSLTFKEDIQKAQVSGQGDSLHEHIANLAGSPAIKKGILQTVKVVDELVKVMGRHKPENIVIEMARENQTTQKGQKNSRERMKRIEEGIKELGSQILKEHPVENTQLQNEKLYLYYLQNGRDMYVDQELDINRLSDYDVDHIVPQSFLKDDSIDNKVLTRSDKARGKSDNVPSEEVVKKMKNYWRQLLNAKLITQRKFDNLTKAERGGLSELDKAGFIKRQLVETRQITKHVAQILDSRMNTKYDENDKLIREVKVITLKSKLVSDFRKDFQFYKVREINNYHHAHDAYLNAVVGTALIKKYPKLESEFVYGDYKVYDVRKMIAKSEQEIGKATAKYFFYSNIMNFFKTEITLANGEIRKRPLIETNGETGEIVWDKGRDFATVRKVLSMPQVNIVKKTEVQTGGFSKESILPKRNSDKLIARKKDWDPKKYGGFDSPTVAYSVLVVAKVEKGKSKKLKSVKELLGITIMERSSFEKNPIDFLEAKGYKEVKKDLIIKLPKYSLFELENGRKRMLASAGELQKGNELALPSKYVNFLYLASHYEKLKGSPEDNEQKQLFVEQHKHYLDEIIEQISEFSKRVILADANLDKVLSAYNKHRDKPIREQAENIIHLFTLTNLGAPAAFKYFDTTIDRKRYTSTKEVLDATLIHQSITGLYETRIDLSQLGGDGGGGGGGSGSSGGTLNIEDEYRLHETSKEPDVPLGSTWLSDFPQAWAETGGMGLAVRQAPLIIPLKATSTPVSIKQYPMSQEARLGIKPHIQRLLDQGILVPCQSPWNTPLLPVKKPGTNDYRPVQDLREVNKRVEDIHPTVPNPYNLLSGLPPSHQWYTVLDLKDAFFCLRLHPTSQPLFAFEWRDPEMGISGQLTWTRLPQGFKNSPTLFNEALHRDLADFRIQHPDLILLQYVDDLLLAATSEQDCQRGTRALLQTLGNLGYRASAKKAQICQKQVKYLGYLLKEGQRWLTEARKETVMGQPTPKTPRQLREFLGKAGFCRLFIPGFAEMAAPLYPLTKPGTLFNWGPDQQKAYQEIKQALLTAPALGLPDLTKPFELFVDEKQGYAKGVLTQKLGPWRRPVAYLSKKLDPVAAGWPPCLRMVAAIAVLTKDAGKLTMGQPLVILAPHAVEALVKQPPDRWLSNARMTHYQAMLLDTDRVQFGPVVALNPATLLPLPEKEAPHDCLEILAETHGTRPDLTDQPIPDADYTWYTDGSSFLQEGQRRAGAAVTTETEVIWARALPAGTSAQRAELIALTQALKMAEGKKLNVYTDSRYAFATAHVHGEIYRRRGWLTSEGREIKNKNEILALLKALFLPKRLSIIHCPGHQKGNSAEARGNRMADQAAREAAMKAVLETSTLLAGKRTADGSEFEKRTADGSEFESPKKKAKVE

SEQ ID NO: 1025 - protein, 2094 aa, synthetic construct
  source 1..2094: note = Description of Artificial Sequence: Synthetic polypeptide
MPAAKRVKLDGGDKKYSIGLDIGTNSVGWAVITDEYKVPSKKFKVLGNTDRHSIKKNLIGALLFDSGETAEATRLKRTARRRYTRRKNRICYLQEIFSNEMAKVDDSFFHRLEESFLVEEDKKHERHPIFGNIVDEVAYHEKYPTIYHLRKKLVDSTDKADLRLIYLALAHMIKFRGHFLIEGDLNPDNSDVDKLFIQLVQTYNQLFEENPINASGVDAKAILSARLSKSRRLENLIAQLPGEKKNGLFGNLIALSLGLTPNFKSNFDLAEDAKLQLSKDTYDDDLDNLLAQIGDQYADLFLAAKNLSDAILLSDILRVNTEITKAPLSASMIKRYDEHHQDLTLLKALVRQQLPEKYKEIFFDQSKNGYAGYIDGGASQEEFYKFIKPILEKMDGTEELLVKLNREDLLRKQRTFDNGSIPHQIHLGELHAILRRQEDFYPFLKDNREKIEKILTFRIPYYVGPLARGNSRFAWMTRKSEETITPWNFEEVVDKGASAQSFIERMTNFDKNLPNEKVLPKHSLLYEYFTVYNELTKVKYVTEGMRKPAFLSGEQKKAIVDLLFKTNRKVTVKQLKEDYFKKIECFDSVEISGVEDRFNASLGTYHDLLKIIKDKDFLDNEENEDILEDIVLTLTLFEDREMIEERLKTYAHLFDDKVMKQLKRRRYTGWGRLSRKLINGIRDKQSGKTILDFLKSDGFANRNFMQLIHDDSLTFKEDIQKAQVSGQGDSLHEHIANLAGSPAIKKGILQTVKVVDELVKVMGRHKPENIVIEMARENQTTQKGQKNSRERMKRIEEGIKELGSQILKEHPVENTQLQNEKLYLYYLQNGRDMYVDQELDINRLSDYDVDHIVPQSFLKDDSIDNKVLTRSDKARGKSDNVPSEEVVKKMKNYWRQLLNAKLITQRKFDNLTKAERGGLSELDKAGFIKRQLVETRQITKHVAQILDSRMNTKYDENDKLIREVKVITLKSKLVSDFRKDFQFYKVREINNYHHAHDAYLNAVVGTALIKKYPKLESEFVYGDYKVYDVRKMIAKSEQEIGKATAKYFFYSNIMNFFKTEITLANGEIRKRPLIETNGETGEIVWDKGRDFATVRKVLSMPQVNIVKKTEVQTGGFSKESILPKRNSDKLIARKKDWDPKKYGGFDSPTVAYSVLVVAKVEKGKSKKLKSVKELLGITIMERSSFEKNPIDFLEAKGYKEVKKDLIIKLPKYSLFELENGRKRMLASAGELQKGNELALPSKYVNFLYLASHYEKLKGSPEDNEQKQLFVEQHKHYLDEIIEQISEFSKRVILADANLDKVLSAYNKHRDKPIREQAENIIHLFTLTNLGAPAAFKYFDTTIDRKRYTSTKEVLDATLIHQSITGLYETRIDLSQLGGDGGGGGPAPGGSGGTLNIEDEYRLHETSKEPDVPLGSTWLSDFPQAWAETGGMGLAVRQAPLIIPLKATSTPVSIKQYPMSQEARLGIKPHIQRLLDQGILVPCQSPWNTPLLPVKKPGTNDYRPVQDLREVNKRVEDIHPTVPNPYNLLSGLPPSHQWYTVLDLKDAFFCLRLHPTSQPLFAFEWRDPEMGISGQLTWTRLPQGFKNSPTLFNEALHRDLADFRIQHPDLILLQYVDDLLLAATSEQDCQRGTRALLQTLGNLGYRASAKKAQICQKQVKYLGYLLKEGQRWLTEARKETVMGQPTPKTPRQLREFLGKAGFCRLFIPGFAEMAAPLYPLTKPGTLFNWGPDQQKAYQEIKQALLTAPALGLPDLTKPFELFVDEKQGYAKGVLTQKLGPWRRPVAYLSKKLDPVAAGWPPCLRMVAAIAVLTKDAGKLTMGQPLVILAPHAVEALVKQPPDRWLSNARMTHYQAMLLDTDRVQFGPVVALNPATLLPLPEKEAPHDCLEILAETHGTRPDLTDQPIPDADYTWYTDGSSFLQEGQRRAGAAVTTETEVIWARALPAGTSAQRAELIALTQALKMAEGKKLNVYTDSRYAFATAHVHGEIYRRRGWLTSEGREIKNKNEILALLKALFLPKRLSIIHCPGHQKGNSAEARGNRMADQAAREAAMKAVLETSTLLAGKRTADGSEFEKRTADGSEFESPKKKAKVE

SEQ ID NO: 1026 - protein, 2110 aa, synthetic construct
  source 1..2110: note = Description of Artificial Sequence: Synthetic polypeptide
MPAAKRVKLDGGDKKYSIGLDIGTNSVGWAVITDEYKVPSKKFKVLGNTDRHSIKKNLIGALLFDSGETAEATRLKRTARRRYTRRKNRICYLQEIFSNEMAKVDDSFFHRLEESFLVEEDKKHERHPIFGNIVDEVAYHEKYPTIYHLRKKLVDSTDKADLRLIYLALAHMIKFRGHFLIEGDLNPDNSDVDKLFIQLVQTYNQLFEENPINASGVDAKAILSARLSKSRRLENLIAQLPGEKKNGLFGNLIALSLGLTPNFKSNFDLAEDAKLQLSKDTYDDDLDNLLAQIGDQYADLFLAAKNLSDAILLSDILRVNTEITKAPLSASMIKRYDEHHQDLTLLKALVRQQLPEKYKEIFFDQSKNGYAGYIDGGASQEEFYKFIKPILEKMDGTEELLVKLNREDLLRKQRTFDNGSIPHQIHLGELHAILRRQEDFYPFLKDNREKIEKILTFRIPYYVGPLARGNSRFAWMTRKSEETITPWNFEEVVDKGASAQSFIERMTNFDKNLPNEKVLPKHSLLYEYFTVYNELTKVKYVTEGMRKPAFLSGEQKKAIVDLLFKTNRKVTVKQLKEDYFKKIECFDSVEISGVEDRFNASLGTYHDLLKIIKDKDFLDNEENEDILEDIVLTLTLFEDREMIEERLKTYAHLFDDKVMKQLKRRRYTGWGRLSRKLINGIRDKQSGKTILDFLKSDGFANRNFMQLIHDDSLTFKEDIQKAQVSGQGDSLHEHIANLAGSPAIKKGILQTVKVVDELVKVMGRHKPENIVIEMARENQTTQKGQKNSRERMKRIEEGIKELGSQILKEHPVENTQLQNEKLYLYYLQNGRDMYVDQELDINRLSDYDVDHIVPQSFLKDDSIDNKVLTRSDKARGKSDNVPSEEVVKKMKNYWRQLLNAKLITQRKFDNLTKAERGGLSELDKAGFIKRQLVETRQITKHVAQILDSRMNTKYDENDKLIREVKVITLKSKLVSDFRKDFQFYKVREINNYHHAHDAYLNAVVGTALIKKYPKLESEFVYGDYKVYDVRKMIAKSEQEIGKATAKYFFYSNIMNFFKTEITLANGEIRKRPLIETNGETGEIVWDKGRDFATVRKVLSMPQVNIVKKTEVQTGGFSKESILPKRNSDKLIARKKDWDPKKYGGFDSPTVAYSVLVVAKVEKGKSKKLKSVKELLGITIMERSSFEKNPIDFLEAKGYKEVKKDLIIKLPKYSLFELENGRKRMLASAGELQKGNELALPSKYVNFLYLASHYEKLKGSPEDNEQKQLFVEQHKHYLDEIIEQISEFSKRVILADANLDKVLSAYNKHRDKPIREQAENIIHLFTLTNLGAPAAFKYFDTTIDRKRYTSTKEVLDATLIHQSITGLYETRIDLSQLGGDGGGGGGSGGGGSGGGGSGGGGSGGGGSGGTLNIEDEYRLHETSKEPDVPLGSTWLSDFPQAWAETGGMGLAVRQAPLIIPLKATSTPVSIKQYPMSQEARLGIKPHIQRLLDQGILVPCQSPWNTPLLPVKKPGTNDYRPVQDLREVNKRVEDIHPTVPNPYNLLSGLPPSHQWYTVLDLKDAFFCLRLHPTSQPLFAFEWRDPEMGISGQLTWTRLPQGFKNSPTLFNEALHRDLADFRIQHPDLILLQYVDDLLLAATSEQDCQRGTRALLQTLGNLGYRASAKKAQICQKQVKYLGYLLKEGQRWLTEARKETVMGQPTPKTPRQLREFLGKAGFCRLFIPGFAEMAAPLYPLTKPGTLFNWGPDQQKAYQEIKQALLTAPALGLPDLTKPFELFVDEKQGYAKGVLTQKLGPWRRPVAYLSKKLDPVAAGWPPCLRMVAAIAVLTKDAGKLTMGQPLVILAPHAVEALVKQPPDRWLSNARMTHYQAMLLDTDRVQFGPVVALNPATLLPLPEKEAPHDCLEILAETHGTRPDLTDQPIPDADYTWYTDGSSFLQEGQRRAGAAVTTETEVIWARALPAGTSAQRAELIALTQALKMAEGKKLNVYTDSRYAFATAHVHGEIYRRRGWLTSEGREIKNKNEILALLKALFLPKRLSIIHCPGHQKGNSAEARGNRMADQAAREAAMKAVLETSTLLAGKRTADGSEFEKRTADGSEFESPKKKAKVE

SEQ ID NO: 1027 - protein, 2096 aa, synthetic construct
  source 1..2096: note = Description of Artificial Sequence: Synthetic polypeptide
MPAAKRVKLDGGDKKYSIGLDIGTNSVGWAVITDEYKVPSKKFKVLGNTDRHSIKKNLIGALLFDSGETAEATRLKRTARRRYTRRKNRICYLQEIFSNEMAKVDDSFFHRLEESFLVEEDKKHERHPIFGNIVDEVAYHEKYPTIYHLRKKLVDSTDKADLRLIYLALAHMIKFRGHFLIEGDLNPDNSDVDKLFIQLVQTYNQLFEENPINASGVDAKAILSARLSKSRRLENLIAQLPGEKKNGLFGNLIALSLGLTPNFKSNFDLAEDAKLQLSKDTYDDDLDNLLAQIGDQYADLFLAAKNLSDAILLSDILRVNTEITKAPLSASMIKRYDEHHQDLTLLKALVRQQLPEKYKEIFFDQSKNGYAGYIDGGASQEEFYKFIKPILEKMDGTEELLVKLNREDLLRKQRTFDNGSIPHQIHLGELHAILRRQEDFYPFLKDNREKIEKILTFRIPYYVGPLARGNSRFAWMTRKSEETITPWNFEEVVDKGASAQSFIERMTNFDKNLPNEKVLPKHSLLYEYFTVYNELTKVKYVTEGMRKPAFLSGEQKKAIVDLLFKTNRKVTVKQLKEDYFKKIECFDSVEISGVEDRFNASLGTYHDLLKIIKDKDFLDNEENEDILEDIVLTLTLFEDREMIEERLKTYAHLFDDKVMKQLKRRRYTGWGRLSRKLINGIRDKQSGKTILDFLKSDGFANRNFMQLIHDDSLTFKEDIQKAQVSGQGDSLHEHIANLAGSPAIKKGILQTVKVVDELVKVMGRHKPENIVIEMARENQTTQKGQKNSRERMKRIEEGIKELGSQILKEHPVENTQLQNEKLYLYYLQNGRDMYVDQELDINRLSDYDVDHIVPQSFLKDDSIDNKVLTRSDKARGKSDNVPSEEVVKKMKNYWRQLLNAKLITQRKFDNLTKAERGGLSELDKAGFIKRQLVETRQITKHVAQILDSRMNTKYDENDKLIREVKVITLKSKLVSDFRKDFQFYKVREINNYHHAHDAYLNAVVGTALIKKYPKLESEFVYGDYKVYDVRKMIAKSEQEIGKATAKYFFYSNIMNFFKTEITLANGEIRKRPLIETNGETGEIVWDKGRDFATVRKVLSMPQVNIVKKTEVQTGGFSKESILPKRNSDKLIARKKDWDPKKYGGFDSPTVAYSVLVVAKVEKGKSKKLKSVKELLGITIMERSSFEKNPIDFLEAKGYKEVKKDLIIKLPKYSLFELENGRKRMLASAGELQKGNELALPSKYVNFLYLASHYEKLKGSPEDNEQKQLFVEQHKHYLDEIIEQISEFSKRVILADANLDKVLSAYNKHRDKPIREQAENIIHLFTLTNLGAPAAFKYFDTTIDRKRYTSTKEVLDATLIHQSITGLYETRIDLSQLGGDGGGSSEAAAKPAPGGTLNIEDEYRLHETSKEPDVPLGSTWLSDFPQAWAETGGMGLAVRQAPLIIPLKATSTPVSIKQYPMSQEARLGIKPHIQRLLDQGILVPCQSPWNTPLLPVKKPGTNDYRPVQDLREVNKRVEDIHPTVPNPYNLLSGLPPSHQWYTVLDLKDAFFCLRLHPTSQPLFAFEWRDPEMGISGQLTWTRLPQGFKNSPTLFNEALHRDLADFRIQHPDLILLQYVDDLLLAATSEQDCQRGTRALLQTLGNLGYRASAKKAQICQKQVKYLGYLLKEGQRWLTEARKETVMGQPTPKTPRQLREFLGKAGFCRLFIPGFAEMAAPLYPLTKPGTLFNWGPDQQKAYQEIKQALLTAPALGLPDLTKPFELFVDEKQGYAKGVLTQKLGPWRRPVAYLSKKLDPVAAGWPPCLRMVAAIAVLTKDAGKLTMGQPLVILAPHAVEALVKQPPDRWLSNARMTHYQAMLLDTDRVQFGPVVALNPATLLPLPEKEAPHDCLEILAETHGTRPDLTDQPIPDADYTWYTDGSSFLQEGQRRAGAAVTTETEVIWARALPAGTSAQRAELIALTQALKMAEGKKLNVYTDSRYAFATAHVHGEIYRRRGWLTSEGREIKNKNEILALLKALFLPKRLSIIHCPGHQKGNSAEARGNRMADQAAREAAMKAVLETSTLLAGKRTADGSEFEKRTADGSEFESPKKKAKVE

SEQ ID NO: 1028 - protein, 2101 aa, synthetic construct
  source 1..2101: note = Description of Artificial Sequence: Synthetic polypeptide
MPAAKRVKLDGGDKKYSIGLDIGTNSVGWAVITDEYKVPSKKFKVLGNTDRHSIKKNLIGALLFDSGETAEATRLKRTARRRYTRRKNRICYLQEIFSNEMAKVDDSFFHRLEESFLVEEDKKHERHPIFGNIVDEVAYHEKYPTIYHLRKKLVDSTDKADLRLIYLALAHMIKFRGHFLIEGDLNPDNSDVDKLFIQLVQTYNQLFEENPINASGVDAKAILSARLSKSRRLENLIAQLPGEKKNGLFGNLIALSLGLTPNFKSNFDLAEDAKLQLSKDTYDDDLDNLLAQIGDQYADLFLAAKNLSDAILLSDILRVNTEITKAPLSASMIKRYDEHHQDLTLLKALVRQQLPEKYKEIFFDQSKNGYAGYIDGGASQEEFYKFIKPILEKMDGTEELLVKLNREDLLRKQRTFDNGSIPHQIHLGELHAILRRQEDFYPFLKDNREKIEKILTFRIPYYVGPLARGNSRFAWMTRKSEETITPWNFEEVVDKGASAQSFIERMTNFDKNLPNEKVLPKHSLLYEYFTVYNELTKVKYVTEGMRKPAFLSGEQKKAIVDLLFKTNRKVTVKQLKEDYFKKIECFDSVEISGVEDRFNASLGTYHDLLKIIKDKDFLDNEENEDILEDIVLTLTLFEDREMIEERLKTYAHLFDDKVMKQLKRRRYTGWGRLSRKLINGIRDKQSGKTILDFLKSDGFANRNFMQLIHDDSLTFKEDIQKAQVSGQGDSLHEHIANLAGSPAIKKGILQTVKVVDELVKVMGRHKPENIVIEMARENQTTQKGQKNSRERMKRIEEGIKELGSQILKEHPVENTQLQNEKLYLYYLQNGRDMYVDQELDINRLSDYDVDHIVPQSFLKDDSIDNKVLTRSDKARGKSDNVPSEEVVKKMKNYWRQLLNAKLITQRKFDNLTKAERGGLSELDKAGFIKRQLVETRQITKHVAQILDSRMNTKYDENDKLIREVKVITLKSKLVSDFRKDFQFYKVREINNYHHAHDAYLNAVVGTALIKKYPKLESEFVYGDYKVYDVRKMIAKSEQEIGKATAKYFFYSNIMNFFKTEITLANGEIRKRPLIETNGETGEIVWDKGRDFATVRKVLSMPQVNIVKKTEVQTGGFSKESILPKRNSDKLIARKKDWDPKKYGGFDSPTVAYSVLVVAKVEKGKSKKLKSVKELLGITIMERSSFEKNPIDFLEAKGYKEVKKDLIIKLPKYSLFELENGRKRMLASAGELQKGNELALPSKYVNFLYLASHYEKLKGSPEDNEQKQLFVEQHKHYLDEIIEQISEFSKRVILADANLDKVLSAYNKHRDKPIREQAENIIHLFTLTNLGAPAAFKYFDTTIDRKRYTSTKEVLDATLIHQSITGLYETRIDLSQLGGDGGSGSETPGTSESATPESGGTLNIEDEYRLHETSKEPDVPLGSTWLSDFPQAWAETGGMGLAVRQAPLIIPLKATSTPVSIKQYPMSQEARLGIKPHIQRLLDQGILVPCQSPWNTPLLPVKKPGTNDYRPVQDLREVNKRVEDIHPTVPNPYNLLSGLPPSHQWYTVLDLKDAFFCLRLHPTSQPLFAFEWRDPEMGISGQLTWTRLPQGFKNSPTLFNEALHRDLADFRIQHPDLILLQYVDDLLLAATSEQDCQRGTRALLQTLGNLGYRASAKKAQICQKQVKYLGYLLKEGQRWLTEARKETVMGQPTPKTPRQLREFLGKAGFCRLFIPGFAEMAAPLYPLTKPGTLFNWGPDQQKAYQEIKQALLTAPALGLPDLTKPFELFVDEKQGYAKGVLTQKLGPWRRPVAYLSKKLDPVAAGWPPCLRMVAAIAVLTKDAGKLTMGQPLVILAPHAVEALVKQPPDRWLSNARMTHYQAMLLDTDRVQFGPVVALNPATLLPLPEKEAPHDCLEILAETHGTRPDLTDQPIPDADYTWYTDGSSFLQEGQRRAGAAVTTETEVIWARALPAGTSAQRAELIALTQALKMAEGKKLNVYTDSRYAFATAHVHGEIYRRRGWLTSEGREIKNKNEILALLKALFLPKRLSIIHCPGHQKGNSAEARGNRMADQAAREAAMKAVLETSTLLAGKRTADGSEFEKRTADGSEFESPKKKAKVE

SEQ ID NO: 1029 - protein, 2110 aa, synthetic construct
  source 1..2110: note = Description of Artificial Sequence: Synthetic polypeptide
MPAAKRVKLDGGDKKYSIGLDIGTNSVGWAVITDEYKVPSKKFKVLGNTDRHSIKKNLIGALLFDSGETAEATRLKRTARRRYTRRKNRICYLQEIFSNEMAKVDDSFFHRLEESFLVEEDKKHERHPIFGNIVDEVAYHEKYPTIYHLRKKLVDSTDKADLRLIYLALAHMIKFRGHFLIEGDLNPDNSDVDKLFIQLVQTYNQLFEENPINASGVDAKAILSARLSKSRRLENLIAQLPGEKKNGLFGNLIALSLGLTPNFKSNFDLAEDAKLQLSKDTYDDDLDNLLAQIGDQYADLFLAAKNLSDAILLSDILRVNTEITKAPLSASMIKRYDEHHQDLTLLKALVRQQLPEKYKEIFFDQSKNGYAGYIDGGASQEEFYKFIKPILEKMDGTEELLVKLNREDLLRKQRTFDNGSIPHQIHLGELHAILRRQEDFYPFLKDNREKIEKILTFRIPYYVGPLARGNSRFAWMTRKSEETITPWNFEEVVDKGASAQSFIERMTNFDKNLPNEKVLPKHSLLYEYFTVYNELTKVKYVTEGMRKPAFLSGEQKKAIVDLLFKTNRKVTVKQLKEDYFKKIECFDSVEISGVEDRFNASLGTYHDLLKIIKDKDFLDNEENEDILEDIVLTLTLFEDREMIEERLKTYAHLFDDKVMKQLKRRRYTGWGRLSRKLINGIRDKQSGKTILDFLKSDGFANRNFMQLIHDDSLTFKEDIQKAQVSGQGDSLHEHIANLAGSPAIKKGILQTVKVVDELVKVMGRHKPENIVIEMARENQTTQKGQKNSRERMKRIEEGIKELGSQILKEHPVENTQLQNEKLYLYYLQNGRDMYVDQELDINRLSDYDVDHIVPQSFLKDDSIDNKVLTRSDKARGKSDNVPSEEVVKKMKNYWRQLLNAKLITQRKFDNLTKAERGGLSELDKAGFIKRQLVETRQITKHVAQILDSRMNTKYDENDKLIREVKVITLKSKLVSDFRKDFQFYKVREINNYHHAHDAYLNAVVGTALIKKYPKLESEFVYGDYKVYDVRKMIAKSEQEIGKATAKYFFYSNIMNFFKTEITLANGEIRKRPLIETNGETGEIVWDKGRDFATVRKVLSMPQVNIVKKTEVQTGGFSKESILPKRNSDKLIARKKDWDPKKYGGFDSPTVAYSVLVVAKVEKGKSKKLKSVKELLGITIMERSSFEKNPIDFLEAKGYKEVKKDLIIKLPKYSLFELENGRKRMLASAGELQKGNELALPSKYVNFLYLASHYEKLKGSPEDNEQKQLFVEQHKHYLDEIIEQISEFSKRVILADANLDKVLSAYNKHRDKPIREQAENIIHLFTLTNLGAPAAFKYFDTTIDRKRYTSTKEVLDATLIHQSITGLYETRIDLSQLGGDGGEAAAKEAAAKEAAAKEAAAKEAAAKGGTLNIEDEYRLHETSKEPDVPLGSTWLSDFPQAWAETGGMGLAVRQAPLIIPLKATSTPVSIKQYPMSQEARLGIKPHIQRLLDQGILVPCQSPWNTPLLPVKKPGTNDYRPVQDLREVNKRVEDIHPTVPNPYNLLSGLPPSHQWYTVLDLKDAFFCLRLHPTSQPLFAFEWRDPEMGISGQLTWTRLPQGFKNSPTLFNEALHRDLADFRIQHPDLILLQYVDDLLLAATSEQDCQRGTRALLQTLGNLGYRASAKKAQICQKQVKYLGYLLKEGQRWLTEARKETVMGQPTPKTPRQLREFLGKAGFCRLFIPGFAEMAAPLYPLTKPGTLFNWGPDQQKAYQEIKQALLTAPALGLPDLTKPFELFVDEKQGYAKGVLTQKLGPWRRPVAYLSKKLDPVAAGWPPCLRMVAAIAVLTKDAGKLTMGQPLVILAPHAVEALVKQPPDRWLSNARMTHYQAMLLDTDRVQFGPVVALNPATLLPLPEKEAPHDCLEILAETHGTRPDLTDQPIPDADYTWYTDGSSFLQEGQRRAGAAVTTETEVIWARALPAGTSAQRAELIALTQALKMAEGKKLNVYTDSRYAFATAHVHGEIYRRRGWLTSEGREIKNKNEILALLKALFLPKRLSIIHCPGHQKGNSAEARGNRMADQAAREAAMKAVLETSTLLAGKRTADGSEFEKRTADGSEFESPKKKAKVE

SEQ ID NO: 1030 - protein, 2091 aa, synthetic construct
  source 1..2091: note = Description of Artificial Sequence: Synthetic polypeptide
MPAAKRVKLDGGDKKYSIGLDIGTNSVGWAVITDEYKVPSKKFKVLGNTDRHSIKKNLIGALLFDSGETAEATRLKRTARRRYTRRKNRICYLQEIFSNEMAKVDDSFFHRLEESFLVEEDKKHERHPIFGNIVDEVAYHEKYPTIYHLRKKLVDSTDKADLRLIYLALAHMIKFRGHFLIEGDLNPDNSDVDKLFIQLVQTYNQLFEENPINASGVDAKAILSARLSKSRRLENLIAQLPGEKKNGLFGNLIALSLGLTPNFKSNFDLAEDAKLQLSKDTYDDDLDNLLAQIGDQYADLFLAAKNLSDAILLSDILRVNTEITKAPLSASMIKRYDEHHQDLTLLKALVRQQLPEKYKEIFFDQSKNGYAGYIDGGASQEEFYKFIKPILEKMDGTEELLVKLNREDLLRKQRTFDNGSIPHQIHLGELHAILRRQEDFYPFLKDNREKIEKILTFRIPYYVGPLARGNSRFAWMTRKSEETITPWNFEEVVDKGASAQSFIERMTNFDKNLPNEKVLPKHSLLYEYFTVYNELTKVKYVTEGMRKPAFLSGEQKKAIVDLLFKTNRKVTVKQLKEDYFKKIECFDSVEISGVEDRFNASLGTYHDLLKIIKDKDFLDNEENEDILEDIVLTLTLFEDREMIEERLKTYAHLFDDKVMKQLKRRRYTGWGRLSRKLINGIRDKQSGKTILDFLKSDGFANRNFMQLIHDDSLTFKEDIQKAQVSGQGDSLHEHIANLAGSPAIKKGILQTVKVVDELVKVMGRHKPENIVIEMARENQTTQKGQKNSRERMKRIEEGIKELGSQILKEHPVENTQLQNEKLYLYYLQNGRDMYVDQELDINRLSDYDVDHIVPQSFLKDDSIDNKVLTRSDKARGKSDNVPSEEVVKKMKNYWRQLLNAKLITQRKFDNLTKAERGGLSELDKAGFIKRQLVETRQITKHVAQILDSRMNTKYDENDKLIREVKVITLKSKLVSDFRKDFQFYKVREINNYHHAHDAYLNAVVGTALIKKYPKLESEFVYGDYKVYDVRKMIAKSEQEIGKATAKYFFYSNIMNFFKTEITLANGEIRKRPLIETNGETGEIVWDKGRDFATVRKVLSMPQVNIVKKTEVQTGGFSKESILPKRNSDKLIARKKDWDPKKYGGFDSPTVAYSVLVVAKVEKGKSKKLKSVKELLGITIMERSSFEKNPIDFLEAKGYKEVKKDLIIKLPKYSLFELENGRKRMLASAGELQKGNELALPSKYVNFLYLASHYEKLKGSPEDNEQKQLFVEQHKHYLDEIIEQISEFSKRVILADANLDKVLSAYNKHRDKPIREQAENIIHLFTLTNLGAPAAFKYFDTTIDRKRYTSTKEVLDATLIHQSITGLYETRIDLSQLGGDGGPAPGGSGGTLNIEDEYRLHETSKEPDVPLGSTWLSDFPQAWAETGGMGLAVRQAPLIIPLKATSTPVSIKQYPMSQEARLGIKPHIQRLLDQGILVPCQSPWNTPLLPVKKPGTNDYRPVQDLREVNKRVEDIHPTVPNPYNLLSGLPPSHQWYTVLDLKDAFFCLRLHPTSQPLFAFEWRDPEMGISGQLTWTRLPQGFKNSPTLFNEALHRDLADFRIQHPDLILLQYVDDLLLAATSEQDCQRGTRALLQTLGNLGYRASAKKAQICQKQVKYLGYLLKEGQRWLTEARKETVMGQPTPKTPRQLREFLGKAGFCRLFIPGFAEMAAPLYPLTKPGTLFNWGPDQQKAYQEIKQALLTAPALGLPDLTKPFELFVDEKQGYAKGVLTQKLGPWRRPVAYLSKKLDPVAAGWPPCLRMVAAIAVLTKDAGKLTMGQPLVILAPHAVEALVKQPPDRWLSNARMTHYQAMLLDTDRVQFGPVVALNPATLLPLPEKEAPHDCLEILAETHGTRPDLTDQPIPDADYTWYTDGSSFLQEGQRRAGAAVTTETEVIWARALPAGTSAQRAELIALTQALKMAEGKKLNVYTDSRYAFATAHVHGEIYRRRGWLTSEGREIKNKNEILALLKALFLPKRLSIIHCPGHQKGNSAEARGNRMADQAAREAAMKAVLETSTLLAGKRTADGSEFEKRTADGSEFESPKKKAKVE

SEQ ID NO: 1031 - protein, 2091 aa, synthetic construct
  source 1..2091: note = Description of Artificial Sequence: Synthetic polypeptide
MPAAKRVKLDGGDKKYSIGLDIGTNSVGWAVITDEYKVPSKKFKVLGNTDRHSIKKNLIGALLFDSGETAEATRLKRTARRRYTRRKNRICYLQEIFSNEMAKVDDSFFHRLEESFLVEEDKKHERHPIFGNIVDEVAYHEKYPTIYHLRKKLVDSTDKADLRLIYLALAHMIKFRGHFLIEGDLNPDNSDVDKLFIQLVQTYNQLFEENPINASGVDAKAILSARLSKSRRLENLIAQLPGEKKNGLFGNLIALSLGLTPNFKSNFDLAEDAKLQLSKDTYDDDLDNLLAQIGDQYADLFLAAKNLSDAILLSDILRVNTEITKAPLSASMIKRYDEHHQDLTLLKALVRQQLPEKYKEIFFDQSKNGYAGYIDGGASQEEFYKFIKPILEKMDGTEELLVKLNREDLLRKQRTFDNGSIPHQIHLGELHAILRRQEDFYPFLKDNREKIEKILTFRIPYYVGPLARGNSRFAWMTRKSEETITPWNFEEVVDKGASAQSFIERMTNFDKNLPNEKVLPKHSLLYEYFTVYNELTKVKYVTEGMRKPAFLSGEQKKAIVDLLFKTNRKVTVKQLKEDYFKKIECFDSVEISGVEDRFNASLGTYHDLLKIIKDKDFLDNEENEDILEDIVLTLTLFEDREMIEERLKTYAHLFDDKVMKQLKRRRYTGWGRLSRKLINGIRDKQSGKTILDFLKSDGFANRNFMQLIHDDSLTFKEDIQKAQVSGQGDSLHEHIANLAGSPAIKKGILQTVKVVDELVKVMGRHKPENIVIEMARENQTTQKGQKNSRERMKRIEEGIKELGSQILKEHPVENTQLQNEKLYLYYLQNGRDMYVDQELDINRLSDYDVDHIVPQSFLKDDSIDNKVLTRSDKARGKSDNVPSEEVVKKMKNYWRQLLNAKLITQRKFDNLTKAERGGLSELDKAGFIKRQLVETRQITKHVAQILDSRMNTKYDENDKLIREVKVITLKSKLVSDFRKDFQFYKVREINNYHHAHDAYLNAVVGTALIKKYPKLESEFVYGDYKVYDVRKMIAKSEQEIGKATAKYFFYSNIMNFFKTEITLANGEIRKRPLIETNGETGEIVWDKGRDFATVRKVLSMPQVNIVKKTEVQTGGFSKESILPKRNSDKLIARKKDWDPKKYGGFDSPTVAYSVLVVAKVEKGKSKKLKSVKELLGITIMERSSFEKNPIDFLEAKGYKEVKKDLIIKLPKYSLFELENGRKRMLASAGELQKGNELALPSKYVNFLYLASHYEKLKGSPEDNEQKQLFVEQHKHYLDEIIEQISEFSKRVILADANLDKVLSAYNKHRDKPIREQAENIIHLFTLTNLGAPAAFKYFDTTIDRKRYTSTKEVLDATLIHQSITGLYETRIDLSQLGGDGGGGGGSSGGTLNIEDEYRLHETSKEPDVPLGSTWLSDFPQAWAETGGMGLAVRQAPLIIPLKATSTPVSIKQYPMSQEARLGIKPHIQRLLDQGILVPCQSPWNTPLLPVKKPGTNDYRPVQDLREVNKRVEDIHPTVPNPYNLLSGLPPSHQWYTVLDLKDAFFCLRLHPTSQPLFAFEWRDPEMGISGQLTWTRLPQGFKNSPTLFNEALHRDLADFRIQHPDLILLQYVDDLLLAATSEQDCQRGTRALLQTLGNLGYRASAKKAQICQKQVKYLGYLLKEGQRWLTEARKETVMGQPTPKTPRQLREFLGKAGFCRLFIPGFAEMAAPLYPLTKPGTLFNWGPDQQKAYQEIKQALLTAPALGLPDLTKPFELFVDEKQGYAKGVLTQKLGPWRRPVAYLSKKLDPVAAGWPPCLRMVAAIAVLTKDAGKLTMGQPLVILAPHAVEALVKQPPDRWLSNARMTHYQAMLLDTDRVQFGPVVALNPATLLPLPEKEAPHDCLEILAETHGTRPDLTDQPIPDADYTWYTDGSSFLQEGQRRAGAAVTTETEVIWARALPAGTSAQRAELIALTQALKMAEGKKLNVYTDSRYAFATAHVHGEIYRRRGWLTSEGREIKNKNEILALLKALFLPKRLSIIHCPGHQKGNSAEARGNRMADQAAREAAMKAVLETSTLLAGKRTADGSEFEKRTADGSEFESPKKKAKVE

SEQ ID NO: 1032 - protein, 2094 aa, synthetic construct
  source 1..2094: note = Description of Artificial Sequence: Synthetic polypeptide
MPAAKRVKLDGGDKKYSIGLDIGTNSVGWAVITDEYKVPSKKFKVLGNTDRHSIKKNLIGALLFDSGETAEATRLKRTARRRYTRRKNRICYLQEIFSNEMAKVDDSFFHRLEESFLVEEDKKHERHPIFGNIVDEVAYHEKYPTIYHLRKKLVDSTDKADLRLIYLALAHMIKFRGHFLIEGDLNPDNSDVDKLFIQLVQTYNQLFEENPINASGVDAKAILSARLSKSRRLENLIAQLPGEKKNGLFGNLIALSLGLTPNFKSNFDLAEDAKLQLSKDTYDDDLDNLLAQIGDQYADLFLAAKNLSDAILLSDILRVNTEITKAPLSASMIKRYDEHHQDLTLLKALVRQQLPEKYKEIFFDQSKNGYAGYIDGGASQEEFYKFIKPILEKMDGTEELLVKLNREDLLRKQRTFDNGSIPHQIHLGELHAILRRQEDFYPFLKDNREKIEKILTFRIPYYVGPLARGNSRFAWMTRKSEETITPWNFEEVVDKGASAQSFIERMTNFDKNLPNEKVLPKHSLLYEYFTVYNELTKVKYVTEGMRKPAFLSGEQKKAIVDLLFKTNRKVTVKQLKEDYFKKIECFDSVEISGVEDRFNASLGTYHDLLKIIKDKDFLDNEENEDILEDIVLTLTLFEDREMIEERLKTYAHLFDDKVMKQLKRRRYTGWGRLSRKLINGIRDKQSGKTILDFLKSDGFANRNFMQLIHDDSLTFKEDIQKAQVSGQGDSLHEHIANLAGSPAIKKGILQTVKVVDELVKVMGRHKPENIVIEMARENQTTQKGQKNSRERMKRIEEGIKELGSQILKEHPVENTQLQNEKLYLYYLQNGRDMYVDQELDINRLSDYDVDHIVPQSFLKDDSIDNKVLTRSDKARGKSDNVPSEEVVKKMKNYWRQLLNAKLITQRKFDNLTKAERGGLSELDKAGFIKRQLVETRQITKHVAQILDSRMNTKYDENDKLIREVKVITLKSKLVSDFRKDFQFYKVREINNYHHAHDAYLNAVVGTALIKKYPKLESEFVYGDYKVYDVRKMIAKSEQEIGKATAKYFFYSNIMNFFKTEITLANGEIRKRPLIETNGETGEIVWDKGRDFATVRKVLSMPQVNIVKKTEVQTGGFSKESILPKRNSDKLIARKKDWDPKKYGGFDSPTVAYSVLVVAKVEKGKSKKLKSVKELLGITIMERSSFEKNPIDFLEAKGYKEVKKDLIIKLPKYSLFELENGRKRMLASAGELQKGNELALPSKYVNFLYLASHYEKLKGSPEDNEQKQLFVEQHKHYLDEIIEQISEFSKRVILADANLDKVLSAYNKHRDKPIREQAENIIHLFTLTNLGAPAAFKYFDTTIDRKRYTSTKEVLDATLIHQSITGLYETRIDLSQLGGDGGPAPAPAPAPGGTLNIEDEYRLHETSKEPDVPLGSTWLSDFPQAWAETGGMGLAVRQAPLIIPLKATSTPVSIKQYPMSQEARLGIKPHIQRLLDQGILVPCQSPWNTPLLPVKKPGTNDYRPVQDLREVNKRVEDIHPTVPNPYNLLSGLPPSHQWYTVLDLKDAFFCLRLHPTSQPLFAFEWRDPEMGISGQLTWTRLPQGFKNSPTLFNEALHRDLADFRIQHPDLILLQYVDDLLLAATSEQDCQRGTRALLQTLGNLGYRASAKKAQICQKQVKYLGYLLKEGQRWLTEARKETVMGQPTPKTPRQLREFLGKAGFCRLFIPGFAEMAAPLYPLTKPGTLFNWGPDQQKAYQEIKQALLTAPALGLPDLTKPFELFVDEKQGYAKGVLTQKLGPWRRPVAYLSKKLDPVAAGWPPCLRMVAAIAVLTKDAGKLTMGQPLVILAPHAVEALVKQPPDRWLSNARMTHYQAMLLDTDRVQFGPVVALNPATLLPLPEKEAPHDCLEILAETHGTRPDLTDQPIPDADYTWYTDGSSFLQEGQRRAGAAVTTETEVIWARALPAGTSAQRAELIALTQALKMAEGKKLNVYTDSRYAFATAHVHGEIYRRRGWLTSEGREIKNKNEILALLKALFLPKRLSIIHCPGHQKGNSAEARGNRMADQAAREAAMKAVLETSTLLAGKRTADGSEFEKRTADGSEFESPKKKAKVE

SEQ ID NO: 1033 - protein, 2094 aa, synthetic construct
  source 1..2094: note = Description of Artificial Sequence: Synthetic polypeptide
MPAAKRVKLDGGDKKYSIGLDIGTNSVGWAVITDEYKVPSKKFKVLGNTDRHSIKKNLIGALLFDSGETAEATRLKRTARRRYTRRKNRICYLQEIFSNEMAKVDDSFFHRLEESFLVEEDKKHERHPIFGNIVDEVAYHEKYPTIYHLRKKLVDSTDKADLRLIYLALAHMIKFRGHFLIEGDLNPDNSDVDKLFIQLVQTYNQLFEENPINASGVDAKAILSARLSKSRRLENLIAQLPGEKKNGLFGNLIALSLGLTPNFKSNFDLAEDAKLQLSKDTYDDDLDNLLAQIGDQYADLFLAAKNLSDAILLSDILRVNTEITKAPLSASMIKRYDEHHQDLTLLKALVRQQLPEKYKEIFFDQSKNGYAGYIDGGASQEEFYKFIKPILEKMDGTEELLVKLNREDLLRKQRTFDNGSIPHQIHLGELHAILRRQEDFYPFLKDNREKIEKILTFRIPYYVGPLARGNSRFAWMTRKSEETITPWNFEEVVDKGASAQSFIERMTNFDKNLPNEKVLPKHSLLYEYFTVYNELTKVKYVTEGMRKPAFLSGEQKKAIVDLLFKTNRKVTVKQLKEDYFKKIECFDSVEISGVEDRFNASLGTYHDLLKIIKDKDFLDNEENEDILEDIVLTLTLFEDREMIEERLKTYAHLFDDKVMKQLKRRRYTGWGRLSRKLINGIRDKQSGKTILDFLKSDGFANRNFMQLIHDDSLTFKEDIQKAQVSGQGDSLHEHIANLAGSPAIKKGILQTVKVVDELVKVMGRHKPENIVIEMARENQTTQKGQKNSRERMKRIEEGIKELGSQILKEHPVENTQLQNEKLYLYYLQNGRDMYVDQELDINRLSDYDVDHIVPQSFLKDDSIDNKVLTRSDKARGKSDNVPSEEVVKKMKNYWRQLLNAKLITQRKFDNLTKAERGGLSELDKAGFIKRQLVETRQITKHVAQILDSRMNTKYDENDKLIREVKVITLKSKLVSDFRKDFQFYKVREINNYHHAHDAYLNAVVGTALIKKYPKLESEFVYGDYKVYDVRKMIAKSEQEIGKATAKYFFYSNIMNFFKTEITLANGEIRKRPLIETNGETGEIVWDKGRDFATVRKVLSMPQVNIVKKTEVQTGGFSKESILPKRNSDKLIARKKDWDPKKYGGFDSPTVAYSVLVVAKVEKGKSKKLKSVKELLGITIMERSSFEKNPIDFLEAKGYKEVKKDLIIKLPKYSLFELENGRKRMLASAGELQKGNELALPSKYVNFLYLASHYEKLKGSPEDNEQKQLFVEQHKHYLDEIIEQISEFSKRVILADANLDKVLSAYNKHRDKPIREQAENIIHLFTLTNLGAPAAFKYFDTTIDRKRYTSTKEVLDATLIHQSITGLYETRIDLSQLGGDGGPAPGSSGGGGGTLNIEDEYRLHETSKEPDVPLGSTWLSDFPQAWAETGGMGLAVRQAPLIIPLKATSTPVSIKQYPMSQEARLGIKPHIQRLLDQGILVPCQSPWNTPLLPVKKPGTNDYRPVQDLREVNKRVEDIHPTVPNPYNLLSGLPPSHQWYTVLDLKDAFFCLRLHPTSQPLFAFEWRDPEMGISGQLTWTRLPQGFKNSPTLFNEALHRDLADFRIQHPDLILLQYVDDLLLAATSEQDCQRGTRALLQTLGNLGYRASAKKAQICQKQVKYLGYLLKEGQRWLTEARKETVMGQPTPKTPRQLREFLGKAGFCRLFIPGFAEMAAPLYPLTKPGTLFNWGPDQQKAYQEIKQALLTAPALGLPDLTKPFELFVDEKQGYAKGVLTQKLGPWRRPVAYLSKKLDPVAAGWPPCLRMVAAIAVLTKDAGKLTMGQPLVILAPHAVEALVKQPPDRWLSNARMTHYQAMLLDTDRVQFGPVVALNPATLLPLPEKEAPHDCLEILAETHGTRPDLTDQPIPDADYTWYTDGSSFLQEGQRRAGAAVTTETEVIWARALPAGTSAQRAELIALTQALKMAEGKKLNVYTDSRYAFATAHVHGEIYRRRGWLTSEGREIKNKNEILALLKALFLPKRLSIIHCPGHQKGNSAEARGNRMADQAAREAAMKAVLETSTLLAGKRTADGSEFEKRTADGSEFESPKKKAKVE

SEQ ID NO: 1034 - protein, 2096 aa, synthetic construct
  source 1..2096: note = Description of Artificial Sequence: Synthetic polypeptide
MPAAKRVKLDGGDKKYSIGLDIGTNSVGWAVITDEYKVPSKKFKVLGNTDRHSIKKNLIGALLFDSGETAEATRLKRTARRRYTRRKNRICYLQEIFSNEMAKVDDSFFHRLEESFLVEEDKKHERHPIFGNIVDEVAYHEKYPTIYHLRKKLVDSTDKADLRLIYLALAHMIKFRGHFLIEGDLNPDNSDVDKLFIQLVQTYNQLFEENPINASGVDAKAILSARLSKSRRLENLIAQLPGEKKNGLFGNLIALSLGLTPNFKSNFDLAEDAKLQLSKDTYDDDLDNLLAQIGDQYADLFLAAKNLSDAILLSDILRVNTEITKAPLSASMIKRYDEHHQDLTLLKALVRQQLPEKYKEIFFDQSKNGYAGYIDGGASQEEFYKFIKPILEKMDGTEELLVKLNREDLLRKQRTFDNGSIPHQIHLGELHAILRRQEDFYPFLKDNREKIEKILTFRIPYYVGPLARGNSRFAWMTRKSEETITPWNFEEVVDKGASAQSFIERMTNFDKNLPNEKVLPKHSLLYEYFTVYNELTKVKYVTEGMRKPAFLSGEQKKAIVDLLFKTNRKVTVKQLKEDYFKKIECFDSVEISGVEDRFNASLGTYHDLLKIIKDKDFLDNEENEDILEDIVLTLTLFEDREMIEERLKTYAHLFDDKVMKQLKRRRYTGWGRLSRKLINGIRDKQSGKTILDFLKSDGFANRNFMQLIHDDSLTFKEDIQKAQVSGQGDSLHEHIANLAGSPAIKKGILQTVKVVDELVKVMGRHKPENIVIEMARENQTTQKGQKNSRERMKRIEEGIKELGSQILKEHPVENTQLQNEKLYLYYLQNGRDMYVDQELDINRLSDYDVDHIVPQSFLKDDSIDNKVLTRSDKARGKSDNVPSEEVVKKMKNYWRQLLNAKLITQRKFDNLTKAERGGLSELDKAGFIKRQLVETRQITKHVAQILDSRMNTKYDENDKLIREVKVITLKSKLVSDFRKDFQFYKVREINNYHHAHDAYLNAVVGTALIKKYPKLESEFVYGDYKVYDVRKMIAKSEQEIGKATAKYFFYSNIMNFFKTEITLANGEIRKRPLIETNGETGEIVWDKGRDFATVRKVLSMPQVNIVKKTEVQTGGFSKESILPKRNSDKLIARKKDWDPKKYGGFDSPTVAYSVLVVAKVEKGKSKKLKSVKELLGITIMERSSFEKNPIDFLEAKGYKEVKKDLIIKLPKYSLFELENGRKRMLASAGELQKGNELALPSKYVNFLYLASHYEKLKGSPEDNEQKQLFVEQHKHYLDEIIEQISEFSKRVILADANLDKVLSAYNKHRDKPIREQAENIIHLFTLTNLGAPAAFKYFDTTIDRKRYTSTKEVLDATLIHQSITGLYETRIDLSQLGGDGGPAPGGSEAAAKGGTLNIEDEYRLHETSKEPDVPLGSTWLSDFPQAWAETGGMGLAVRQAPLIIPLKATSTPVSIKQYPMSQEARLGIKPHIQRLLDQGILVPCQSPWNTPLLPVKKPGTNDYRPVQDLREVNKRVEDIHPTVPNPYNLLSGLPPSHQWYTVLDLKDAFFCLRLHPTSQPLFAFEWRDPEMGISGQLTWTRLPQGFKNSPTLFNEALHRDLADFRIQHPDLILLQYVDDLLLAATSEQDCQRGTRALLQTLGNLGYRASAKKAQICQKQVKYLGYLLKEGQRWLTEARKETVMGQPTPKTPRQLREFLGKAGFCRLFIPGFAEMAAPLYPLTKPGTLFNWGPDQQKAYQEIKQALLTAPALGLPDLTKPFELFVDEKQGYAKGVLTQKLGPWRRPVAYLSKKLDPVAAGWPPCLRMVAAIAVLTKDAGKLTMGQPLVILAPHAVEALVKQPPDRWLSNARMTHYQAMLLDTDRVQFGPVVALNPATLLPLPEKEAPHDCLEILAETHGTRPDLTDQPIPDADYTWYTDGSSFLQEGQRRAGAAVTTETEVIWARALPAGTSAQRAELIALTQALKMAEGKKLNVYTDSRYAFATAHVHGEIYRRRGWLTSEGREIKNKNEILALLKALFLPKRLSIIHCPGHQKGNSAEARGNRMADQAAREAAMKAVLETSTLLAGKRTADGSEFEKRTADGSEFESPKKKAKVE

SEQ ID NO: 1035 - protein, 2096 aa, synthetic construct
  source 1..2096: note = Description of Artificial Sequence: Synthetic polypeptide
MPAAKRVKLDGGDKKYSIGLDIGTNSVGWAVITDEYKVPSKKFKVLGNTDRHSIKKNLIGALLFDSGETAEATRLKRTARRRYTRRKNRICYLQEIFSNEMAKVDDSFFHRLEESFLVEEDKKHERHPIFGNIVDEVAYHEKYPTIYHLRKKLVDSTDKADLRLIYLALAHMIKFRGHFLIEGDLNPDNSDVDKLFIQLVQTYNQLFEENPINASGVDAKAILSARLSKSRRLENLIAQLPGEKKNGLFGNLIALSLGLTPNFKSNFDLAEDAKLQLSKDTYDDDLDNLLAQIGDQYADLFLAAKNLSDAILLSDILRVNTEITKAPLSASMIKRYDEHHQDLTLLKALVRQQLPEKYKEIFFDQSKNGYAGYIDGGASQEEFYKFIKPILEKMDGTEELLVKLNREDLLRKQRTFDNGSIPHQIHLGELHAILRRQEDFYPFLKDNREKIEKILTFRIPYYVGPLARGNSRFAWMTRKSEETITPWNFEEVVDKGASAQSFIERMTNFDKNLPNEKVLPKHSLLYEYFTVYNELTKVKYVTEGMRKPAFLSGEQKKAIVDLLFKTNRKVTVKQLKEDYFKKIECFDSVEISGVEDRFNASLGTYHDLLKIIKDKDFLDNEENEDILEDIVLTLTLFEDREMIEERLKTYAHLFDDKVMKQLKRRRYTGWGRLSRKLINGIRDKQSGKTILDFLKSDGFANRNFMQLIHDDSLTFKEDIQKAQVSGQGDSLHEHIANLAGSPAIKKGILQTVKVVDELVKVMGRHKPENIVIEMARENQTTQKGQKNSRERMKRIEEGIKELGSQILKEHPVENTQLQNEKLYLYYLQNGRDMYVDQELDINRLSDYDVDHIVPQSFLKDDSIDNKVLTRSDKARGKSDNVPSEEVVKKMKNYWRQLLNAKLITQRKFDNLTKAERGGLSELDKAGFIKRQLVETRQITKHVAQILDSRMNTKYDENDKLIREVKVITLKSKLVSDFRKDFQFYKVREINNYHHAHDAYLNAVVGTALIKKYPKLESEFVYGDYKVYDVRKMIAKSEQEIGKATAKYFFYSNIMNFFKTEITLANGEIRKRPLIETNGETGEIVWDKGRDFATVRKVLSMPQVNIVKKTEVQTGGFSKESILPKRNSDKLIARKKDWDPKKYGGFDSPTVAYSVLVVAKVEKGKSKKLKSVKELLGITIMERSSFEKNPIDFLEAKGYKEVKKDLIIKLPKYSLFELENGRKRMLASAGELQKGNELALPSKYVNFLYLASHYEKLKGSPEDNEQKQLFVEQHKHYLDEIIEQISEFSKRVILADANLDKVLSAYNKHRDKPIREQAENIIHLFTLTNLGAPAAFKYFDTTIDRKRYTSTKEVLDATLIHQSITGLYETRIDLSQLGGDGGGGSEAAAKPAPGGTLNIEDEYRLHETSKEPDVPLGSTWLSDFPQAWAETGGMGLAVRQAPLIIPLKATSTPVSIKQYPMSQEARLGIKPHIQRLLDQGILVPCQSPWNTPLLPVKKPGTNDYRPVQDLREVNKRVEDIHPTVPNPYNLLSGLPPSHQWYTVLDLKDAFFCLRLHPTSQPLFAFEWRDPEMGISGQLTWTRLPQGFKNSPTLFNEALHRDLADFRIQHPDLILLQYVDDLLLAATSEQDCQRGTRALLQTLGNLGYRASAKKAQICQKQVKYLGYLLKEGQRWLTEARKETVMGQPTPKTPRQLREFLGKAGFCRLFIPGFAEMAAPLYPLTKPGTLFNWGPDQQKAYQEIKQALLTAPALGLPDLTKPFELFVDEKQGYAKGVLTQKLGPWRRPVAYLSKKLDPVAAGWPPCLRMVAAIAVLTKDAGKLTMGQPLVILAPHAVEALVKQPPDRWLSNARMTHYQAMLLDTDRVQFGPVVALNPATLLPLPEKEAPHDCLEILAETHGTRPDLTDQPIPDADYTWYTDGSSFLQEGQRRAGAAVTTETEVIWARALPAGTSAQRAELIALTQALKMAEGKKLNVYTDSRYAFATAHVHGEIYRRRGWLTSEGREIKNKNEILALLKALFLPKRLSIIHCPGHQKGNSAEARGNRMADQAAREAAMKAVLETSTLLAGKRTADGSEFEKRTADGSEFESPKKKAKVE

SEQ ID NO: 1036 - protein, 2118 aa, synthetic construct
  source 1..2118: note = Description of Artificial Sequence: Synthetic polypeptide
MPAAKRVKLDGGDKKYSIGLDIGTNSVGWAVITDEYKVPSKKFKVLGNTDRHSIKKNLIGALLFDSGETAEATRLKRTARRRYTRRKNRICYLQEIFSNEMAKVDDSFFHRLEESFLVEEDKKHERHPIFGNIVDEVAYHEKYPTIYHLRKKLVDSTDKADLRLIYLALAHMIKFRGHFLIEGDLNPDNSDVDKLFIQLVQTYNQLFEENPINASGVDAKAILSARLSKSRRLENLIAQLPGEKKNGLFGNLIALSLGLTPNFKSNFDLAEDAKLQLSKDTYDDDLDNLLAQIGDQYADLFLAAKNLSDAILLSDILRVNTEITKAPLSASMIKRYDEHHQDLTLLKALVRQQLPEKYKEIFFDQSKNGYAGYIDGGASQEEFYKFIKPILEKMDGTEELLVKLNREDLLRKQRTFDNGSIPHQIHLGELHAILRRQEDFYPFLKDNREKIEKILTFRIPYYVGPLARGNSRFAWMTRKSEETITPWNFEEVVDKGASAQSFIERMTNFDKNLPNEKVLPKHSLLYEYFTVYNELTKVKYVTEGMRKPAFLSGEQKKAIVDLLFKTNRKVTVKQLKEDYFKKIECFDSVEISGVEDRFNASLGTYHDLLKIIKDKDFLDNEENEDILEDIVLTLTLFEDREMIEERLKTYAHLFDDKVMKQLKRRRYTGWGRLSRKLINGIRDKQSGKTILDFLKSDGFANRNFMQLIHDDSLTFKEDIQKAQVSGQGDSLHEHIANLAGSPAIKKGILQTVKVVDELVKVMGRHKPENIVIEMARENQTTQKGQKNSRERMKRIEEGIKELGSQILKEHPVENTQLQNEKLYLYYLQNGRDMYVDQELDINRLSDYDVDHIVPQSFLKDDSIDNKVLTRSDKARGKSDNVPSEEVVKKMKNYWRQLLNAKLITQRKFDNLTKAERGGLSELDKAGFIKRQLVETRQITKHVAQILDSRMNTKYDENDKLIREVKVITLKSKLVSDFRKDFQFYKVREINNYHHAHDAYLNAVVGTALIKKYPKLESEFVYGDYKVYDVRKMIAKSEQEIGKATAKYFFYSNIMNFFKTEITLANGEIRKRPLIETNGETGEIVWDKGRDFATVRKVLSMPQVNIVKKTEVQTGGFSKESILPKRNSDKLIARKKDWDPKKYGGFDSPTVAYSVLVVAKVEKGKSKKLKSVKELLGITIMERSSFEKNPIDFLEAKGYKEVKKDLIIKLPKYSLFELENGRKRMLASAGELQKGNELALPSKYVNFLYLASHYEKLKGSPEDNEQKQLFVEQHKHYLDEIIEQISEFSKRVILADANLDKVLSAYNKHRDKPIREQAENIIHLFTLTNLGAPAAFKYFDTTIDRKRYTSTKEVLDATLIHQSITGLYETRIDLSQLGGDGGSGGSSGGSSGSETPGTSESATPESSGGSSGGSSGGTLNIEDEYRLHETSKEPDVPLGSTWLSDFPQAWAETGGMGLAVRQAPLIIPLKATSTPVSIKQYPMSQEARLGIKPHIQRLLDQGILVPCQSPWNTPLLPVKKPGTNDYRPVQDLREVNKRVEDIHPTVPNPYNLLSGLPPSHQWYTVLDLKDAFFCLRLHPTSQPLFAFEWRDPEMGISGQLTWTRLPQGFKNSPTLFNEALHRDLADFRIQHPDLILLQYVDDLLLAATSEQDCQRGTRALLQTLGNLGYRASAKKAQICQKQVKYLGYLLKEGQRWLTEARKETVMGQPTPKTPRQLREFLGKAGFCRLFIPGFAEMAAPLYPLTKPGTLFNWGPDQQKAYQEIKQALLTAPALGLPDLTKPFELFVDEKQGYAKGVLTQKLGPWRRPVAYLSKKLDPVAAGWPPCLRMVAAIAVLTKDAGKLTMGQPLVILAPHAVEALVKQPPDRWLSNARMTHYQAMLLDTDRVQFGPVVALNPATLLPLPEKEAPHDCLEILAETHGTRPDLTDQPIPDADYTWYTDGSSFLQEGQRRAGAAVTTETEVIWARALPAGTSAQRAELIALTQALKMAEGKKLNVYTDSRYAFATAHVHGEIYRRRGWLTSEGREIKNKNEILALLKALFLPKRLSIIHCPGHQKGNSAEARGNRMADQAAREAAMKAVLETSTLLAGKRTADGSEFEKRTADGSEFESPKKKAKVE

SEQ ID NO: 1037 - protein, 2100 aa, synthetic construct
  source 1..2100: note = Description of Artificial Sequence: Synthetic polypeptide
MPAAKRVKLDGGDKKYSIGLDIGTNSVGWAVITDEYKVPSKKFKVLGNTDRHSIKKNLIGALLFDSGETAEATRLKRTARRRYTRRKNRICYLQEIFSNEMAKVDDSFFHRLEESFLVEEDKKHERHPIFGNIVDEVAYHEKYPTIYHLRKKLVDSTDKADLRLIYLALAHMIKFRGHFLIEGDLNPDNSDVDKLFIQLVQTYNQLFEENPINASGVDAKAILSARLSKSRRLENLIAQLPGEKKNGLFGNLIALSLGLTPNFKSNFDLAEDAKLQLSKDTYDDDLDNLLAQIGDQYADLFLAAKNLSDAILLSDILRVNTEITKAPLSASMIKRYDEHHQDLTLLKALVRQQLPEKYKEIFFDQSKNGYAGYIDGGASQEEFYKFIKPILEKMDGTEELLVKLNREDLLRKQRTFDNGSIPHQIHLGELHAILRRQEDFYPFLKDNREKIEKILTFRIPYYVGPLARGNSRFAWMTRKSEETITPWNFEEVVDKGASAQSFIERMTNFDKNLPNEKVLPKHSLLYEYFTVYNELTKVKYVTEGMRKPAFLSGEQKKAIVDLLFKTNRKVTVKQLKEDYFKKIECFDSVEISGVEDRFNASLGTYHDLLKIIKDKDFLDNEENEDILEDIVLTLTLFEDREMIEERLKTYAHLFDDKVMKQLKRRRYTGWGRLSRKLINGIRDKQSGKTILDFLKSDGFANRNFMQLIHDDSLTFKEDIQKAQVSGQGDSLHEHIANLAGSPAIKKGILQTVKVVDELVKVMGRHKPENIVIEMARENQTTQKGQKNSRERMKRIEEGIKELGSQILKEHPVENTQLQNEKLYLYYLQNGRDMYVDQELDINRLSDYDVDHIVPQSFLKDDSIDNKVLTRSDKARGKSDNVPSEEVVKKMKNYWRQLLNAKLITQRKFDNLTKAERGGLSELDKAGFIKRQLVETRQITKHVAQILDSRMNTKYDENDKLIREVKVITLKSKLVSDFRKDFQFYKVREINNYHHAHDAYLNAVVGTALIKKYPKLESEFVYGDYKVYDVRKMIAKSEQEIGKATAKYFFYSNIMNFFKTEITLANGEIRKRPLIETNGETGEIVWDKGRDFATVRKVLSMPQVNIVKKTEVQTGGFSKESILPKRNSDKLIARKKDWDPKKYGGFDSPTVAYSVLVVAKVEKGKSKKLKSVKELLGITIMERSSFEKNPIDFLEAKGYKEVKKDLIIKLPKYSLFELENGRKRMLASAGELQKGNELALPSKYVNFLYLASHYEKLKGSPEDNEQKQLFVEQHKHYLDEIIEQISEFSKRVILADANLDKVLSAYNKHRDKPIREQAENIIHLFTLTNLGAPAAFKYFDTTIDRKRYTSTKEVLDATLIHQSITGLYETRIDLSQLGGDGGEAAAKGGGGSEAAAKGGTLNIEDEYRLHETSKEPDVPLGSTWLSDFPQAWAETGGMGLAVRQAPLIIPLKATSTPVSIKQYPMSQEARLGIKPHIQRLLDQGILVPCQSPWNTPLLPVKKPGTNDYRPVQDLREVNKRVEDIHPTVPNPYNLLSGLPPSHQWYTVLDLKDAFFCLRLHPTSQPLFAFEWRDPEMGISGQLTWTRLPQGFKNSPTLFNEALHRDLADFRIQHPDLILLQYVDDLLLAATSEQDCQRGTRALLQTLGNLGYRASAKKAQICQKQVKYLGYLLKEGQRWLTEARKETVMGQPTPKTPRQLREFLGKAGFCRLFIPGFAEMAAPLYPLTKPGTLFNWGPDQQKAYQEIKQALLTAPALGLPDLTKPFELFVDEKQGYAKGVLTQKLGPWRRPVAYLSKKLDPVAAGWPPCLRMVAAIAVLTKDAGKLTMGQPLVILAPHAVEALVKQPPDRWLSNARMTHYQAMLLDTDRVQFGPVVALNPATLLPLPEKEAPHDCLEILAETHGTRPDLTDQPIPDADYTWYTDGSSFLQEGQRRAGAAVTTETEVIWARALPAGTSAQRAELIALTQALKMAEGKKLNVYTDSRYAFATAHVHGEIYRRRGWLTSEGREIKNKNEILALLKALFLPKRLSIIHCPGHQKGNSAEARGNRMADQAAREAAMKAVLETSTLLAGKRTADGSEFEKRTADGSEFESPKKKAKVE

SEQ ID NO: 1038 - protein, 2094 aa, synthetic construct
  source 1..2094: note = Description of Artificial Sequence: Synthetic polypeptide
MPAAKRVKLDGGDKKYSIGLDIGTNSVGWAVITDEYKVPSKKFKVLGNTDRHSIKKNLIGALLFDSGETAEATRLKRTARRRYTRRKNRICYLQEIFSNEMAKVDDSFFHRLEESFLVEEDKKHERHPIFGNIVDEVAYHEKYPTIYHLRKKLVDSTDKADLRLIYLALAHMIKFRGHFLIEGDLNPDNSDVDKLFIQLVQTYNQLFEENPINASGVDAKAILSARLSKSRRLENLIAQLPGEKKNGLFGNLIALSLGLTPNFKSNFDLAEDAKLQLSKDTYDDDLDNLLAQIGDQYADLFLAAKNLSDAILLSDILRVNTEITKAPLSASMIKRYDEHHQDLTLLKALVRQQLPEKYKEIFFDQSKNGYAGYIDGGASQEEFYKFIKPILEKMDGTEELLVKLNREDLLRKQRTFDNGSIPHQIHLGELHAILRRQEDFYPFLKDNREKIEKILTFRIPYYVGPLARGNSRFAWMTRKSEETITPWNFEEVVDKGASAQSFIERMTNFDKNLPNEKVLPKHSLLYEYFTVYNELTKVKYVTEGMRKPAFLSGEQKKAIVDLLFKTNRKVTVKQLKEDYFKKIECFDSVEISGVEDRFNASLGTYHDLLKIIKDKDFLDNEENEDILEDIVLTLTLFEDREMIEERLKTYAHLFDDKVMKQLKRRRYTGWGRLSRKLINGIRDKQSGKTILDFLKSDGFANRNFMQLIHDDSLTFKEDIQKAQVSGQGDSLHEHIANLAGSPAIKKGILQTVKVVDELVKVMGRHKPENIVIEMARENQTTQKGQKNSRERMKRIEEGIKELGSQILKEHPVENTQLQNEKLYLYYLQNGRDMYVDQELDINRLSDYDVDHIVPQSFLKDDSIDNKVLTRSDKARGKSDNVPSEEVVKKMKNYWRQLLNAKLITQRKFDNLTKAERGGLSELDKAGFIKRQLVETRQITKHVAQILDSRMNTKYDENDKLIREVKVITLKSKLVSDFRKDFQFYKVREINNYHHAHDAYLNAVVGTALIKKYPKLESEFVYGDYKVYDVRKMIAKSEQEIGKATAKYFFYSNIMNFFKTEITLANGEIRKRPLIETNGETGEIVWDKGRDFATVRKVLSMPQVNIVKKTEVQTGGFSKESILPKRNSDKLIARKKDWDPKKYGGFDSPTVAYSVLVVAKVEKGKSKKLKSVKELLGITIMERSSFEKNPIDFLEAKGYKEVKKDLIIKLPKYSLFELENGRKRMLASAGELQKGNELALPSKYVNFLYLASHYEKLKGSPEDNEQKQLFVEQHKHYLDEIIEQISEFSKRVILADANLDKVLSAYNKHRDKPIREQAENIIHLFTLTNLGAPAAFKYFDTTIDRKRYTSTKEVLDATLIHQSITGLYETRIDLSQLGGDGGGSSPAPGGGGGTLNIEDEYRLHETSKEPDVPLGSTWLSDFPQAWAETGGMGLAVRQAPLIIPLKATSTPVSIKQYPMSQEARLGIKPHIQRLLDQGILVPCQSPWNTPLLPVKKPGTNDYRPVQDLREVNKRVEDIHPTVPNPYNLLSGLPPSHQWYTVLDLKDAFFCLRLHPTSQPLFAFEWRDPEMGISGQLTWTRLPQGFKNSPTLFNEALHRDLADFRIQHPDLILLQYVDDLLLAATSEQDCQRGTRALLQTLGNLGYRASAKKAQICQKQVKYLGYLLKEGQRWLTEARKETVMGQPTPKTPRQLREFLGKAGFCRLFIPGFAEMAAPLYPLTKPGTLFNWGPDQQKAYQEIKQALLTAPALGLPDLTKPFELFVDEKQGYAKGVLTQKLGPWRRPVAYLSKKLDPVAAGWPPCLRMVAAIAVLTKDAGKLTMGQPLVILAPHAVEALVKQPPDRWLSNARMTHYQAMLLDTDRVQFGPVVALNPATLLPLPEKEAPHDCLEILAETHGTRPDLTDQPIPDADYTWYTDGSSFLQEGQRRAGAAVTTETEVIWARALPAGTSAQRAELIALTQALKMAEGKKLNVYTDSRYAFATAHVHGEIYRRRGWLTSEGREIKNKNEILALLKALFLPKRLSIIHCPGHQKGNSAEARGNRMADQAAREAAMKAVLETSTLLAGKRTADGSEFEKRTADGSEFESPKKKAKVE

SEQ ID NO: 1039 - protein, 2096 aa, synthetic construct
  source 1..2096: note = Description of Artificial Sequence: Synthetic polypeptide
MPAAKRVKLDGGDKKYSIGLDIGTNSVGWAVITDEYKVPSKKFKVLGNTDRHSIKKNLIGALLFDSGETAEATRLKRTARRRYTRRKNRICYLQEIFSNEMAKVDDSFFHRLEESFLVEEDKKHERHPIFGNIVDEVAYHEKYPTIYHLRKKLVDSTDKADLRLIYLALAHMIKFRGHFLIEGDLNPDNSDVDKLFIQLVQTYNQLFEENPINASGVDAKAILSARLSKSRRLENLIAQLPGEKKNGLFGNLIALSLGLTPNFKSNFDLAEDAKLQLSKDTYDDDLDNLLAQIGDQYADLFLAAKNLSDAILLSDILRVNTEITKAPLSASMIKRYDEHHQDLTLLKALVRQQLPEKYKEIFFDQSKNGYAGYIDGGASQEEFYKFIKPILEKMDGTEELLVKLNREDLLRKQRTFDNGSIPHQIHLGELHAILRRQEDFYPFLKDNREKIEKILTFRIPYYVGPLARGNSRFAWMTRKSEETITPWNFEEVVDKGASAQSFIERMTNFDKNLPNEKVLPKHSLLYEYFTVYNELTKVKYVTEGMRKPAFLSGEQKKAIVDLLFKTNRKVTVKQLKEDYFKKIECFDSVEISGVEDRFNASLGTYHDLLKIIKDKDFLDNEENEDILEDIVLTLTLFEDREMIEERLKTYAHLFDDKVMKQLKRRRYTGWGRLSRKLINGIRDKQSGKTILDFLKSDGFANRNFMQLIHDDSLTFKEDIQKAQVSGQGDSLHEHIANLAGSPAIKKGILQTVKVVDELVKVMGRHKPENIVIEMARENQTTQKGQKNSRERMKRIEEGIKELGSQILKEHPVENTQLQNEKLYLYYLQNGRDMYVDQELDINRLSDYDVDHIVPQSFLKDDSIDNKVLTRSDKARGKSDNVPSEEVVKKMKNYWRQLLNAKLITQRKFDNLTKAERGGLSELDKAGFIKRQLVETRQITKHVAQILDSRMNTKYDENDKLIREVKVITLKSKLVSDFRKDFQFYKVREINNYHHAHDAYLNAVVGTALIKKYPKLESEFVYGDYKVYDVRKMIAKSEQEIGKATAKYFFYSNIMNFFKTEITLANGEIRKRPLIETNGETGEIVWDKGRDFATVRKVLSMPQVNIVKKTEVQTGGFSKESILPKRNSDKLIARKKDWDPKKYGGFDSPTVAYSVLVVAKVEKGKSKKLKSVKELLGITIMERSSFEKNPIDFLEAKGYKEVKKDLIIKLPKYSLFELENGRKRMLASAGELQKGNELALPSKYVNFLYLASHYEKLKGSPEDNEQKQLFVEQHKHYLDEIIEQISEFSKRVILADANLDKVLSAYNKHRDKPIREQAENIIHLFTLTNLGAPAAFKYFDTTIDRKRYTSTKEVLDATLIHQSITGLYETRIDLSQLGGDGGEAAAKGSSPAPGGTLNIEDEYRLHETSKEPDVPLGSTWLSDFPQAWAETGGMGLAVRQAPLIIPLKATSTPVSIKQYPMSQEARLGIKPHIQRLLDQGILVPCQSPWNTPLLPVKKPGTNDYRPVQDLREVNKRVEDIHPTVPNPYNLLSGLPPSHQWYTVLDLKDAFFCLRLHPTSQPLFAFEWRDPEMGISGQLTWTRLPQGFKNSPTLFNEALHRDLADFRIQHPDLILLQYVDDLLLAATSEQDCQRGTRALLQTLGNLGYRASAKKAQICQKQVKYLGYLLKEGQRWLTEARKETVMGQPTPKTPRQLREFLGKAGFCRLFIPGFAEMAAPLYPLTKPGTLFNWGPDQQKAYQEIKQALLTAPALGLPDLTKPFELFVDEKQGYAKGVLTQKLGPWRRPVAYLSKKLDPVAAGWPPCLRMVAAIAVLTKDAGKLTMGQPLVILAPHAVEALVKQPPDRWLSNARMTHYQAMLLDTDRVQFGPVVALNPATLLPLPEKEAPHDCLEILAETHGTRPDLTDQPIPDADYTWYTDGSSFLQEGQRRAGAAVTTETEVIWARALPAGTSAQRAELIALTQALKMAEGKKLNVYTDSRYAFATAHVHGEIYRRRGWLTSEGREIKNKNEILALLKALFLPKRLSIIHCPGHQKGNSAEARGNRMADQAAREAAMKAVLETSTLLAGKRTADGSEFEKRTADGSEFESPKKKAKVE

SEQ ID NO: 1040 - protein, 2091 aa, synthetic construct
  source 1..2091: note = Description of Artificial Sequence: Synthetic polypeptide
MPAAKRVKLDGGDKKYSIGLDIGTNSVGWAVITDEYKVPSKKFKVLGNTDRHSIKKNLIGALLFDSGETAEATRLKRTARRRYTRRKNRICYLQEIFSNEMAKVDDSFFHRLEESFLVEEDKKHERHPIFGNIVDEVAYHEKYPTIYHLRKKLVDSTDKADLRLIYLALAHMIKFRGHFLIEGDLNPDNSDVDKLFIQLVQTYNQLFEENPINASGVDAKAILSARLSKSRRLENLIAQLPGEKKNGLFGNLIALSLGLTPNFKSNFDLAEDAKLQLSKDTYDDDLDNLLAQIGDQYADLFLAAKNLSDAILLSDILRVNTEITKAPLSASMIKRYDEHHQDLTLLKALVRQQLPEKYKEIFFDQSKNGYAGYIDGGASQEEFYKFIKPILEKMDGTEELLVKLNREDLLRKQRTFDNGSIPHQIHLGELHAILRRQEDFYPFLKDNREKIEKILTFRIPYYVGPLARGNSRFAWMTRKSEETITPWNFEEVVDKGASAQSFIERMTNFDKNLPNEKVLPKHSLLYEYFTVYNELTKVKYVTEGMRKPAFLSGEQKKAIVDLLFKTNRKVTVKQLKEDYFKKIECFDSVEISGVEDRFNASLGTYHDLLKIIKDKDFLDNEENEDILEDIVLTLTLFEDREMIEERLKTYAHLFDDKVMKQLKRRRYTGWGRLSRKLINGIRDKQSGKTILDFLKSDGFANRNFMQLIHDDSLTFKEDIQKAQVSGQGDSLHEHIANLAGSPAIKKGILQTVKVVDELVKVMGRHKPENIVIEMARENQTTQKGQKNSRERMKRIEEGIKELGSQILKEHPVENTQLQNEKLYLYYLQNGRDMYVDQELDINRLSDYDVDHIVPQSFLKDDSIDNKVLTRSDKARGKSDNVPSEEVVKKMKNYWRQLLNAKLITQRKFDNLTKAERGGLSELDKAGFIKRQLVETRQITKHVAQILDSRMNTKYDENDKLIREVKVITLKSKLVSDFRKDFQFYKVREINNYHHAHDAYLNAVVGTALIKKYPKLESEFVYGDYKVYDVRKMIAKSEQEIGKATAKYFFYSNIMNFFKTEITLANGEIRKRPLIETNGETGEIVWDKGRDFATVRKVLSMPQVNIVKKTEVQTGGFSKESILPKRNSDKLIARKKDWDPKKYGGFDSPTVAYSVLVVAKVEKGKSKKLKSVKELLGITIMERSSFEKNPIDFLEAKGYKEVKKDLIIKLPKYSLFELENGRKRMLASAGELQKGNELALPSKYVNFLYLASHYEKLKGSPEDNEQKQLFVEQHKHYLDEIIEQISEFSKRVILADANLDKVLSAYNKHRDKPIREQAENIIHLFTLTNLGAPAAFKYFDTTIDRKRYTSTKEVLDATLIHQSITGLYETRIDLSQLGGDGGGGSGGSGGTLNIEDEYRLHETSKEPDVPLGSTWLSDFPQAWAETGGMGLAVRQAPLIIPLKATSTPVSIKQYPMSQEARLGIKPHIQRLLDQGILVPCQSPWNTPLLPVKKPGTNDYRPVQDLREVNKRVEDIHPTVPNPYNLLSGLPPSHQWYTVLDLKDAFFCLRLHPTSQPLFAFEWRDPEMGISGQLTWTRLPQGFKNSPTLFNEALHRDLADFRIQHPDLILLQYVDDLLLAATSEQDCQRGTRALLQTLGNLGYRASAKKAQICQKQVKYLGYLLKEGQRWLTEARKETVMGQPTPKTPRQLREFLGKAGFCRLFIPGFAEMAAPLYPLTKPGTLFNWGPDQQKAYQEIKQALLTAPALGLPDLTKPFELFVDEKQGYAKGVLTQKLGPWRRPVAYLSKKLDPVAAGWPPCLRMVAAIAVLTKDAGKLTMGQPLVILAPHAVEALVKQPPDRWLSNARMTHYQAMLLDTDRVQFGPVVALNPATLLPLPEKEAPHDCLEILAETHGTRPDLTDQPIPDADYTWYTDGSSFLQEGQRRAGAAVTTETEVIWARALPAGTSAQRAELIALTQALKMAEGKKLNVYTDSRYAFATAHVHGEIYRRRGWLTSEGREIKNKNEILALLKALFLPKRLSIIHCPGHQKGNSAEARGNRMADQAAREAAMKAVLETSTLLAGKRTADGSEFEKRTADGSEFESPKKKAKVE

SEQ ID NO: 1041 - protein, 2096 aa, synthetic construct
  source 1..2096: note = Description of Artificial Sequence: Synthetic polypeptide
MPAAKRVKLDGGDKKYSIGLDIGTNSVGWAVITDEYKVPSKKFKVLGNTDRHSIKKNLIGALLFDSGETAEATRLKRTARRRYTRRKNRICYLQEIFSNEMAKVDDSFFHRLEESFLVEEDKKHERHPIFGNIVDEVAYHEKYPTIYHLRKKLVDSTDKADLRLIYLALAHMIKFRGHFLIEGDLNPDNSDVDKLFIQLVQTYNQLFEENPINASGVDAKAILSARLSKSRRLENLIAQLPGEKKNGLFGNLIALSLGLTPNFKSNFDLAEDAKLQLSKDTYDDDLDNLLAQIGDQYADLFLAAKNLSDAILLSDILRVNTEITKAPLSASMIKRYDEHHQDLTLLKALVRQQLPEKYKEIFFDQSKNGYAGYIDGGASQEEFYKFIKPILEKMDGTEELLVKLNREDLLRKQRTFDNGSIPHQIHLGELHAILRRQEDFYPFLKDNREKIEKILTFRIPYYVGPLARGNSRFAWMTRKSEETITPWNFEEVVDKGASAQSFIERMTNFDKNLPNEKVLPKHSLLYEYFTVYNELTKVKYVTEGMRKPAFLSGEQKKAIVDLLFKTNRKVTVKQLKEDYFKKIECFDSVEISGVEDRFNASLGTYHDLLKIIKDKDFLDNEENEDILEDIVLTLTLFEDREMIEERLKTYAHLFDDKVMKQLKRRRYTGWGRLSRKLINGIRDKQSGKTILDFLKSDGFANRNFMQLIHDDSLTFKEDIQKAQVSGQGDSLHEHIANLAGSPAIKKGILQTVKVVDELVKVMGRHKPENIVIEMARENQTTQKGQKNSRERMKRIEEGIKELGSQILKEHPVENTQLQNEKLYLYYLQNGRDMYVDQELDINRLSDYDVDHIVPQSFLKDDSIDNKVLTRSDKARGKSDNVPSEEVVKKMKNYWRQLLNAKLITQRKFDNLTKAERGGLSELDKAGFIKRQLVETRQITKHVAQILDSRMNTKYDENDKLIREVKVITLKSKLVSDFRKDFQFYKVREINNYHHAHDAYLNAVVGTALIKKYPKLESEFVYGDYKVYDVRKMIAKSEQEIGKATAKYFFYSNIMNFFKTEITLANGEIRKRPLIETNGETGEIVWDKGRDFATVRKVLSMPQVNIVKKTEVQTGGFSKESILPKRNSDKLIARKKDWDPKKYGGFDSPTVAYSVLVVAKVEKGKSKKLKSVKELLGITIMERSSFEKNPIDFLEAKGYKEVKKDLIIKLPKYSLFELENGRKRMLASAGELQKGNELALPSKYVNFLYLASHYEKLKGSPEDNEQKQLFVEQHKHYLDEIIEQISEFSKRVILADANLDKVLSAYNKHRDKPIREQAENIIHLFTLTNLGAPAAFKYFDTTIDRKRYTSTKEVLDATLIHQSITGLYETRIDLSQLGGDGGEAAAKGGSPAPGGTLNIEDEYRLHETSKEPDVPLGSTWLSDFPQAWAETGGMGLAVRQAPLIIPLKATSTPVSIKQYPMSQEARLGIKPHIQRLLDQGILVPCQSPWNTPLLPVKKPGTNDYRPVQDLREVNKRVEDIHPTVPNPYNLLSGLPPSHQWYTVLDLKDAFFCLRLHPTSQPLFAFEWRDPEMGISGQLTWTRLPQGFKNSPTLFNEALHRDLADFRIQHPDLILLQYVDDLLLAATSEQDCQRGTRALLQTLGNLGYRASAKKAQICQKQVKYLGYLLKEGQRWLTEARKETVMGQPTPKTPRQLREFLGKAGFCRLFIPGFAEMAAPLYPLTKPGTLFNWGPDQQKAYQEIKQALLTAPALGLPDLTKPFELFVDEKQGYAKGVLTQKLGPWRRPVAYLSKKLDPVAAGWPPCLRMVAAIAVLTKDAGKLTMGQPLVILAPHAVEALVKQPPDRWLSNARMTHYQAMLLDTDRVQFGPVVALNPATLLPLPEKEAPHDCLEILAETHGTRPDLTDQPIPDADYTWYTDGSSFLQEGQRRAGAAVTTETEVIWARALPAGTSAQRAELIALTQALKMAEGKKLNVYTDSRYAFATAHVHGEIYRRRGWLTSEGREIKNKNEILALLKALFLPKRLSIIHCPGHQKGNSAEARGNRMADQAAREAAMKAVLETSTLLAGKRTADGSEFEKRTADGSEFESPKKKAKVE

SEQ ID NO: 1042 - protein, 2100 aa, synthetic construct
  source 1..2100: note = Description of Artificial Sequence: Synthetic polypeptide
MPAAKRVKLDGGDKKYSIGLDIGTNSVGWAVITDEYKVPSKKFKVLGNTDRHSIKKNLIGALLFDSGETAEATRLKRTARRRYTRRKNRICYLQEIFSNEMAKVDDSFFHRLEESFLVEEDKKHERHPIFGNIVDEVAYHEKYPTIYHLRKKLVDSTDKADLRLIYLALAHMIKFRGHFLIEGDLNPDNSDVDKLFIQLVQTYNQLFEENPINASGVDAKAILSARLSKSRRLENLIAQLPGEKKNGLFGNLIALSLGLTPNFKSNFDLAEDAKLQLSKDTYDDDLDNLLAQIGDQYADLFLAAKNLSDAILLSDILRVNTEITKAPLSASMIKRYDEHHQDLTLLKALVRQQLPEKYKEIFFDQSKNGYAGYIDGGASQEEFYKFIKPILEKMDGTEELLVKLNREDLLRKQRTFDNGSIPHQIHLGELHAILRRQEDFYPFLKDNREKIEKILTFRIPYYVGPLARGNSRFAWMTRKSEETITPWNFEEVVDKGASAQSFIERMTNFDKNLPNEKVLPKHSLLYEYFTVYNELTKVKYVTEGMRKPAFLSGEQKKAIVDLLFKTNRKVTVKQLKEDYFKKIECFDSVEISGVEDRFNASLGTYHDLLKIIKDKDFLDNEENEDILEDIVLTLTLFEDREMIEERLKTYAHLFDDKVMKQLKRRRYTGWGRLSRKLINGIRDKQSGKTILDFLKSDGFANRNFMQLIHDDSLTFKEDIQKAQVSGQGDSLHEHIANLAGSPAIKKGILQTVKVVDELVKVMGRHKPENIVIEMARENQTTQKGQKNSRERMKRIEEGIKELGSQILKEHPVENTQLQNEKLYLYYLQNGRDMYVDQELDINRLSDYDVDHIVPQSFLKDDSIDNKVLTRSDKARGKSDNVPSEEVVKKMKNYWRQLLNAKLITQRKFDNLTKAERGGLSELDKAGFIKRQLVETRQITKHVAQILDSRMNTKYDENDKLIREVKVITLKSKLVSDFRKDFQFYKVREINNYHHAHDAYLNAVVGTALIKKYPKLESEFVYGDYKVYDVRKMIAKSEQEIGKATAKYFFYSNIMNFFKTEITLANGEIRKRPLIETNGETGEIVWDKGRDFATVRKVLSMPQVNIVKKTEVQTGGFSKESILPKRNSDKLIARKKDWDPKKYGGFDSPTVAYSVLVVAKVEKGKSKKLKSVKELLGITIMERSSFEKNPIDFLEAKGYKEVKKDLIIKLPKYSLFELENGRKRMLASAGELQKGNELALPSKYVNFLYLASHYEKLKGSPEDNEQKQLFVEQHKHYLDEIIEQISEFSKRVILADANLDKVLSAYNKHRDKPIREQAENIIHLFTLTNLGAPAAFKYFDTTIDRKRYTSTKEVLDATLIHQSITGLYETRIDLSQLGGDGGGGGGSGGGGSGGGGSGGTLNIEDEYRLHETSKEPDVPLGSTWLSDFPQAWAETGGMGLAVRQAPLIIPLKATSTPVSIKQYPMSQEARLGIKPHIQRLLDQGILVPCQSPWNTPLLPVKKPGTNDYRPVQDLREVNKRVEDIHPTVPNPYNLLSGLPPSHQWYTVLDLKDAFFCLRLHPTSQPLFAFEWRDPEMGISGQLTWTRLPQGFKNSPTLFNEALHRDLADFRIQHPDLILLQYVDDLLLAATSEQDCQRGTRALLQTLGNLGYRASAKKAQICQKQVKYLGYLLKEGQRWLTEARKETVMGQPTPKTPRQLREFLGKAGFCRLFIPGFAEMAAPLYPLTKPGTLFNWGPDQQKAYQEIKQALLTAPALGLPDLTKPFELFVDEKQGYAKGVLTQKLGPWRRPVAYLSKKLDPVAAGWPPCLRMVAAIAVLTKDAGKLTMGQPLVILAPHAVEALVKQPPDRWLSNARMTHYQAMLLDTDRVQFGPVVALNPATLLPLPEKEAPHDCLEILAETHGTRPDLTDQPIPDADYTWYTDGSSFLQEGQRRAGAAVTTETEVIWARALPAGTSAQRAELIALTQALKMAEGKKLNVYTDSRYAFATAHVHGEIYRRRGWLTSEGREIKNKNEILALLKALFLPKRLSIIHCPGHQKGNSAEARGNRMADQAAREAAMKAVLETSTLLAGKRTADGSEFEKRTADGSEFESPKKKAKVE

SEQ ID NO: 1043 - protein, 2094 aa, synthetic construct
  source 1..2094: note = Description of Artificial Sequence: Synthetic polypeptide
MPAAKRVKLDGGDKKYSIGLDIGTNSVGWAVITDEYKVPSKKFKVLGNTDRHSIKKNLIGALLFDSGETAEATRLKRTARRRYTRRKNRICYLQEIFSNEMAKVDDSFFHRLEESFLVEEDKKHERHPIFGNIVDEVAYHEKYPTIYHLRKKLVDSTDKADLRLIYLALAHMIKFRGHFLIEGDLNPDNSDVDKLFIQLVQTYNQLFEENPINASGVDAKAILSARLSKSRRLENLIAQLPGEKKNGLFGNLIALSLGLTPNFKSNFDLAEDAKLQLSKDTYDDDLDNLLAQIGDQYADLFLAAKNLSDAILLSDILRVNTEITKAPLSASMIKRYDEHHQDLTLLKALVRQQLPEKYKEIFFDQSKNGYAGYIDGGASQEEFYKFIKPILEKMDGTEELLVKLNREDLLRKQRTFDNGSIPHQIHLGELHAILRRQEDFYPFLKDNREKIEKILTFRIPYYVGPLARGNSRFAWMTRKSEETITPWNFEEVVDKGASAQSFIERMTNFDKNLPNEKVLPKHSLLYEYFTVYNELTKVKYVTEGMRKPAFLSGEQKKAIVDLLFKTNRKVTVKQLKEDYFKKIECFDSVEISGVEDRFNASLGTYHDLLKIIKDKDFLDNEENEDILEDIVLTLTLFEDREMIEERLKTYAHLFDDKVMKQLKRRRYTGWGRLSRKLINGIRDKQSGKTILDFLKSDGFANRNFMQLIHDDSLTFKEDIQKAQVSGQGDSLHEHIANLAGSPAIKKGILQTVKVVDELVKVMGRHKPENIVIEMARENQTTQKGQKNSRERMKRIEEGIKELGSQILKEHPVENTQLQNEKLYLYYLQNGRDMYVDQELDINRLSDYDVDHIVPQSFLKDDSIDNKVLTRSDKARGKSDNVPSEEVVKKMKNYWRQLLNAKLITQRKFDNLTKAERGGLSELDKAGFIKRQLVETRQITKHVAQILDSRMNTKYDENDKLIREVKVITLKSKLVSDFRKDFQFYKVREINNYHHAHDAYLNAVVGTALIKKYPKLESEFVYGDYKVYDVRKMIAKSEQEIGKATAKYFFYSNIMNFFKTEITLANGEIRKRPLIETNGETGEIVWDKGRDFATVRKVLSMPQVNIVKKTEVQTGGFSKESILPKRNSDKLIARKKDWDPKKYGGFDSPTVAYSVLVVAKVEKGKSKKLKSVKELLGITIMERSSFEKNPIDFLEAKGYKEVKKDLIIKLPKYSLFELENGRKRMLASAGELQKGNELALPSKYVNFLYLASHYEKLKGSPEDNEQKQLFVEQHKHYLDEIIEQISEFSKRVILADANLDKVLSAYNKHRDKPIREQAENIIHLFTLTNLGAPAAFKYFDTTIDRKRYTSTKEVLDATLIHQSITGLYETRIDLSQLGGDGGPAPGSSGGSGGTLNIEDEYRLHETSKEPDVPLGSTWLSDFPQAWAETGGMGLAVRQAPLIIPLKATSTPVSIKQYPMSQEARLGIKPHIQRLLDQGILVPCQSPWNTPLLPVKKPGTNDYRPVQDLREVNKRVEDIHPTVPNPYNLLSGLPPSHQWYTVLDLKDAFFCLRLHPTSQPLFAFEWRDPEMGISGQLTWTRLPQGFKNSPTLFNEALHRDLADFRIQHPDLILLQYVDDLLLAATSEQDCQRGTRALLQTLGNLGYRASAKKAQICQKQVKYLGYLLKEGQRWLTEARKETVMGQPTPKTPRQLREFLGKAGFCRLFIPGFAEMAAPLYPLTKPGTLFNWGPDQQKAYQEIKQALLTAPALGLPDLTKPFELFVDEKQGYAKGVLTQKLGPWRRPVAYLSKKLDPVAAGWPPCLRMVAAIAVLTKDAGKLTMGQPLVILAPHAVEALVKQPPDRWLSNARMTHYQAMLLDTDRVQFGPVVALNPATLLPLPEKEAPHDCLEILAETHGTRPDLTDQPIPDADYTWYTDGSSFLQEGQRRAGAAVTTETEVIWARALPAGTSAQRAELIALTQALKMAEGKKLNVYTDSRYAFATAHVHGEIYRRRGWLTSEGREIKNKNEILALLKALFLPKRLSIIHCPGHQKGNSAEARGNRMADQAAREAAMKAVLETSTLLAGKRTADGSEFEKRTADGSEFESPKKKAKVE

SEQ ID NO: 1044 - protein, 2093 aa, synthetic construct
  source 1..2093: note = Description of Artificial Sequence: Synthetic polypeptide
MPAAKRVKLDGGDKKYSIGLDIGTNSVGWAVITDEYKVPSKKFKVLGNTDRHSIKKNLIGALLFDSGETAEATRLKRTARRRYTRRKNRICYLQEIFSNEMAKVDDSFFHRLEESFLVEEDKKHERHPIFGNIVDEVAYHEKYPTIYHLRKKLVDSTDKADLRLIYLALAHMIKFRGHFLIEGDLNPDNSDVDKLFIQLVQTYNQLFEENPINASGVDAKAILSARLSKSRRLENLIAQLPGEKKNGLFGNLIALSLGLTPNFKSNFDLAEDAKLQLSKDTYDDDLDNLLAQIGDQYADLFLAAKNLSDAILLSDILRVNTEITKAPLSASMIKRYDEHHQDLTLLKALVRQQLPEKYKEIFFDQSKNGYAGYIDGGASQEEFYKFIKPILEKMDGTEELLVKLNREDLLRKQRTFDNGSIPHQIHLGELHAILRRQEDFYPFLKDNREKIEKILTFRIPYYVGPLARGNSRFAWMTRKSEETITPWNFEEVVDKGASAQSFIERMTNFDKNLPNEKVLPKHSLLYEYFTVYNELTKVKYVTEGMRKPAFLSGEQKKAIVDLLFKTNRKVTVKQLKEDYFKKIECFDSVEISGVEDRFNASLGTYHDLLKIIKDKDFLDNEENEDILEDIVLTLTLFEDREMIEERLKTYAHLFDDKVMKQLKRRRYTGWGRLSRKLINGIRDKQSGKTILDFLKSDGFANRNFMQLIHDDSLTFKEDIQKAQVSGQGDSLHEHIANLAGSPAIKKGILQTVKVVDELVKVMGRHKPENIVIEMARENQTTQKGQKNSRERMKRIEEGIKELGSQILKEHPVENTQLQNEKLYLYYLQNGRDMYVDQELDINRLSDYDVDHIVPQSFLKDDSIDNKVLTRSDKARGKSDNVPSEEVVKKMKNYWRQLLNAKLITQRKFDNLTKAERGGLSELDKAGFIKRQLVETRQITKHVAQILDSRMNTKYDENDKLIREVKVITLKSKLVSDFRKDFQFYKVREINNYHHAHDAYLNAVVGTALIKKYPKLESEFVYGDYKVYDVRKMIAKSEQEIGKATAKYFFYSNIMNFFKTEITLANGEIRKRPLIETNGETGEIVWDKGRDFATVRKVLSMPQVNIVKKTEVQTGGFSKESILPKRNSDKLIARKKDWDPKKYGGFDSPTVAYSVLVVAKVEKGKSKKLKSVKELLGITIMERSSFEKNPIDFLEAKGYKEVKKDLIIKLPKYSLFELENGRKRMLASAGELQKGNELALPSKYVNFLYLASHYEKLKGSPEDNEQKQLFVEQHKHYLDEIIEQISEFSKRVILADANLDKVLSAYNKHRDKPIREQAENIIHLFTLTNLGAPAAFKYFDTTIDRKRYTSTKEVLDATLIHQSITGLYETRIDLSQLGGDGGGGGEAAAKGGTLNIEDEYRLHETSKEPDVPLGSTWLSDFPQAWAETGGMGLAVRQAPLIIPLKATSTPVSIKQYPMSQEARLGIKPHIQRLLDQGILVPCQSPWNTPLLPVKKPGTNDYRPVQDLREVNKRVEDIHPTVPNPYNLLSGLPPSHQWYTVLDLKDAFFCLRLHPTSQPLFAFEWRDPEMGISGQLTWTRLPQGFKNSPTLFNEALHRDLADFRIQHPDLILLQYVDDLLLAATSEQDCQRGTRALLQTLGNLGYRASAKKAQICQKQVKYLGYLLKEGQRWLTEARKETVMGQPTPKTPRQLREFLGKAGFCRLFIPGFAEMAAPLYPLTKPGTLFNWGPDQQKAYQEIKQALLTAPALGLPDLTKPFELFVDEKQGYAKGVLTQKLGPWRRPVAYLSKKLDPVAAGWPPCLRMVAAIAVLTKDAGKLTMGQPLVILAPHAVEALVKQPPDRWLSNARMTHYQAMLLDTDRVQFGPVVALNPATLLPLPEKEAPHDCLEILAETHGTRPDLTDQPIPDADYTWYTDGSSFLQEGQRRAGAAVTTETEVIWARALPAGTSAQRAELIALTQALKMAEGKKLNVYTDSRYAFATAHVHGEIYRRRGWLTSEGREIKNKNEILALLKALFLPKRLSIIHCPGHQKGNSAEARGNRMADQAAREAAMKAVLETSTLLAGKRTADGSEFEKRTADGSEFESPKKKAKVE

SEQ ID NO: 1045 - protein, 2100 aa, synthetic construct
  source 1..2100: note = Description of Artificial Sequence: Synthetic polypeptide
MPAAKRVKLDGGDKKYSIGLDIGTNSVGWAVITDEYKVPSKKFKVLGNTDRHSIKKNLIGALLFDSGETAEATRLKRTARRRYTRRKNRICYLQEIFSNEMAKVDDSFFHRLEESFLVEEDKKHERHPIFGNIVDEVAYHEKYPTIYHLRKKLVDSTDKADLRLIYLALAHMIKFRGHFLIEGDLNPDNSDVDKLFIQLVQTYNQLFEENPINASGVDAKAILSARLSKSRRLENLIAQLPGEKKNGLFGNLIALSLGLTPNFKSNFDLAEDAKLQLSKDTYDDDLDNLLAQIGDQYADLFLAAKNLSDAILLSDILRVNTEITKAPLSASMIKRYDEHHQDLTLLKALVRQQLPEKYKEIFFDQSKNGYAGYIDGGASQEEFYKFIKPILEKMDGTEELLVKLNREDLLRKQRTFDNGSIPHQIHLGELHAILRRQEDFYPFLKDNREKIEKILTFRIPYYVGPLARGNSRFAWMTRKSEETITPWNFEEVVDKGASAQSFIERMTNFDKNLPNEKVLPKHSLLYEYFTVYNELTKVKYVTEGMRKPAFLSGEQKKAIVDLLFKTNRKVTVKQLKEDYFKKIECFDSVEISGVEDRFNASLGTYHDLLKIIKDKDFLDNEENEDILEDIVLTLTLFEDREMIEERLKTYAHLFDDKVMKQLKRRRYTGWGRLSRKLINGIRDKQSGKTILDFLKSDGFANRNFMQLIHDDSLTFKEDIQKAQVSGQGDSLHEHIANLAGSPAIKKGILQTVKVVDELVKVMGRHKPENIVIEMARENQTTQKGQKNSRERMKRIEEGIKELGSQILKEHPVENTQLQNEKLYLYYLQNGRDMYVDQELDINRLSDYDVDHIVPQSFLKDDSIDNKVLTRSDKARGKSDNVPSEEVVKKMKNYWRQLLNAKLITQRKFDNLTKAERGGLSELDKAGFIKRQLVETRQITKHVAQILDSRMNTKYDENDKLIREVKVITLKSKLVSDFRKDFQFYKVREINNYHHAHDAYLNAVVGTALIKKYPKLESEFVYGDYKVYDVRKMIAKSEQEIGKATAKYFFYSNIMNFFKTEITLANGEIRKRPLIETNGETGEIVWDKGRDFATVRKVLSMPQVNIVKKTEVQTGGFSKESILPKRNSDKLIARKKDWDPKKYGGFDSPTVAYSVLVVAKVEKGKSKKLKSVKELLGITIMERSSFEKNPIDFLEAKGYKEVKKDLIIKLPKYSLFELENGRKRMLASAGELQKGNELALPSKYVNFLYLASHYEKLKGSPEDNEQKQLFVEQHKHYLDEIIEQISEFSKRVILADANLDKVLSAYNKHRDKPIREQAENIIHLFTLTNLGAPAAFKYFDTTIDRKRYTSTKEVLDATLIHQSITGLYETRIDLSQLGGDGGGSSGSSGSSGSSGSSGGTLNIEDEYRLHETSKEPDVPLGSTWLSDFPQAWAETGGMGLAVRQAPLIIPLKATSTPVSIKQYPMSQEARLGIKPHIQRLLDQGILVPCQSPWNTPLLPVKKPGTNDYRPVQDLREVNKRVEDIHPTVPNPYNLLSGLPPSHQWYTVLDLKDAFFCLRLHPTSQPLFAFEWRDPEMGISGQLTWTRLPQGFKNSPTLFNEALHRDLADFRIQHPDLILLQYVDDLLLAATSEQDCQRGTRALLQTLGNLGYRASAKKAQICQKQVKYLGYLLKEGQRWLTEARKETVMGQPTPKTPRQLREFLGKAGFCRLFIPGFAEMAAPLYPLTKPGTLFNWGPDQQKAYQEIKQALLTAPALGLPDLTKPFELFVDEKQGYAKGVLTQKLGPWRRPVAYLSKKLDPVAAGWPPCLRMVAAIAVLTKDAGKLTMGQPLVILAPHAVEALVKQPPDRWLSNARMTHYQAMLLDTDRVQFGPVVALNPATLLPLPEKEAPHDCLEILAETHGTRPDLTDQPIPDADYTWYTDGSSFLQEGQRRAGAAVTTETEVIWARALPAGTSAQRAELIALTQALKMAEGKKLNVYTDSRYAFATAHVHGEIYRRRGWLTSEGREIKNKNEILALLKALFLPKRLSIIHCPGHQKGNSAEARGNRMADQAAREAAMKAVLETSTLLAGKRTADGSEFEKRTADGSEFESPKKKAKVE

SEQ ID NO: 1046 - protein, 2096 aa, synthetic construct
  source 1..2096: note = Description of Artificial Sequence: Synthetic polypeptide
MPAAKRVKLDGGDKKYSIGLDIGTNSVGWAVITDEYKVPSKKFKVLGNTDRHSIKKNLIGALLFDSGETAEATRLKRTARRRYTRRKNRICYLQEIFSNEMAKVDDSFFHRLEESFLVEEDKKHERHPIFGNIVDEVAYHEKYPTIYHLRKKLVDSTDKADLRLIYLALAHMIKFRGHFLIEGDLNPDNSDVDKLFIQLVQTYNQLFEENPINASGVDAKAILSARLSKSRRLENLIAQLPGEKKNGLFGNLIALSLGLTPNFKSNFDLAEDAKLQLSKDTYDDDLDNLLAQIGDQYADLFLAAKNLSDAILLSDILRVNTEITKAPLSASMIKRYDEHHQDLTLLKALVRQQLPEKYKEIFFDQSKNGYAGYIDGGASQEEFYKFIKPILEKMDGTEELLVKLNREDLLRKQRTFDNGSIPHQIHLGELHAILRRQEDFYPFLKDNREKIEKILTFRIPYYVGPLARGNSRFAWMTRKSEETITPWNFEEVVDKGASAQSFIERMTNFDKNLPNEKVLPKHSLLYEYFTVYNELTKVKYVTEGMRKPAFLSGEQKKAIVDLLFKTNRKVTVKQLKEDYFKKIECFDSVEISGVEDRFNASLGTYHDLLKIIKDKDFLDNEENEDILEDIVLTLTLFEDREMIEERLKTYAHLFDDKVMKQLKRRRYTGWGRLSRKLINGIRDKQSGKTILDFLKSDGFANRNFMQLIHDDSLTFKEDIQKAQVSGQGDSLHEHIANLAGSPAIKKGILQTVKVVDELVKVMGRHKPENIVIEMARENQTTQKGQKNSRERMKRIEEGIKELGSQILKEHPVENTQLQNEKLYLYYLQNGRDMYVDQELDINRLSDYDVDHIVPQSFLKDDSIDNKVLTRSDKARGKSDNVPSEEVVKKMKNYWRQLLNAKLITQRKFDNLTKAERGGLSELDKAGFIKRQLVETRQITKHVAQILDSRMNTKYDENDKLIREVKVITLKSKLVSDFRKDFQFYKVREINNYHHAHDAYLNAVVGTALIKKYPKLESEFVYGDYKVYDVRKMIAKSEQEIGKATAKYFFYSNIMNFFKTEITLANGEIRKRPLIETNGETGEIVWDKGRDFATVRKVLSMPQVNIVKKTEVQTGGFSKESILPKRNSDKLIARKKDWDPKKYGGFDSPTVAYSVLVVAKVEKGKSKKLKSVKELLGITIMERSSFEKNPIDFLEAKGYKEVKKDLIIKLPKYSLFELENGRKRMLASAGELQKGNELALPSKYVNFLYLASHYEKLKGSPEDNEQKQLFVEQHKHYLDEIIEQISEFSKRVILADANLDKVLSAYNKHRDKPIREQAENIIHLFTLTNLGAPAAFKYFDTTIDRKRYTSTKEVLDATLIHQSITGLYETRIDLSQLGGDGGGGSGGGEAAAKGGTLNIEDEYRLHETSKEPDVPLGSTWLSDFPQAWAETGGMGLAVRQAPLIIPLKATSTPVSIKQYPMSQEARLGIKPHIQRLLDQGILVPCQSPWNTPLLPVKKPGTNDYRPVQDLREVNKRVEDIHPTVPNPYNLLSGLPPSHQWYTVLDLKDAFFCLRLHPTSQPLFAFEWRDPEMGISGQLTWTRLPQGFKNSPTLFNEALHRDLADFRIQHPDLILLQYVDDLLLAATSEQDCQRGTRALLQTLGNLGYRASAKKAQICQKQVKYLGYLLKEGQRWLTEARKETVMGQPTPKTPRQLREFLGKAGFCRLFIPGFAEMAAPLYPLTKPGTLFNWGPDQQKAYQEIKQALLTAPALGLPDLTKPFELFVDEKQGYAKGVLTQKLGPWRRPVAYLSKKLDPVAAGWPPCLRMVAAIAVLTKDAGKLTMGQPLVILAPHAVEALVKQPPDRWLSNARMTHYQAMLLDTDRVQFGPVVALNPATLLPLPEKEAPHDCLEILAETHGTRPDLTDQPIPDADYTWYTDGSSFLQEGQRRAGAAVTTETEVIWARALPAGTSAQRAELIALTQALKMAEGKKLNVYTDSRYAFATAHVHGEIYRRRGWLTSEGREIKNKNEILALLKALFLPKRLSIIHCPGHQKGNSAEARGNRMADQAAREAAMKAVLETSTLLAGKRTADGSEFEKRTADGSEFESPKKKAKVE

SEQ ID NO: 1047 - protein, 2091 aa, synthetic construct
  source 1..2091: note = Description of Artificial Sequence: Synthetic polypeptide
MPAAKRVKLDGGDKKYSIGLDIGTNSVGWAVITDEYKVPSKKFKVLGNTDRHSIKKNLIGALLFDSGETAEATRLKRTARRRYTRRKNRICYLQEIFSNEMAKVDDSFFHRLEESFLVEEDKKHERHPIFGNIVDEVAYHEKYPTIYHLRKKLVDSTDKADLRLIYLALAHMIKFRGHFLIEGDLNPDNSDVDKLFIQLVQTYNQLFEENPINASGVDAKAILSARLSKSRRLENLIAQLPGEKKNGLFGNLIALSLGLTPNFKSNFDLAEDAKLQLSKDTYDDDLDNLLAQIGDQYADLFLAAKNLSDAILLSDILRVNTEITKAPLSASMIKRYDEHHQDLTLLKALVRQQLPEKYKEIFFDQSKNGYAGYIDGGASQEEFYKFIKPILEKMDGTEELLVKLNREDLLRKQRTFDNGSIPHQIHLGELHAILRRQEDFYPFLKDNREKIEKILTFRIPYYVGPLARGNSRFAWMTRKSEETITPWNFEEVVDKGASAQSFIERMTNFDKNLPNEKVLPKHSLLYEYFTVYNELTKVKYVTEGMRKPAFLSGEQKKAIVDLLFKTNRKVTVKQLKEDYFKKIECFDSVEISGVEDRFNASLGTYHDLLKIIKDKDFLDNEENEDILEDIVLTLTLFEDREMIEERLKTYAHLFDDKVMKQLKRRRYTGWGRLSRKLINGIRDKQSGKTILDFLKSDGFANRNFMQLIHDDSLTFKEDIQKAQVSGQGDSLHEHIANLAGSPAIKKGILQTVKVVDELVKVMGRHKPENIVIEMARENQTTQKGQKNSRERMKRIEEGIKELGSQILKEHPVENTQLQNEKLYLYYLQNGRDMYVDQELDINRLSDYDVDHIVPQSFLKDDSIDNKVLTRSDKARGKSDNVPSEEVVKKMKNYWRQLLNAKLITQRKFDNLTKAERGGLSELDKAGFIKRQLVETRQITKHVAQILDSRMNTKYDENDKLIREVKVITLKSKLVSDFRKDFQFYKVREINNYHHAHDAYLNAVVGTALIKKYPKLESEFVYGDYKVYDVRKMIAKSEQEIGKATAKYFFYSNIMNFFKTEITLANGEIRKRPLIETNGETGEIVWDKGRDFATVRKVLSMPQVNIVKKTEVQTGGFSKESILPKRNSDKLIARKKDWDPKKYGGFDSPTVAYSVLVVAKVEKGKSKKLKSVKELLGITIMERSSFEKNPIDFLEAKGYKEVKKDLIIKLPKYSLFELENGRKRMLASAGELQKGNELALPSKYVNFLYLASHYEKLKGSPEDNEQKQLFVEQHKHYLDEIIEQISEFSKRVILADANLDKVLSAYNKHRDKPIREQAENIIHLFTLTNLGAPAAFKYFDTTIDRKRYTSTKEVLDATLIHQSITGLYETRIDLSQLGGDGGGSSGSSGGTLNIEDEYRLHETSKEPDVPLGSTWLSDFPQAWAETGGMGLAVRQAPLIIPLKATSTPVSIKQYPMSQEARLGIKPHIQRLLDQGILVPCQSPWNTPLLPVKKPGTNDYRPVQDLREVNKRVEDIHPTVPNPYNLLSGLPPSHQWYTVLDLKDAFFCLRLHPTSQPLFAFEWRDPEMGISGQLTWTRLPQGFKNSPTLFNEALHRDLADFRIQHPDLILLQYVDDLLLAATSEQDCQRGTRALLQTLGNLGYRASAKKAQICQKQVKYLGYLLKEGQRWLTEARKETVMGQPTPKTPRQLREFLGKAGFCRLFIPGFAEMAAPLYPLTKPGTLFNWGPDQQKAYQEIKQALLTAPALGLPDLTKPFELFVDEKQGYAKGVLTQKLGPWRRPVAYLSKKLDPVAAGWPPCLRMVAAIAVLTKDAGKLTMGQPLVILAPHAVEALVKQPPDRWLSNARMTHYQAMLLDTDRVQFGPVVALNPATLLPLPEKEAPHDCLEILAETHGTRPDLTDQPIPDADYTWYTDGSSFLQEGQRRAGAAVTTETEVIWARALPAGTSAQRAELIALTQALKMAEGKKLNVYTDSRYAFATAHVHGEIYRRRGWLTSEGREIKNKNEILALLKALFLPKRLSIIHCPGHQKGNSAEARGNRMADQAAREAAMKAVLETSTLLAGKRTADGSEFEKRTADGSEFESPKKKAKVE

SEQ ID NO: 1048 - protein, 2093 aa, synthetic construct
  source 1..2093: note = Description of Artificial Sequence: Synthetic polypeptide
MPAAKRVKLDGGDKKYSIGLDIGTNSVGWAVITDEYKVPSKKFKVLGNTDRHSIKKNLIGALLFDSGETAEATRLKRTARRRYTRRKNRICYLQEIFSNEMAKVDDSFFHRLEESFLVEEDKKHERHPIFGNIVDEVAYHEKYPTIYHLRKKLVDSTDKADLRLIYLALAHMIKFRGHFLIEGDLNPDNSDVDKLFIQLVQTYNQLFEENPINASGVDAKAILSARLSKSRRLENLIAQLPGEKKNGLFGNLIALSLGLTPNFKSNFDLAEDAKLQLSKDTYDDDLDNLLAQIGDQYADLFLAAKNLSDAILLSDILRVNTEITKAPLSASMIKRYDEHHQDLTLLKALVRQQLPEKYKEIFFDQSKNGYAGYIDGGASQEEFYKFIKPILEKMDGTEELLVKLNREDLLRKQRTFDNGSIPHQIHLGELHAILRRQEDFYPFLKDNREKIEKILTFRIPYYVGPLARGNSRFAWMTRKSEETITPWNFEEVVDKGASAQSFIERMTNFDKNLPNEKVLPKHSLLYEYFTVYNELTKVKYVTEGMRKPAFLSGEQKKAIVDLLFKTNRKVTVKQLKEDYFKKIECFDSVEISGVEDRFNASLGTYHDLLKIIKDKDFLDNEENEDILEDIVLTLTLFEDREMIEERLKTYAHLFDDKVMKQLKRRRYTGWGRLSRKLINGIRDKQSGKTILDFLKSDGFANRNFMQLIHDDSLTFKEDIQKAQVSGQGDSLHEHIANLAGSPAIKKGILQTVKVVDELVKVMGRHKPENIVIEMARENQTTQKGQKNSRERMKRIEEGIKELGSQILKEHPVENTQLQNEKLYLYYLQNGRDMYVDQELDINRLSDYDVDHIVPQSFLKDDSIDNKVLTRSDKARGKSDNVPSEEVVKKMKNYWRQLLNAKLITQRKFDNLTKAERGGLSELDKAGFIKRQLVETRQITKHVAQILDSRMNTKYDENDKLIREVKVITLKSKLVSDFRKDFQFYKVREINNYHHAHDAYLNAVVGTALIKKYPKLESEFVYGDYKVYDVRKMIAKSEQEIGKATAKYFFYSNIMNFFKTEITLANGEIRKRPLIETNGETGEIVWDKGRDFATVRKVLSMPQVNIVKKTEVQTGGFSKESILPKRNSDKLIARKKDWDPKKYGGFDSPTVAYSVLVVAKVEKGKSKKLKSVKELLGITIMERSSFEKNPIDFLEAKGYKEVKKDLIIKLPKYSLFELENGRKRMLASAGELQKGNELALPSKYVNFLYLASHYEKLKGSPEDNEQKQLFVEQHKHYLDEIIEQISEFSKRVILADANLDKVLSAYNKHRDKPIREQAENIIHLFTLTNLGAPAAFKYFDTTIDRKRYTSTKEVLDATLIHQSITGLYETRIDLSQLGGDGGEAAAKPAPGGTLNIEDEYRLHETSKEPDVPLGSTWLSDFPQAWAETGGMGLAVRQAPLIIPLKATSTPVSIKQYPMSQEARLGIKPHIQRLLDQGILVPCQSPWNTPLLPVKKPGTNDYRPVQDLREVNKRVEDIHPTVPNPYNLLSGLPPSHQWYTVLDLKDAFFCLRLHPTSQPLFAFEWRDPEMGISGQLTWTRLPQGFKNSPTLFNEALHRDLADFRIQHPDLILLQYVDDLLLAATSEQDCQRGTRALLQTLGNLGYRASAKKAQICQKQVKYLGYLLKEGQRWLTEARKETVMGQPTPKTPRQLREFLGKAGFCRLFIPGFAEMAAPLYPLTKPGTLFNWGPDQQKAYQEIKQALLTAPALGLPDLTKPFELFVDEKQGYAKGVLTQKLGPWRRPVAYLSKKLDPVAAGWPPCLRMVAAIAVLTKDAGKLTMGQPLVILAPHAVEALVKQPPDRWLSNARMTHYQAMLLDTDRVQFGPVVALNPATLLPLPEKEAPHDCLEILAETHGTRPDLTDQPIPDADYTWYTDGSSFLQEGQRRAGAAVTTETEVIWARALPAGTSAQRAELIALTQALKMAEGKKLNVYTDSRYAFATAHVHGEIYRRRGWLTSEGREIKNKNEILALLKALFLPKRLSIIHCPGHQKGNSAEARGNRMADQAAREAAMKAVLETSTLLAGKRTADGSEFEKRTADGSEFESPKKKAKVE

SEQ ID NO: 1049 - protein, 2105 aa, synthetic construct
  source 1..2105: note = Description of Artificial Sequence: Synthetic polypeptide
MPAAKRVKLDGGDKKYSIGLDIGTNSVGWAVITDEYKVPSKKFKVLGNTDRHSIKKNLIGALLFDSGETAEATRLKRTARRRYTRRKNRICYLQEIFSNEMAKVDDSFFHRLEESFLVEEDKKHERHPIFGNIVDEVAYHEKYPTIYHLRKKLVDSTDKADLRLIYLALAHMIKFRGHFLIEGDLNPDNSDVDKLFIQLVQTYNQLFEENPINASGVDAKAILSARLSKSRRLENLIAQLPGEKKNGLFGNLIALSLGLTPNFKSNFDLAEDAKLQLSKDTYDDDLDNLLAQIGDQYADLFLAAKNLSDAILLSDILRVNTEITKAPLSASMIKRYDEHHQDLTLLKALVRQQLPEKYKEIFFDQSKNGYAGYIDGGASQEEFYKFIKPILEKMDGTEELLVKLNREDLLRKQRTFDNGSIPHQIHLGELHAILRRQEDFYPFLKDNREKIEKILTFRIPYYVGPLARGNSRFAWMTRKSEETITPWNFEEVVDKGASAQSFIERMTNFDKNLPNEKVLPKHSLLYEYFTVYNELTKVKYVTEGMRKPAFLSGEQKKAIVDLLFKTNRKVTVKQLKEDYFKKIECFDSVEISGVEDRFNASLGTYHDLLKIIKDKDFLDNEENEDILEDIVLTLTLFEDREMIEERLKTYAHLFDDKVMKQLKRRRYTGWGRLSRKLINGIRDKQSGKTILDFLKSDGFANRNFMQLIHDDSLTFKEDIQKAQVSGQGDSLHEHIANLAGSPAIKKGILQTVKVVDELVKVMGRHKPENIVIEMARENQTTQKGQKNSRERMKRIEEGIKELGSQILKEHPVENTQLQNEKLYLYYLQNGRDMYVDQELDINRLSDYDVDHIVPQSFLKDDSIDNKVLTRSDKARGKSDNVPSEEVVKKMKNYWRQLLNAKLITQRKFDNLTKAERGGLSELDKAGFIKRQLVETRQITKHVAQILDSRMNTKYDENDKLIREVKVITLKSKLVSDFRKDFQFYKVREINNYHHAHDAYLNAVVGTALIKKYPKLESEFVYGDYKVYDVRKMIAKSEQEIGKATAKYFFYSNIMNFFKTEITLANGEIRKRPLIETNGETGEIVWDKGRDFATVRKVLSMPQVNIVKKTEVQTGGFSKESILPKRNSDKLIARKKDWDPKKYGGFDSPTVAYSVLVVAKVEKGKSKKLKSVKELLGITIMERSSFEKNPIDFLEAKGYKEVKKDLIIKLPKYSLFELENGRKRMLASAGELQKGNELALPSKYVNFLYLASHYEKLKGSPEDNEQKQLFVEQHKHYLDEIIEQISEFSKRVILADANLDKVLSAYNKHRDKPIREQAENIIHLFTLTNLGAPAAFKYFDTTIDRKRYTSTKEVLDATLIHQSITGLYETRIDLSQLGGDGGGGGGSGGGGSGGGGSGGGGSGGTLNIEDEYRLHETSKEPDVPLGSTWLSDFPQAWAETGGMGLAVRQAPLIIPLKATSTPVSIKQYPMSQEARLGIKPHIQRLLDQGILVPCQSPWNTPLLPVKKPGTNDYRPVQDLREVNKRVEDIHPTVPNPYNLLSGLPPSHQWYTVLDLKDAFFCLRLHPTSQPLFAFEWRDPEMGISGQLTWTRLPQGFKNSPTLFNEALHRDLADFRIQHPDLILLQYVDDLLLAATSEQDCQRGTRALLQTLGNLGYRASAKKAQICQKQVKYLGYLLKEGQRWLTEARKETVMGQPTPKTPRQLREFLGKAGFCRLFIPGFAEMAAPLYPLTKPGTLFNWGPDQQKAYQEIKQALLTAPALGLPDLTKPFELFVDEKQGYAKGVLTQKLGPWRRPVAYLSKKLDPVAAGWPPCLRMVAAIAVLTKDAGKLTMGQPLVILAPHAVEALVKQPPDRWLSNARMTHYQAMLLDTDRVQFGPVVALNPATLLPLPEKEAPHDCLEILAETHGTRPDLTDQPIPDADYTWYTDGSSFLQEGQRRAGAAVTTETEVIWARALPAGTSAQRAELIALTQALKMAEGKKLNVYTDSRYAFATAHVHGEIYRRRGWLTSEGREIKNKNEILALLKALFLPKRLSIIHCPGHQKGNSAEARGNRMADQAAREAAMKAVLETSTLLAGKRTADGSEFEKRTADGSEFESPKKKAKVE

SEQ ID NO: 1050 - protein, 2093 aa, synthetic construct
  source 1..2093: note = Description of Artificial Sequence: Synthetic polypeptide
MPAAKRVKLDGGDKKYSIGLDIGTNSVGWAVITDEYKVPSKKFKVLGNTDRHSIKKNLIGALLFDSGETAEATRLKRTARRRYTRRKNRICYLQEIFSNEMAKVDDSFFHRLEESFLVEEDKKHERHPIFGNIVDEVAYHEKYPTIYHLRKKLVDSTDKADLRLIYLALAHMIKFRGHFLIEGDLNPDNSDVDKLFIQLVQTYNQLFEENPINASGVDAKAILSARLSKSRRLENLIAQLPGEKKNGLFGNLIALSLGLTPNFKSNFDLAEDAKLQLSKDTYDDDLDNLLAQIGDQYADLFLAAKNLSDAILLSDILRVNTEITKAPLSASMIKRYDEHHQDLTLLKALVRQQLPEKYKEIFFDQSKNGYAGYIDGGASQEEFYKFIKPILEKMDGTEELLVKLNREDLLRKQRTFDNGSIPHQIHLGELHAILRRQEDFYPFLKDNREKIEKILTFRIPYYVGPLARGNSRFAWMTRKSEETITPWNFEEVVDKGASAQSFIERMTNFDKNLPNEKVLPKHSLLYEYFTVYNELTKVKYVTEGMRKPAFLSGEQKKAIVDLLFKTNRKVTVKQLKEDYFKKIECFDSVEISGVEDRFNASLGTYHDLLKIIKDKDFLDNEENEDILEDIVLTLTLFEDREMIEERLKTYAHLFDDKVMKQLKRRRYTGWGRLSRKLINGIRDKQSGKTILDFLKSDGFANRNFMQLIHDDSLTFKEDIQKAQVSGQGDSLHEHIANLAGSPAIKKGILQTVKVVDELVKVMGRHKPENIVIEMARENQTTQKGQKNSRERMKRIEEGIKELGSQILKEHPVENTQLQNEKLYLYYLQNGRDMYVDQELDINRLSDYDVDHIVPQSFLKDDSIDNKVLTRSDKARGKSDNVPSEEVVKKMKNYWRQLLNAKLITQRKFDNLTKAERGGLSELDKAGFIKRQLVETRQITKHVAQILDSRMNTKYDENDKLIREVKVITLKSKLVSDFRKDFQFYKVREINNYHHAHDAYLNAVVGTALIKKYPKLESEFVYGDYKVYDVRKMIAKSEQEIGKATAKYFFYSNIMNFFKTEITLANGEIRKRPLIETNGETGEIVWDKGRDFATVRKVLSMPQVNIVKKTEVQTGGFSKESILPKRNSDKLIARKKDWDPKKYGGFDSPTVAYSVLVVAKVEKGKSKKLKSVKELLGITIMERSSFEKNPIDFLEAKGYKEVKKDLIIKLPKYSLFELENGRKRMLASAGELQKGNELALPSKYVNFLYLASHYEKLKGSPEDNEQKQLFVEQHKHYLDEIIEQISEFSKRVILADANLDKVLSAYNKHRDKPIREQAENIIHLFTLTNLGAPAAFKYFDTTIDRKRYTSTKEVLDATLIHQSITGLYETRIDLSQLGGDGGEAAAKGGGGGTLNIEDEYRLHETSKEPDVPLGSTWLSDFPQAWAETGGMGLAVRQAPLIIPLKATSTPVSIKQYPMSQEARLGIKPHIQRLLDQGILVPCQSPWNTPLLPVKKPGTNDYRPVQDLREVNKRVEDIHPTVPNPYNLLSGLPPSHQWYTVLDLKDAFFCLRLHPTSQPLFAFEWRDPEMGISGQLTWTRLPQGFKNSPTLFNEALHRDLADFRIQHPDLILLQYVDDLLLAATSEQDCQRGTRALLQTLGNLGYRASAKKAQICQKQVKYLGYLLKEGQRWLTEARKETVMGQPTPKTPRQLREFLGKAGFCRLFIPGFAEMAAPLYPLTKPGTLFNWGPDQQKAYQEIKQALLTAPALGLPDLTKPFELFVDEKQGYAKGVLTQKLGPWRRPVAYLSKKLDPVAAGWPPCLRMVAAIAVLTKDAGKLTMGQPLVILAPHAVEALVKQPPDRWLSNARMTHYQAMLLDTDRVQFGPVVALNPATLLPLPEKEAPHDCLEILAETHGTRPDLTDQPIPDADYTWYTDGSSFLQEGQRRAGAAVTTETEVIWARALPAGTSAQRAELIALTQALKMAEGKKLNVYTDSRYAFATAHVHGEIYRRRGWLTSEGREIKNKNEILALLKALFLPKRLSIIHCPGHQKGNSAEARGNRMADQAAREAAMKAVLETSTLLAGKRTADGSEFEKRTADGSEFESPKKKAKVE

SEQ ID NO: 1051 - protein, 2096 aa, synthetic construct
  source 1..2096: note = Description of Artificial Sequence: Synthetic polypeptide
MPAAKRVKLDGGDKKYSIGLDIGTNSVGWAVITDEYKVPSKKFKVLGNTDRHSIKKNLIGALLFDSGETAEATRLKRTARRRYTRRKNRICYLQEIFSNEMAKVDDSFFHRLEESFLVEEDKKHERHPIFGNIVDEVAYHEKYPTIYHLRKKLVDSTDKADLRLIYLALAHMIKFRGHFLIEGDLNPDNSDVDKLFIQLVQTYNQLFEENPINASGVDAKAILSARLSKSRRLENLIAQLPGEKKNGLFGNLIALSLGLTPNFKSNFDLAEDAKLQLSKDTYDDDLDNLLAQIGDQYADLFLAAKNLSDAILLSDILRVNTEITKAPLSASMIKRYDEHHQDLTLLKALVRQQLPEKYKEIFFDQSKNGYAGYIDGGASQEEFYKFIKPILEKMDGTEELLVKLNREDLLRKQRTFDNGSIPHQIHLGELHAILRRQEDFYPFLKDNREKIEKILTFRIPYYVGPLARGNSRFAWMTRKSEETITPWNFEEVVDKGASAQSFIERMTNFDKNLPNEKVLPKHSLLYEYFTVYNELTKVKYVTEGMRKPAFLSGEQKKAIVDLLFKTNRKVTVKQLKEDYFKKIECFDSVEISGVEDRFNASLGTYHDLLKIIKDKDFLDNEENEDILEDIVLTLTLFEDREMIEERLKTYAHLFDDKVMKQLKRRRYTGWGRLSRKLINGIRDKQSGKTILDFLKSDGFANRNFMQLIHDDSLTFKEDIQKAQVSGQGDSLHEHIANLAGSPAIKKGILQTVKVVDELVKVMGRHKPENIVIEMARENQTTQKGQKNSRERMKRIEEGIKELGSQILKEHPVENTQLQNEKLYLYYLQNGRDMYVDQELDINRLSDYDVDHIVPQSFLKDDSIDNKVLTRSDKARGKSDNVPSEEVVKKMKNYWRQLLNAKLITQRKFDNLTKAERGGLSELDKAGFIKRQLVETRQITKHVAQILDSRMNTKYDENDKLIREVKVITLKSKLVSDFRKDFQFYKVREINNYHHAHDAYLNAVVGTALIKKYPKLESEFVYGDYKVYDVRKMIAKSEQEIGKATAKYFFYSNIMNFFKTEITLANGEIRKRPLIETNGETGEIVWDKGRDFATVRKVLSMPQVNIVKKTEVQTGGFSKESILPKRNSDKLIARKKDWDPKKYGGFDSPTVAYSVLVVAKVEKGKSKKLKSVKELLGITIMERSSFEKNPIDFLEAKGYKEVKKDLIIKLPKYSLFELENGRKRMLASAGELQKGNELALPSKYVNFLYLASHYEKLKGSPEDNEQKQLFVEQHKHYLDEIIEQISEFSKRVILADANLDKVLSAYNKHRDKPIREQAENIIHLFTLTNLGAPAAFKYFDTTIDRKRYTSTKEVLDATLIHQSITGLYETRIDLSQLGGDGGEAAAKGGSGGGGGTLNIEDEYRLHETSKEPDVPLGSTWLSDFPQAWAETGGMGLAVRQAPLIIPLKATSTPVSIKQYPMSQEARLGIKPHIQRLLDQGILVPCQSPWNTPLLPVKKPGTNDYRPVQDLREVNKRVEDIHPTVPNPYNLLSGLPPSHQWYTVLDLKDAFFCLRLHPTSQPLFAFEWRDPEMGISGQLTWTRLPQGFKNSPTLFNEALHRDLADFRIQHPDLILLQYVDDLLLAATSEQDCQRGTRALLQTLGNLGYRASAKKAQICQKQVKYLGYLLKEGQRWLTEARKETVMGQPTPKTPRQLREFLGKAGFCRLFIPGFAEMAAPLYPLTKPGTLFNWGPDQQKAYQEIKQALLTAPALGLPDLTKPFELFVDEKQGYAKGVLTQKLGPWRRPVAYLSKKLDPVAAGWPPCLRMVAAIAVLTKDAGKLTMGQPLVILAPHAVEALVKQPPDRWLSNARMTHYQAMLLDTDRVQFGPVVALNPATLLPLPEKEAPHDCLEILAETHGTRPDLTDQPIPDADYTWYTDGSSFLQEGQRRAGAAVTTETEVIWARALPAGTSAQRAELIALTQALKMAEGKKLNVYTDSRYAFATAHVHGEIYRRRGWLTSEGREIKNKNEILALLKALFLPKRLSIIHCPGHQKGNSAEARGNRMADQAAREAAMKAVLETSTLLAGKRTADGSEFEKRTADGSEFESPKKKAKVE

SEQ ID NO: 1052 - protein, 2115 aa, synthetic construct
  source 1..2115: note = Description of Artificial Sequence: Synthetic polypeptide
MPAAKRVKLDGGDKKYSIGLDIGTNSVGWAVITDEYKVPSKKFKVLGNTDRHSIKKNLIGALLFDSGETAEATRLKRTARRRYTRRKNRICYLQEIFSNEMAKVDDSFFHRLEESFLVEEDKKHERHPIFGNIVDEVAYHEKYPTIYHLRKKLVDSTDKADLRLIYLALAHMIKFRGHFLIEGDLNPDNSDVDKLFIQLVQTYNQLFEENPINASGVDAKAILSARLSKSRRLENLIAQLPGEKKNGLFGNLIALSLGLTPNFKSNFDLAEDAKLQLSKDTYDDDLDNLLAQIGDQYADLFLAAKNLSDAILLSDILRVNTEITKAPLSASMIKRYDEHHQDLTLLKALVRQQLPEKYKEIFFDQSKNGYAGYIDGGASQEEFYKFIKPILEKMDGTEELLVKLNREDLLRKQRTFDNGSIPHQIHLGELHAILRRQEDFYPFLKDNREKIEKILTFRIPYYVGPLARGNSRFAWMTRKSEETITPWNFEEVVDKGASAQSFIERMTNFDKNLPNEKVLPKHSLLYEYFTVYNELTKVKYVTEGMRKPAFLSGEQKKAIVDLLFKTNRKVTVKQLKEDYFKKIECFDSVEISGVEDRFNASLGTYHDLLKIIKDKDFLDNEENEDILEDIVLTLTLFEDREMIEERLKTYAHLFDDKVMKQLKRRRYTGWGRLSRKLINGIRDKQSGKTILDFLKSDGFANRNFMQLIHDDSLTFKEDIQKAQVSGQGDSLHEHIANLAGSPAIKKGILQTVKVVDELVKVMGRHKPENIVIEMARENQTTQKGQKNSRERMKRIEEGIKELGSQILKEHPVENTQLQNEKLYLYYLQNGRDMYVDQELDINRLSDYDVDHIVPQSFLKDDSIDNKVLTRSDKARGKSDNVPSEEVVKKMKNYWRQLLNAKLITQRKFDNLTKAERGGLSELDKAGFIKRQLVETRQITKHVAQILDSRMNTKYDENDKLIREVKVITLKSKLVSDFRKDFQFYKVREINNYHHAHDAYLNAVVGTALIKKYPKLESEFVYGDYKVYDVRKMIAKSEQEIGKATAKYFFYSNIMNFFKTEITLANGEIRKRPLIETNGETGEIVWDKGRDFATVRKVLSMPQVNIVKKTEVQTGGFSKESILPKRNSDKLIARKKDWDPKKYGGFDSPTVAYSVLVVAKVEKGKSKKLKSVKELLGITIMERSSFEKNPIDFLEAKGYKEVKKDLIIKLPKYSLFELENGRKRMLASAGELQKGNELALPSKYVNFLYLASHYEKLKGSPEDNEQKQLFVEQHKHYLDEIIEQISEFSKRVILADANLDKVLSAYNKHRDKPIREQAENIIHLFTLTNLGAPAAFKYFDTTIDRKRYTSTKEVLDATLIHQSITGLYETRIDLSQLGGDGGEAAAKEAAAKEAAAKEAAAKEAAAKEAAAKGGTLNIEDEYRLHETSKEPDVPLGSTWLSDFPQAWAETGGMGLAVRQAPLIIPLKATSTPVSIKQYPMSQEARLGIKPHIQRLLDQGILVPCQSPWNTPLLPVKKPGTNDYRPVQDLREVNKRVEDIHPTVPNPYNLLSGLPPSHQWYTVLDLKDAFFCLRLHPTSQPLFAFEWRDPEMGISGQLTWTRLPQGFKNSPTLFNEALHRDLADFRIQHPDLILLQYVDDLLLAATSEQDCQRGTRALLQTLGNLGYRASAKKAQICQKQVKYLGYLLKEGQRWLTEARKETVMGQPTPKTPRQLREFLGKAGFCRLFIPGFAEMAAPLYPLTKPGTLFNWGPDQQKAYQEIKQALLTAPALGLPDLTKPFELFVDEKQGYAKGVLTQKLGPWRRPVAYLSKKLDPVAAGWPPCLRMVAAIAVLTKDAGKLTMGQPLVILAPHAVEALVKQPPDRWLSNARMTHYQAMLLDTDRVQFGPVVALNPATLLPLPEKEAPHDCLEILAETHGTRPDLTDQPIPDADYTWYTDGSSFLQEGQRRAGAAVTTETEVIWARALPAGTSAQRAELIALTQALKMAEGKKLNVYTDSRYAFATAHVHGEIYRRRGWLTSEGREIKNKNEILALLKALFLPKRLSIIHCPGHQKGNSAEARGNRMADQAAREAAMKAVLETSTLLAGKRTADGSEFEKRTADGSEFESPKKKAKVE

SEQ ID NO: 1053 - protein, 2096 aa, synthetic construct
  source 1..2096: note = Description of Artificial Sequence: Synthetic polypeptide
MPAAKRVKLDGGDKKYSIGLDIGTNSVGWAVITDEYKVPSKKFKVLGNTDRHSIKKNLIGALLFDSGETAEATRLKRTARRRYTRRKNRICYLQEIFSNEMAKVDDSFFHRLEESFLVEEDKKHERHPIFGNIVDEVAYHEKYPTIYHLRKKLVDSTDKADLRLIYLALAHMIKFRGHFLIEGDLNPDNSDVDKLFIQLVQTYNQLFEENPINASGVDAKAILSARLSKSRRLENLIAQLPGEKKNGLFGNLIALSLGLTPNFKSNFDLAEDAKLQLSKDTYDDDLDNLLAQIGDQYADLFLAAKNLSDAILLSDILRVNTEITKAPLSASMIKRYDEHHQDLTLLKALVRQQLPEKYKEIFFDQSKNGYAGYIDGGASQEEFYKFIKPILEKMDGTEELLVKLNREDLLRKQRTFDNGSIPHQIHLGELHAILRRQEDFYPFLKDNREKIEKILTFRIPYYVGPLARGNSRFAWMTRKSEETITPWNFEEVVDKGASAQSFIERMTNFDKNLPNEKVLPKHSLLYEYFTVYNELTKVKYVTEGMRKPAFLSGEQKKAIVDLLFKTNRKVTVKQLKEDYFKKIECFDSVEISGVEDRFNASLGTYHDLLKIIKDKDFLDNEENEDILEDIVLTLTLFEDREMIEERLKTYAHLFDDKVMKQLKRRRYTGWGRLSRKLINGIRDKQSGKTILDFLKSDGFANRNFMQLIHDDSLTFKEDIQKAQVSGQGDSLHEHIANLAGSPAIKKGILQTVKVVDELVKVMGRHKPENIVIEMARENQTTQKGQKNSRERMKRIEEGIKELGSQILKEHPVENTQLQNEKLYLYYLQNGRDMYVDQELDINRLSDYDVDHIVPQSFLKDDSIDNKVLTRSDKARGKSDNVPSEEVVKKMKNYWRQLLNAKLITQRKFDNLTKAERGGLSELDKAGFIKRQLVETRQITKHVAQILDSRMNTKYDENDKLIREVKVITLKSKLVSDFRKDFQFYKVREINNYHHAHDAYLNAVVGTALIKKYPKLESEFVYGDYKVYDVRKMIAKSEQEIGKATAKYFFYSNIMNFFKTEITLANGEIRKRPLIETNGETGEIVWDKGRDFATVRKVLSMPQVNIVKKTEVQTGGFSKESILPKRNSDKLIARKKDWDPKKYGGFDSPTVAYSVLVVAKVEKGKSKKLKSVKELLGITIMERSSFEKNPIDFLEAKGYKEVKKDLIIKLPKYSLFELENGRKRMLASAGELQKGNELALPSKYVNFLYLASHYEKLKGSPEDNEQKQLFVEQHKHYLDEIIEQISEFSKRVILADANLDKVLSAYNKHRDKPIREQAENIIHLFTLTNLGAPAAFKYFDTTIDRKRYTSTKEVLDATLIHQSITGLYETRIDLSQLGGDGGGGGGSSEAAAKGGTLNIEDEYRLHETSKEPDVPLGSTWLSDFPQAWAETGGMGLAVRQAPLIIPLKATSTPVSIKQYPMSQEARLGIKPHIQRLLDQGILVPCQSPWNTPLLPVKKPGTNDYRPVQDLREVNKRVEDIHPTVPNPYNLLSGLPPSHQWYTVLDLKDAFFCLRLHPTSQPLFAFEWRDPEMGISGQLTWTRLPQGFKNSPTLFNEALHRDLADFRIQHPDLILLQYVDDLLLAATSEQDCQRGTRALLQTLGNLGYRASAKKAQICQKQVKYLGYLLKEGQRWLTEARKETVMGQPTPKTPRQLREFLGKAGFCRLFIPGFAEMAAPLYPLTKPGTLFNWGPDQQKAYQEIKQALLTAPALGLPDLTKPFELFVDEKQGYAKGVLTQKLGPWRRPVAYLSKKLDPVAAGWPPCLRMVAAIAVLTKDAGKLTMGQPLVILAPHAVEALVKQPPDRWLSNARMTHYQAMLLDTDRVQFGPVVALNPATLLPLPEKEAPHDCLEILAETHGTRPDLTDQPIPDADYTWYTDGSSFLQEGQRRAGAAVTTETEVIWARALPAGTSAQRAELIALTQALKMAEGKKLNVYTDSRYAFATAHVHGEIYRRRGWLTSEGREIKNKNEILALLKALFLPKRLSIIHCPGHQKGNSAEARGNRMADQAAREAAMKAVLETSTLLAGKRTADGSEFEKRTADGSEFESPKKKAKVE

SEQ ID NO: 1054 - protein, 2096 aa, synthetic construct
  source 1..2096: note = Description of Artificial Sequence: Synthetic polypeptide
MPAAKRVKLDGGDKKYSIGLDIGTNSVGWAVITDEYKVPSKKFKVLGNTDRHSIKKNLIGALLFDSGETAEATRLKRTARRRYTRRKNRICYLQEIFSNEMAKVDDSFFHRLEESFLVEEDKKHERHPIFGNIVDEVAYHEKYPTIYHLRKKLVDSTDKADLRLIYLALAHMIKFRGHFLIEGDLNPDNSDVDKLFIQLVQTYNQLFEENPINASGVDAKAILSARLSKSRRLENLIAQLPGEKKNGLFGNLIALSLGLTPNFKSNFDLAEDAKLQLSKDTYDDDLDNLLAQIGDQYADLFLAAKNLSDAILLSDILRVNTEITKAPLSASMIKRYDEHHQDLTLLKALVRQQLPEKYKEIFFDQSKNGYAGYIDGGASQEEFYKFIKPILEKMDGTEELLVKLNREDLLRKQRTFDNGSIPHQIHLGELHAILRRQEDFYPFLKDNREKIEKILTFRIPYYVGPLARGNSRFAWMTRKSEETITPWNFEEVVDKGASAQSFIERMTNFDKNLPNEKVLPKHSLLYEYFTVYNELTKVKYVTEGMRKPAFLSGEQKKAIVDLLFKTNRKVTVKQLKEDYFKKIECFDSVEISGVEDRFNASLGTYHDLLKIIKDKDFLDNEENEDILEDIVLTLTLFEDREMIEERLKTYAHLFDDKVMKQLKRRRYTGWGRLSRKLINGIRDKQSGKTILDFLKSDGFANRNFMQLIHDDSLTFKEDIQKAQVSGQGDSLHEHIANLAGSPAIKKGILQTVKVVDELVKVMGRHKPENIVIEMARENQTTQKGQKNSRERMKRIEEGIKELGSQILKEHPVENTQLQNEKLYLYYLQNGRDMYVDQELDINRLSDYDVDHIVPQSFLKDDSIDNKVLTRSDKARGKSDNVPSEEVVKKMKNYWRQLLNAKLITQRKFDNLTKAERGGLSELDKAGFIKRQLVETRQITKHVAQILDSRMNTKYDENDKLIREVKVITLKSKLVSDFRKDFQFYKVREINNYHHAHDAYLNAVVGTALIKKYPKLESEFVYGDYKVYDVRKMIAKSEQEIGKATAKYFFYSNIMNFFKTEITLANGEIRKRPLIETNGETGEIVWDKGRDFATVRKVLSMPQVNIVKKTEVQTGGFSKESILPKRNSDKLIARKKDWDPKKYGGFDSPTVAYSVLVVAKVEKGKSKKLKSVKELLGITIMERSSFEKNPIDFLEAKGYKEVKKDLIIKLPKYSLFELENGRKRMLASAGELQKGNELALPSKYVNFLYLASHYEKLKGSPEDNEQKQLFVEQHKHYLDEIIEQISEFSKRVILADANLDKVLSAYNKHRDKPIREQAENIIHLFTLTNLGAPAAFKYFDTTIDRKRYTSTKEVLDATLIHQSITGLYETRIDLSQLGGDGGGSSGGGEAAAKGGTLNIEDEYRLHETSKEPDVPLGSTWLSDFPQAWAETGGMGLAVRQAPLIIPLKATSTPVSIKQYPMSQEARLGIKPHIQRLLDQGILVPCQSPWNTPLLPVKKPGTNDYRPVQDLREVNKRVEDIHPTVPNPYNLLSGLPPSHQWYTVLDLKDAFFCLRLHPTSQPLFAFEWRDPEMGISGQLTWTRLPQGFKNSPTLFNEALHRDLADFRIQHPDLILLQYVDDLLLAATSEQDCQRGTRALLQTLGNLGYRASAKKAQICQKQVKYLGYLLKEGQRWLTEARKETVMGQPTPKTPRQLREFLGKAGFCRLFIPGFAEMAAPLYPLTKPGTLFNWGPDQQKAYQEIKQALLTAPALGLPDLTKPFELFVDEKQGYAKGVLTQKLGPWRRPVAYLSKKLDPVAAGWPPCLRMVAAIAVLTKDAGKLTMGQPLVILAPHAVEALVKQPPDRWLSNARMTHYQAMLLDTDRVQFGPVVALNPATLLPLPEKEAPHDCLEILAETHGTRPDLTDQPIPDADYTWYTDGSSFLQEGQRRAGAAVTTETEVIWARALPAGTSAQRAELIALTQALKMAEGKKLNVYTDSRYAFATAHVHGEIYRRRGWLTSEGREIKNKNEILALLKALFLPKRLSIIHCPGHQKGNSAEARGNRMADQAAREAAMKAVLETSTLLAGKRTADGSEFEKRTADGSEFESPKKKAKVE

SEQ ID NO: 1055 - protein, 2094 aa, synthetic construct
  source 1..2094: note = Description of Artificial Sequence: Synthetic polypeptide
MPAAKRVKLDGGDKKYSIGLDIGTNSVGWAVITDEYKVPSKKFKVLGNTDRHSIKKNLIGALLFDSGETAEATRLKRTARRRYTRRKNRICYLQEIFSNEMAKVDDSFFHRLEESFLVEEDKKHERHPIFGNIVDEVAYHEKYPTIYHLRKKLVDSTDKADLRLIYLALAHMIKFRGHFLIEGDLNPDNSDVDKLFIQLVQTYNQLFEENPINASGVDAKAILSARLSKSRRLENLIAQLPGEKKNGLFGNLIALSLGLTPNFKSNFDLAEDAKLQLSKDTYDDDLDNLLAQIGDQYADLFLAAKNLSDAILLSDILRVNTEITKAPLSASMIKRYDEHHQDLTLLKALVRQQLPEKYKEIFFDQSKNGYAGYIDGGASQEEFYKFIKPILEKMDGTEELLVKLNREDLLRKQRTFDNGSIPHQIHLGELHAILRRQEDFYPFLKDNREKIEKILTFRIPYYVGPLARGNSRFAWMTRKSEETITPWNFEEVVDKGASAQSFIERMTNFDKNLPNEKVLPKHSLLYEYFTVYNELTKVKYVTEGMRKPAFLSGEQKKAIVDLLFKTNRKVTVKQLKEDYFKKIECFDSVEISGVEDRFNASLGTYHDLLKIIKDKDFLDNEENEDILEDIVLTLTLFEDREMIEERLKTYAHLFDDKVMKQLKRRRYTGWGRLSRKLINGIRDKQSGKTILDFLKSDGFANRNFMQLIHDDSLTFKEDIQKAQVSGQGDSLHEHIANLAGSPAIKKGILQTVKVVDELVKVMGRHKPENIVIEMARENQTTQKGQKNSRERMKRIEEGIKELGSQILKEHPVENTQLQNEKLYLYYLQNGRDMYVDQELDINRLSDYDVDHIVPQSFLKDDSIDNKVLTRSDKARGKSDNVPSEEVVKKMKNYWRQLLNAKLITQRKFDNLTKAERGGLSELDKAGFIKRQLVETRQITKHVAQILDSRMNTKYDENDKLIREVKVITLKSKLVSDFRKDFQFYKVREINNYHHAHDAYLNAVVGTALIKKYPKLESEFVYGDYKVYDVRKMIAKSEQEIGKATAKYFFYSNIMNFFKTEITLANGEIRKRPLIETNGETGEIVWDKGRDFATVRKVLSMPQVNIVKKTEVQTGGFSKESILPKRNSDKLIARKKDWDPKKYGGFDSPTVAYSVLVVAKVEKGKSKKLKSVKELLGITIMERSSFEKNPIDFLEAKGYKEVKKDLIIKLPKYSLFELENGRKRMLASAGELQKGNELALPSKYVNFLYLASHYEKLKGSPEDNEQKQLFVEQHKHYLDEIIEQISEFSKRVILADANLDKVLSAYNKHRDKPIREQAENIIHLFTLTNLGAPAAFKYFDTTIDRKRYTSTKEVLDATLIHQSITGLYETRIDLSQLGGDGGGGSPAPGGGGGTLNIEDEYRLHETSKEPDVPLGSTWLSDFPQAWAETGGMGLAVRQAPLIIPLKATSTPVSIKQYPMSQEARLGIKPHIQRLLDQGILVPCQSPWNTPLLPVKKPGTNDYRPVQDLREVNKRVEDIHPTVPNPYNLLSGLPPSHQWYTVLDLKDAFFCLRLHPTSQPLFAFEWRDPEMGISGQLTWTRLPQGFKNSPTLFNEALHRDLADFRIQHPDLILLQYVDDLLLAATSEQDCQRGTRALLQTLGNLGYRASAKKAQICQKQVKYLGYLLKEGQRWLTEARKETVMGQPTPKTPRQLREFLGKAGFCRLFIPGFAEMAAPLYPLTKPGTLFNWGPDQQKAYQEIKQALLTAPALGLPDLTKPFELFVDEKQGYAKGVLTQKLGPWRRPVAYLSKKLDPVAAGWPPCLRMVAAIAVLTKDAGKLTMGQPLVILAPHAVEALVKQPPDRWLSNARMTHYQAMLLDTDRVQFGPVVALNPATLLPLPEKEAPHDCLEILAETHGTRPDLTDQPIPDADYTWYTDGSSFLQEGQRRAGAAVTTETEVIWARALPAGTSAQRAELIALTQALKMAEGKKLNVYTDSRYAFATAHVHGEIYRRRGWLTSEGREIKNKNEILALLKALFLPKRLSIIHCPGHQKGNSAEARGNRMADQAAREAAMKAVLETSTLLAGKRTADGSEFEKRTADGSEFESPKKKAKVE

SEQ ID NO: 1056 - protein, 2096 aa, synthetic construct
  source 1..2096: note = Description of Artificial Sequence: Synthetic polypeptide
MPAAKRVKLDGGDKKYSIGLDIGTNSVGWAVITDEYKVPSKKFKVLGNTDRHSIKKNLIGALLFDSGETAEATRLKRTARRRYTRRKNRICYLQEIFSNEMAKVDDSFFHRLEESFLVEEDKKHERHPIFGNIVDEVAYHEKYPTIYHLRKKLVDSTDKADLRLIYLALAHMIKFRGHFLIEGDLNPDNSDVDKLFIQLVQTYNQLFEENPINASGVDAKAILSARLSKSRRLENLIAQLPGEKKNGLFGNLIALSLGLTPNFKSNFDLAEDAKLQLSKDTYDDDLDNLLAQIGDQYADLFLAAKNLSDAILLSDILRVNTEITKAPLSASMIKRYDEHHQDLTLLKALVRQQLPEKYKEIFFDQSKNGYAGYIDGGASQEEFYKFIKPILEKMDGTEELLVKLNREDLLRKQRTFDNGSIPHQIHLGELHAILRRQEDFYPFLKDNREKIEKILTFRIPYYVGPLARGNSRFAWMTRKSEETITPWNFEEVVDKGASAQSFIERMTNFDKNLPNEKVLPKHSLLYEYFTVYNELTKVKYVTEGMRKPAFLSGEQKKAIVDLLFKTNRKVTVKQLKEDYFKKIECFDSVEISGVEDRFNASLGTYHDLLKIIKDKDFLDNEENEDILEDIVLTLTLFEDREMIEERLKTYAHLFDDKVMKQLKRRRYTGWGRLSRKLINGIRDKQSGKTILDFLKSDGFANRNFMQLIHDDSLTFKEDIQKAQVSGQGDSLHEHIANLAGSPAIKKGILQTVKVVDELVKVMGRHKPENIVIEMARENQTTQKGQKNSRERMKRIEEGIKELGSQILKEHPVENTQLQNEKLYLYYLQNGRDMYVDQELDINRLSDYDVDHIVPQSFLKDDSIDNKVLTRSDKARGKSDNVPSEEVVKKMKNYWRQLLNAKLITQRKFDNLTKAERGGLSELDKAGFIKRQLVETRQITKHVAQILDSRMNTKYDENDKLIREVKVITLKSKLVSDFRKDFQFYKVREINNYHHAHDAYLNAVVGTALIKKYPKLESEFVYGDYKVYDVRKMIAKSEQEIGKATAKYFFYSNIMNFFKTEITLANGEIRKRPLIETNGETGEIVWDKGRDFATVRKVLSMPQVNIVKKTEVQTGGFSKESILPKRNSDKLIARKKDWDPKKYGGFDSPTVAYSVLVVAKVEKGKSKKLKSVKELLGITIMERSSFEKNPIDFLEAKGYKEVKKDLIIKLPKYSLFELENGRKRMLASAGELQKGNELALPSKYVNFLYLASHYEKLKGSPEDNEQKQLFVEQHKHYLDEIIEQISEFSKRVILADANLDKVLSAYNKHRDKPIREQAENIIHLFTLTNLGAPAAFKYFDTTIDRKRYTSTKEVLDATLIHQSITGLYETRIDLSQLGGDGGEAAAKGGGGSSGGTLNIEDEYRLHETSKEPDVPLGSTWLSDFPQAWAETGGMGLAVRQAPLIIPLKATSTPVSIKQYPMSQEARLGIKPHIQRLLDQGILVPCQSPWNTPLLPVKKPGTNDYRPVQDLREVNKRVEDIHPTVPNPYNLLSGLPPSHQWYTVLDLKDAFFCLRLHPTSQPLFAFEWRDPEMGISGQLTWTRLPQGFKNSPTLFNEALHRDLADFRIQHPDLILLQYVDDLLLAATSEQDCQRGTRALLQTLGNLGYRASAKKAQICQKQVKYLGYLLKEGQRWLTEARKETVMGQPTPKTPRQLREFLGKAGFCRLFIPGFAEMAAPLYPLTKPGTLFNWGPDQQKAYQEIKQALLTAPALGLPDLTKPFELFVDEKQGYAKGVLTQKLGPWRRPVAYLSKKLDPVAAGWPPCLRMVAAIAVLTKDAGKLTMGQPLVILAPHAVEALVKQPPDRWLSNARMTHYQAMLLDTDRVQFGPVVALNPATLLPLPEKEAPHDCLEILAETHGTRPDLTDQPIPDADYTWYTDGSSFLQEGQRRAGAAVTTETEVIWARALPAGTSAQRAELIALTQALKMAEGKKLNVYTDSRYAFATAHVHGEIYRRRGWLTSEGREIKNKNEILALLKALFLPKRLSIIHCPGHQKGNSAEARGNRMADQAAREAAMKAVLETSTLLAGKRTADGSEFEKRTADGSEFESPKKKAKVE

SEQ ID NO: 1057 - protein, 2089 aa, synthetic construct
  source 1..2089: note = Description of Artificial Sequence: Synthetic polypeptide
MPAAKRVKLDGGDKKYSIGLDIGTNSVGWAVITDEYKVPSKKFKVLGNTDRHSIKKNLIGALLFDSGETAEATRLKRTARRRYTRRKNRICYLQEIFSNEMAKVDDSFFHRLEESFLVEEDKKHERHPIFGNIVDEVAYHEKYPTIYHLRKKLVDSTDKADLRLIYLALAHMIKFRGHFLIEGDLNPDNSDVDKLFIQLVQTYNQLFEENPINASGVDAKAILSARLSKSRRLENLIAQLPGEKKNGLFGNLIALSLGLTPNFKSNFDLAEDAKLQLSKDTYDDDLDNLLAQIGDQYADLFLAAKNLSDAILLSDILRVNTEITKAPLSASMIKRYDEHHQDLTLLKALVRQQLPEKYKEIFFDQSKNGYAGYIDGGASQEEFYKFIKPILEKMDGTEELLVKLNREDLLRKQRTFDNGSIPHQIHLGELHAILRRQEDFYPFLKDNREKIEKILTFRIPYYVGPLARGNSRFAWMTRKSEETITPWNFEEVVDKGASAQSFIERMTNFDKNLPNEKVLPKHSLLYEYFTVYNELTKVKYVTEGMRKPAFLSGEQKKAIVDLLFKTNRKVTVKQLKEDYFKKIECFDSVEISGVEDRFNASLGTYHDLLKIIKDKDFLDNEENEDILEDIVLTLTLFEDREMIEERLKTYAHLFDDKVMKQLKRRRYTGWGRLSRKLINGIRDKQSGKTILDFLKSDGFANRNFMQLIHDDSLTFKEDIQKAQVSGQGDSLHEHIANLAGSPAIKKGILQTVKVVDELVKVMGRHKPENIVIEMARENQTTQKGQKNSRERMKRIEEGIKELGSQILKEHPVENTQLQNEKLYLYYLQNGRDMYVDQELDINRLSDYDVDHIVPQSFLKDDSIDNKVLTRSDKARGKSDNVPSEEVVKKMKNYWRQLLNAKLITQRKFDNLTKAERGGLSELDKAGFIKRQLVETRQITKHVAQILDSRMNTKYDENDKLIREVKVITLKSKLVSDFRKDFQFYKVREINNYHHAHDAYLNAVVGTALIKKYPKLESEFVYGDYKVYDVRKMIAKSEQEIGKATAKYFFYSNIMNFFKTEITLANGEIRKRPLIETNGETGEIVWDKGRDFATVRKVLSMPQVNIVKKTEVQTGGFSKESILPKRNSDKLIARKKDWDPKKYGGFDSPTVAYSVLVVAKVEKGKSKKLKSVKELLGITIMERSSFEKNPIDFLEAKGYKEVKKDLIIKLPKYSLFELENGRKRMLASAGELQKGNELALPSKYVNFLYLASHYEKLKGSPEDNEQKQLFVEQHKHYLDEIIEQISEFSKRVILADANLDKVLSAYNKHRDKPIREQAENIIHLFTLTNLGAPAAFKYFDTTIDRKRYTSTKEVLDATLIHQSITGLYETRIDLSQLGGDGGGGGGGGTLNIEDEYRLHETSKEPDVPLGSTWLSDFPQAWAETGGMGLAVRQAPLIIPLKATSTPVSIKQYPMSQEARLGIKPHIQRLLDQGILVPCQSPWNTPLLPVKKPGTNDYRPVQDLREVNKRVEDIHPTVPNPYNLLSGLPPSHQWYTVLDLKDAFFCLRLHPTSQPLFAFEWRDPEMGISGQLTWTRLPQGFKNSPTLFNEALHRDLADFRIQHPDLILLQYVDDLLLAATSEQDCQRGTRALLQTLGNLGYRASAKKAQICQKQVKYLGYLLKEGQRWLTEARKETVMGQPTPKTPRQLREFLGKAGFCRLFIPGFAEMAAPLYPLTKPGTLFNWGPDQQKAYQEIKQALLTAPALGLPDLTKPFELFVDEKQGYAKGVLTQKLGPWRRPVAYLSKKLDPVAAGWPPCLRMVAAIAVLTKDAGKLTMGQPLVILAPHAVEALVKQPPDRWLSNARMTHYQAMLLDTDRVQFGPVVALNPATLLPLPEKEAPHDCLEILAETHGTRPDLTDQPIPDADYTWYTDGSSFLQEGQRRAGAAVTTETEVIWARALPAGTSAQRAELIALTQALKMAEGKKLNVYTDSRYAFATAHVHGEIYRRRGWLTSEGREIKNKNEILALLKALFLPKRLSIIHCPGHQKGNSAEARGNRMADQAAREAAMKAVLETSTLLAGKRTADGSEFEKRTADGSEFESPKKKAKVE

SEQ ID NO: 1058 - protein, 2096 aa, synthetic construct
  source 1..2096: note = Description of Artificial Sequence: Synthetic polypeptide
MPAAKRVKLDGGDKKYSIGLDIGTNSVGWAVITDEYKVPSKKFKVLGNTDRHSIKKNLIGALLFDSGETAEATRLKRTARRRYTRRKNRICYLQEIFSNEMAKVDDSFFHRLEESFLVEEDKKHERHPIFGNIVDEVAYHEKYPTIYHLRKKLVDSTDKADLRLIYLALAHMIKFRGHFLIEGDLNPDNSDVDKLFIQLVQTYNQLFEENPINASGVDAKAILSARLSKSRRLENLIAQLPGEKKNGLFGNLIALSLGLTPNFKSNFDLAEDAKLQLSKDTYDDDLDNLLAQIGDQYADLFLAAKNLSDAILLSDILRVNTEITKAPLSASMIKRYDEHHQDLTLLKALVRQQLPEKYKEIFFDQSKNGYAGYIDGGASQEEFYKFIKPILEKMDGTEELLVKLNREDLLRKQRTFDNGSIPHQIHLGELHAILRRQEDFYPFLKDNREKIEKILTFRIPYYVGPLARGNSRFAWMTRKSEETITPWNFEEVVDKGASAQSFIERMTNFDKNLPNEKVLPKHSLLYEYFTVYNELTKVKYVTEGMRKPAFLSGEQKKAIVDLLFKTNRKVTVKQLKEDYFKKIECFDSVEISGVEDRFNASLGTYHDLLKIIKDKDFLDNEENEDILEDIVLTLTLFEDREMIEERLKTYAHLFDDKVMKQLKRRRYTGWGRLSRKLINGIRDKQSGKTILDFLKSDGFANRNFMQLIHDDSLTFKEDIQKAQVSGQGDSLHEHIANLAGSPAIKKGILQTVKVVDELVKVMGRHKPENIVIEMARENQTTQKGQKNSRERMKRIEEGIKELGSQILKEHPVENTQLQNEKLYLYYLQNGRDMYVDQELDINRLSDYDVDHIVPQSFLKDDSIDNKVLTRSDKARGKSDNVPSEEVVKKMKNYWRQLLNAKLITQRKFDNLTKAERGGLSELDKAGFIKRQLVETRQITKHVAQILDSRMNTKYDENDKLIREVKVITLKSKLVSDFRKDFQFYKVREINNYHHAHDAYLNAVVGTALIKKYPKLESEFVYGDYKVYDVRKMIAKSEQEIGKATAKYFFYSNIMNFFKTEITLANGEIRKRPLIETNGETGEIVWDKGRDFATVRKVLSMPQVNIVKKTEVQTGGFSKESILPKRNSDKLIARKKDWDPKKYGGFDSPTVAYSVLVVAKVEKGKSKKLKSVKELLGITIMERSSFEKNPIDFLEAKGYKEVKKDLIIKLPKYSLFELENGRKRMLASAGELQKGNELALPSKYVNFLYLASHYEKLKGSPEDNEQKQLFVEQHKHYLDEIIEQISEFSKRVILADANLDKVLSAYNKHRDKPIREQAENIIHLFTLTNLGAPAAFKYFDTTIDRKRYTSTKEVLDATLIHQSITGLYETRIDLSQLGGDGGEAAAKGGGPAPGGTLNIEDEYRLHETSKEPDVPLGSTWLSDFPQAWAETGGMGLAVRQAPLIIPLKATSTPVSIKQYPMSQEARLGIKPHIQRLLDQGILVPCQSPWNTPLLPVKKPGTNDYRPVQDLREVNKRVEDIHPTVPNPYNLLSGLPPSHQWYTVLDLKDAFFCLRLHPTSQPLFAFEWRDPEMGISGQLTWTRLPQGFKNSPTLFNEALHRDLADFRIQHPDLILLQYVDDLLLAATSEQDCQRGTRALLQTLGNLGYRASAKKAQICQKQVKYLGYLLKEGQRWLTEARKETVMGQPTPKTPRQLREFLGKAGFCRLFIPGFAEMAAPLYPLTKPGTLFNWGPDQQKAYQEIKQALLTAPALGLPDLTKPFELFVDEKQGYAKGVLTQKLGPWRRPVAYLSKKLDPVAAGWPPCLRMVAAIAVLTKDAGKLTMGQPLVILAPHAVEALVKQPPDRWLSNARMTHYQAMLLDTDRVQFGPVVALNPATLLPLPEKEAPHDCLEILAETHGTRPDLTDQPIPDADYTWYTDGSSFLQEGQRRAGAAVTTETEVIWARALPAGTSAQRAELIALTQALKMAEGKKLNVYTDSRYAFATAHVHGEIYRRRGWLTSEGREIKNKNEILALLKALFLPKRLSIIHCPGHQKGNSAEARGNRMADQAAREAAMKAVLETSTLLAGKRTADGSEFEKRTADGSEFESPKKKAKVE

SEQ ID NO: 1059 - protein, 2096 aa, synthetic construct
  source 1..2096: note = Description of Artificial Sequence: Synthetic polypeptide
MPAAKRVKLDGGDKKYSIGLDIGTNSVGWAVITDEYKVPSKKFKVLGNTDRHSIKKNLIGALLFDSGETAEATRLKRTARRRYTRRKNRICYLQEIFSNEMAKVDDSFFHRLEESFLVEEDKKHERHPIFGNIVDEVAYHEKYPTIYHLRKKLVDSTDKADLRLIYLALAHMIKFRGHFLIEGDLNPDNSDVDKLFIQLVQTYNQLFEENPINASGVDAKAILSARLSKSRRLENLIAQLPGEKKNGLFGNLIALSLGLTPNFKSNFDLAEDAKLQLSKDTYDDDLDNLLAQIGDQYADLFLAAKNLSDAILLSDILRVNTEITKAPLSASMIKRYDEHHQDLTLLKALVRQQLPEKYKEIFFDQSKNGYAGYIDGGASQEEFYKFIKPILEKMDGTEELLVKLNREDLLRKQRTFDNGSIPHQIHLGELHAILRRQEDFYPFLKDNREKIEKILTFRIPYYVGPLARGNSRFAWMTRKSEETITPWNFEEVVDKGASAQSFIERMTNFDKNLPNEKVLPKHSLLYEYFTVYNELTKVKYVTEGMRKPAFLSGEQKKAIVDLLFKTNRKVTVKQLKEDYFKKIECFDSVEISGVEDRFNASLGTYHDLLKIIKDKDFLDNEENEDILEDIVLTLTLFEDREMIEERLKTYAHLFDDKVMKQLKRRRYTGWGRLSRKLINGIRDKQSGKTILDFLKSDGFANRNFMQLIHDDSLTFKEDIQKAQVSGQGDSLHEHIANLAGSPAIKKGILQTVKVVDELVKVMGRHKPENIVIEMARENQTTQKGQKNSRERMKRIEEGIKELGSQILKEHPVENTQLQNEKLYLYYLQNGRDMYVDQELDINRLSDYDVDHIVPQSFLKDDSIDNKVLTRSDKARGKSDNVPSEEVVKKMKNYWRQLLNAKLITQRKFDNLTKAERGGLSELDKAGFIKRQLVETRQITKHVAQILDSRMNTKYDENDKLIREVKVITLKSKLVSDFRKDFQFYKVREINNYHHAHDAYLNAVVGTALIKKYPKLESEFVYGDYKVYDVRKMIAKSEQEIGKATAKYFFYSNIMNFFKTEITLANGEIRKRPLIETNGETGEIVWDKGRDFATVRKVLSMPQVNIVKKTEVQTGGFSKESILPKRNSDKLIARKKDWDPKKYGGFDSPTVAYSVLVVAKVEKGKSKKLKSVKELLGITIMERSSFEKNPIDFLEAKGYKEVKKDLIIKLPKYSLFELENGRKRMLASAGELQKGNELALPSKYVNFLYLASHYEKLKGSPEDNEQKQLFVEQHKHYLDEIIEQISEFSKRVILADANLDKVLSAYNKHRDKPIREQAENIIHLFTLTNLGAPAAFKYFDTTIDRKRYTSTKEVLDATLIHQSITGLYETRIDLSQLGGDGGGGSGSSEAAAKGGTLNIEDEYRLHETSKEPDVPLGSTWLSDFPQAWAETGGMGLAVRQAPLIIPLKATSTPVSIKQYPMSQEARLGIKPHIQRLLDQGILVPCQSPWNTPLLPVKKPGTNDYRPVQDLREVNKRVEDIHPTVPNPYNLLSGLPPSHQWYTVLDLKDAFFCLRLHPTSQPLFAFEWRDPEMGISGQLTWTRLPQGFKNSPTLFNEALHRDLADFRIQHPDLILLQYVDDLLLAATSEQDCQRGTRALLQTLGNLGYRASAKKAQICQKQVKYLGYLLKEGQRWLTEARKETVMGQPTPKTPRQLREFLGKAGFCRLFIPGFAEMAAPLYPLTKPGTLFNWGPDQQKAYQEIKQALLTAPALGLPDLTKPFELFVDEKQGYAKGVLTQKLGPWRRPVAYLSKKLDPVAAGWPPCLRMVAAIAVLTKDAGKLTMGQPLVILAPHAVEALVKQPPDRWLSNARMTHYQAMLLDTDRVQFGPVVALNPATLLPLPEKEAPHDCLEILAETHGTRPDLTDQPIPDADYTWYTDGSSFLQEGQRRAGAAVTTETEVIWARALPAGTSAQRAELIALTQALKMAEGKKLNVYTDSRYAFATAHVHGEIYRRRGWLTSEGREIKNKNEILALLKALFLPKRLSIIHCPGHQKGNSAEARGNRMADQAAREAAMKAVLETSTLLAGKRTADGSEFEKRTADGSEFESPKKKAKVE

SEQ ID NO: 1060 - protein, 2096 aa, synthetic construct
  source 1..2096: note = Description of Artificial Sequence: Synthetic polypeptide
MPAAKRVKLDGGDKKYSIGLDIGTNSVGWAVITDEYKVPSKKFKVLGNTDRHSIKKNLIGALLFDSGETAEATRLKRTARRRYTRRKNRICYLQEIFSNEMAKVDDSFFHRLEESFLVEEDKKHERHPIFGNIVDEVAYHEKYPTIYHLRKKLVDSTDKADLRLIYLALAHMIKFRGHFLIEGDLNPDNSDVDKLFIQLVQTYNQLFEENPINASGVDAKAILSARLSKSRRLENLIAQLPGEKKNGLFGNLIALSLGLTPNFKSNFDLAEDAKLQLSKDTYDDDLDNLLAQIGDQYADLFLAAKNLSDAILLSDILRVNTEITKAPLSASMIKRYDEHHQDLTLLKALVRQQLPEKYKEIFFDQSKNGYAGYIDGGASQEEFYKFIKPILEKMDGTEELLVKLNREDLLRKQRTFDNGSIPHQIHLGELHAILRRQEDFYPFLKDNREKIEKILTFRIPYYVGPLARGNSRFAWMTRKSEETITPWNFEEVVDKGASAQSFIERMTNFDKNLPNEKVLPKHSLLYEYFTVYNELTKVKYVTEGMRKPAFLSGEQKKAIVDLLFKTNRKVTVKQLKEDYFKKIECFDSVEISGVEDRFNASLGTYHDLLKIIKDKDFLDNEENEDILEDIVLTLTLFEDREMIEERLKTYAHLFDDKVMKQLKRRRYTGWGRLSRKLINGIRDKQSGKTILDFLKSDGFANRNFMQLIHDDSLTFKEDIQKAQVSGQGDSLHEHIANLAGSPAIKKGILQTVKVVDELVKVMGRHKPENIVIEMARENQTTQKGQKNSRERMKRIEEGIKELGSQILKEHPVENTQLQNEKLYLYYLQNGRDMYVDQELDINRLSDYDVDHIVPQSFLKDDSIDNKVLTRSDKARGKSDNVPSEEVVKKMKNYWRQLLNAKLITQRKFDNLTKAERGGLSELDKAGFIKRQLVETRQITKHVAQILDSRMNTKYDENDKLIREVKVITLKSKLVSDFRKDFQFYKVREINNYHHAHDAYLNAVVGTALIKKYPKLESEFVYGDYKVYDVRKMIAKSEQEIGKATAKYFFYSNIMNFFKTEITLANGEIRKRPLIETNGETGEIVWDKGRDFATVRKVLSMPQVNIVKKTEVQTGGFSKESILPKRNSDKLIARKKDWDPKKYGGFDSPTVAYSVLVVAKVEKGKSKKLKSVKELLGITIMERSSFEKNPIDFLEAKGYKEVKKDLIIKLPKYSLFELENGRKRMLASAGELQKGNELALPSKYVNFLYLASHYEKLKGSPEDNEQKQLFVEQHKHYLDEIIEQISEFSKRVILADANLDKVLSAYNKHRDKPIREQAENIIHLFTLTNLGAPAAFKYFDTTIDRKRYTSTKEVLDATLIHQSITGLYETRIDLSQLGGDGGGSSGGSEAAAKGGTLNIEDEYRLHETSKEPDVPLGSTWLSDFPQAWAETGGMGLAVRQAPLIIPLKATSTPVSIKQYPMSQEARLGIKPHIQRLLDQGILVPCQSPWNTPLLPVKKPGTNDYRPVQDLREVNKRVEDIHPTVPNPYNLLSGLPPSHQWYTVLDLKDAFFCLRLHPTSQPLFAFEWRDPEMGISGQLTWTRLPQGFKNSPTLFNEALHRDLADFRIQHPDLILLQYVDDLLLAATSEQDCQRGTRALLQTLGNLGYRASAKKAQICQKQVKYLGYLLKEGQRWLTEARKETVMGQPTPKTPRQLREFLGKAGFCRLFIPGFAEMAAPLYPLTKPGTLFNWGPDQQKAYQEIKQALLTAPALGLPDLTKPFELFVDEKQGYAKGVLTQKLGPWRRPVAYLSKKLDPVAAGWPPCLRMVAAIAVLTKDAGKLTMGQPLVILAPHAVEALVKQPPDRWLSNARMTHYQAMLLDTDRVQFGPVVALNPATLLPLPEKEAPHDCLEILAETHGTRPDLTDQPIPDADYTWYTDGSSFLQEGQRRAGAAVTTETEVIWARALPAGTSAQRAELIALTQALKMAEGKKLNVYTDSRYAFATAHVHGEIYRRRGWLTSEGREIKNKNEILALLKALFLPKRLSIIHCPGHQKGNSAEARGNRMADQAAREAAMKAVLETSTLLAGKRTADGSEFEKRTADGSEFESPKKKAKVE

SEQ ID NO: 1061 - protein, 2094 aa, synthetic construct
  source 1..2094: note = Description of Artificial Sequence: Synthetic polypeptide
MPAAKRVKLDGGDKKYSIGLDIGTNSVGWAVITDEYKVPSKKFKVLGNTDRHSIKKNLIGALLFDSGETAEATRLKRTARRRYTRRKNRICYLQEIFSNEMAKVDDSFFHRLEESFLVEEDKKHERHPIFGNIVDEVAYHEKYPTIYHLRKKLVDSTDKADLRLIYLALAHMIKFRGHFLIEGDLNPDNSDVDKLFIQLVQTYNQLFEENPINASGVDAKAILSARLSKSRRLENLIAQLPGEKKNGLFGNLIALSLGLTPNFKSNFDLAEDAKLQLSKDTYDDDLDNLLAQIGDQYADLFLAAKNLSDAILLSDILRVNTEITKAPLSASMIKRYDEHHQDLTLLKALVRQQLPEKYKEIFFDQSKNGYAGYIDGGASQEEFYKFIKPILEKMDGTEELLVKLNREDLLRKQRTFDNGSIPHQIHLGELHAILRRQEDFYPFLKDNREKIEKILTFRIPYYVGPLARGNSRFAWMTRKSEETITPWNFEEVVDKGASAQSFIERMTNFDKNLPNEKVLPKHSLLYEYFTVYNELTKVKYVTEGMRKPAFLSGEQKKAIVDLLFKTNRKVTVKQLKEDYFKKIECFDSVEISGVEDRFNASLGTYHDLLKIIKDKDFLDNEENEDILEDIVLTLTLFEDREMIEERLKTYAHLFDDKVMKQLKRRRYTGWGRLSRKLINGIRDKQSGKTILDFLKSDGFANRNFMQLIHDDSLTFKEDIQKAQVSGQGDSLHEHIANLAGSPAIKKGILQTVKVVDELVKVMGRHKPENIVIEMARENQTTQKGQKNSRERMKRIEEGIKELGSQILKEHPVENTQLQNEKLYLYYLQNGRDMYVDQELDINRLSDYDVDHIVPQSFLKDDSIDNKVLTRSDKARGKSDNVPSEEVVKKMKNYWRQLLNAKLITQRKFDNLTKAERGGLSELDKAGFIKRQLVETRQITKHVAQILDSRMNTKYDENDKLIREVKVITLKSKLVSDFRKDFQFYKVREINNYHHAHDAYLNAVVGTALIKKYPKLESEFVYGDYKVYDVRKMIAKSEQEIGKATAKYFFYSNIMNFFKTEITLANGEIRKRPLIETNGETGEIVWDKGRDFATVRKVLSMPQVNIVKKTEVQTGGFSKESILPKRNSDKLIARKKDWDPKKYGGFDSPTVAYSVLVVAKVEKGKSKKLKSVKELLGITIMERSSFEKNPIDFLEAKGYKEVKKDLIIKLPKYSLFELENGRKRMLASAGELQKGNELALPSKYVNFLYLASHYEKLKGSPEDNEQKQLFVEQHKHYLDEIIEQISEFSKRVILADANLDKVLSAYNKHRDKPIREQAENIIHLFTLTNLGAPAAFKYFDTTIDRKRYTSTKEVLDATLIHQSITGLYETRIDLSQLGGDGGGSSGGSPAPGGTLNIEDEYRLHETSKEPDVPLGSTWLSDFPQAWAETGGMGLAVRQAPLIIPLKATSTPVSIKQYPMSQEARLGIKPHIQRLLDQGILVPCQSPWNTPLLPVKKPGTNDYRPVQDLREVNKRVEDIHPTVPNPYNLLSGLPPSHQWYTVLDLKDAFFCLRLHPTSQPLFAFEWRDPEMGISGQLTWTRLPQGFKNSPTLFNEALHRDLADFRIQHPDLILLQYVDDLLLAATSEQDCQRGTRALLQTLGNLGYRASAKKAQICQKQVKYLGYLLKEGQRWLTEARKETVMGQPTPKTPRQLREFLGKAGFCRLFIPGFAEMAAPLYPLTKPGTLFNWGPDQQKAYQEIKQALLTAPALGLPDLTKPFELFVDEKQGYAKGVLTQKLGPWRRPVAYLSKKLDPVAAGWPPCLRMVAAIAVLTKDAGKLTMGQPLVILAPHAVEALVKQPPDRWLSNARMTHYQAMLLDTDRVQFGPVVALNPATLLPLPEKEAPHDCLEILAETHGTRPDLTDQPIPDADYTWYTDGSSFLQEGQRRAGAAVTTETEVIWARALPAGTSAQRAELIALTQALKMAEGKKLNVYTDSRYAFATAHVHGEIYRRRGWLTSEGREIKNKNEILALLKALFLPKRLSIIHCPGHQKGNSAEARGNRMADQAAREAAMKAVLETSTLLAGKRTADGSEFEKRTADGSEFESPKKKAKVE

SEQ ID NO: 1062 - protein, 2091 aa, synthetic construct
  source 1..2091: note = Description of Artificial Sequence: Synthetic polypeptide
MPAAKRVKLDGGDKKYSIGLDIGTNSVGWAVITDEYKVPSKKFKVLGNTDRHSIKKNLIGALLFDSGETAEATRLKRTARRRYTRRKNRICYLQEIFSNEMAKVDDSFFHRLEESFLVEEDKKHERHPIFGNIVDEVAYHEKYPTIYHLRKKLVDSTDKADLRLIYLALAHMIKFRGHFLIEGDLNPDNSDVDKLFIQLVQTYNQLFEENPINASGVDAKAILSARLSKSRRLENLIAQLPGEKKNGLFGNLIALSLGLTPNFKSNFDLAEDAKLQLSKDTYDDDLDNLLAQIGDQYADLFLAAKNLSDAILLSDILRVNTEITKAPLSASMIKRYDEHHQDLTLLKALVRQQLPEKYKEIFFDQSKNGYAGYIDGGASQEEFYKFIKPILEKMDGTEELLVKLNREDLLRKQRTFDNGSIPHQIHLGELHAILRRQEDFYPFLKDNREKIEKILTFRIPYYVGPLARGNSRFAWMTRKSEETITPWNFEEVVDKGASAQSFIERMTNFDKNLPNEKVLPKHSLLYEYFTVYNELTKVKYVTEGMRKPAFLSGEQKKAIVDLLFKTNRKVTVKQLKEDYFKKIECFDSVEISGVEDRFNASLGTYHDLLKIIKDKDFLDNEENEDILEDIVLTLTLFEDREMIEERLKTYAHLFDDKVMKQLKRRRYTGWGRLSRKLINGIRDKQSGKTILDFLKSDGFANRNFMQLIHDDSLTFKEDIQKAQVSGQGDSLHEHIANLAGSPAIKKGILQTVKVVDELVKVMGRHKPENIVIEMARENQTTQKGQKNSRERMKRIEEGIKELGSQILKEHPVENTQLQNEKLYLYYLQNGRDMYVDQELDINRLSDYDVDHIVPQSFLKDDSIDNKVLTRSDKARGKSDNVPSEEVVKKMKNYWRQLLNAKLITQRKFDNLTKAERGGLSELDKAGFIKRQLVETRQITKHVAQILDSRMNTKYDENDKLIREVKVITLKSKLVSDFRKDFQFYKVREINNYHHAHDAYLNAVVGTALIKKYPKLESEFVYGDYKVYDVRKMIAKSEQEIGKATAKYFFYSNIMNFFKTEITLANGEIRKRPLIETNGETGEIVWDKGRDFATVRKVLSMPQVNIVKKTEVQTGGFSKESILPKRNSDKLIARKKDWDPKKYGGFDSPTVAYSVLVVAKVEKGKSKKLKSVKELLGITIMERSSFEKNPIDFLEAKGYKEVKKDLIIKLPKYSLFELENGRKRMLASAGELQKGNELALPSKYVNFLYLASHYEKLKGSPEDNEQKQLFVEQHKHYLDEIIEQISEFSKRVILADANLDKVLSAYNKHRDKPIREQAENIIHLFTLTNLGAPAAFKYFDTTIDRKRYTSTKEVLDATLIHQSITGLYETRIDLSQLGGDGGGSSGGSGGTLNIEDEYRLHETSKEPDVPLGSTWLSDFPQAWAETGGMGLAVRQAPLIIPLKATSTPVSIKQYPMSQEARLGIKPHIQRLLDQGILVPCQSPWNTPLLPVKKPGTNDYRPVQDLREVNKRVEDIHPTVPNPYNLLSGLPPSHQWYTVLDLKDAFFCLRLHPTSQPLFAFEWRDPEMGISGQLTWTRLPQGFKNSPTLFNEALHRDLADFRIQHPDLILLQYVDDLLLAATSEQDCQRGTRALLQTLGNLGYRASAKKAQICQKQVKYLGYLLKEGQRWLTEARKETVMGQPTPKTPRQLREFLGKAGFCRLFIPGFAEMAAPLYPLTKPGTLFNWGPDQQKAYQEIKQALLTAPALGLPDLTKPFELFVDEKQGYAKGVLTQKLGPWRRPVAYLSKKLDPVAAGWPPCLRMVAAIAVLTKDAGKLTMGQPLVILAPHAVEALVKQPPDRWLSNARMTHYQAMLLDTDRVQFGPVVALNPATLLPLPEKEAPHDCLEILAETHGTRPDLTDQPIPDADYTWYTDGSSFLQEGQRRAGAAVTTETEVIWARALPAGTSAQRAELIALTQALKMAEGKKLNVYTDSRYAFATAHVHGEIYRRRGWLTSEGREIKNKNEILALLKALFLPKRLSIIHCPGHQKGNSAEARGNRMADQAAREAAMKAVLETSTLLAGKRTADGSEFEKRTADGSEFESPKKKAKVE

SEQ ID NO: 1063 - protein, 2094 aa, synthetic construct
  source 1..2094: note = Description of Artificial Sequence: Synthetic polypeptide
MPAAKRVKLDGGDKKYSIGLDIGTNSVGWAVITDEYKVPSKKFKVLGNTDRHSIKKNLIGALLFDSGETAEATRLKRTARRRYTRRKNRICYLQEIFSNEMAKVDDSFFHRLEESFLVEEDKKHERHPIFGNIVDEVAYHEKYPTIYHLRKKLVDSTDKADLRLIYLALAHMIKFRGHFLIEGDLNPDNSDVDKLFIQLVQTYNQLFEENPINASGVDAKAILSARLSKSRRLENLIAQLPGEKKNGLFGNLIALSLGLTPNFKSNFDLAEDAKLQLSKDTYDDDLDNLLAQIGDQYADLFLAAKNLSDAILLSDILRVNTEITKAPLSASMIKRYDEHHQDLTLLKALVRQQLPEKYKEIFFDQSKNGYAGYIDGGASQEEFYKFIKPILEKMDGTEELLVKLNREDLLRKQRTFDNGSIPHQIHLGELHAILRRQEDFYPFLKDNREKIEKILTFRIPYYVGPLARGNSRFAWMTRKSEETITPWNFEEVVDKGASAQSFIERMTNFDKNLPNEKVLPKHSLLYEYFTVYNELTKVKYVTEGMRKPAFLSGEQKKAIVDLLFKTNRKVTVKQLKEDYFKKIECFDSVEISGVEDRFNASLGTYHDLLKIIKDKDFLDNEENEDILEDIVLTLTLFEDREMIEERLKTYAHLFDDKVMKQLKRRRYTGWGRLSRKLINGIRDKQSGKTILDFLKSDGFANRNFMQLIHDDSLTFKEDIQKAQVSGQGDSLHEHIANLAGSPAIKKGILQTVKVVDELVKVMGRHKPENIVIEMARENQTTQKGQKNSRERMKRIEEGIKELGSQILKEHPVENTQLQNEKLYLYYLQNGRDMYVDQELDINRLSDYDVDHIVPQSFLKDDSIDNKVLTRSDKARGKSDNVPSEEVVKKMKNYWRQLLNAKLITQRKFDNLTKAERGGLSELDKAGFIKRQLVETRQITKHVAQILDSRMNTKYDENDKLIREVKVITLKSKLVSDFRKDFQFYKVREINNYHHAHDAYLNAVVGTALIKKYPKLESEFVYGDYKVYDVRKMIAKSEQEIGKATAKYFFYSNIMNFFKTEITLANGEIRKRPLIETNGETGEIVWDKGRDFATVRKVLSMPQVNIVKKTEVQTGGFSKESILPKRNSDKLIARKKDWDPKKYGGFDSPTVAYSVLVVAKVEKGKSKKLKSVKELLGITIMERSSFEKNPIDFLEAKGYKEVKKDLIIKLPKYSLFELENGRKRMLASAGELQKGNELALPSKYVNFLYLASHYEKLKGSPEDNEQKQLFVEQHKHYLDEIIEQISEFSKRVILADANLDKVLSAYNKHRDKPIREQAENIIHLFTLTNLGAPAAFKYFDTTIDRKRYTSTKEVLDATLIHQSITGLYETRIDLSQLGGDGGGGSGSSPAPGGTLNIEDEYRLHETSKEPDVPLGSTWLSDFPQAWAETGGMGLAVRQAPLIIPLKATSTPVSIKQYPMSQEARLGIKPHIQRLLDQGILVPCQSPWNTPLLPVKKPGTNDYRPVQDLREVNKRVEDIHPTVPNPYNLLSGLPPSHQWYTVLDLKDAFFCLRLHPTSQPLFAFEWRDPEMGISGQLTWTRLPQGFKNSPTLFNEALHRDLADFRIQHPDLILLQYVDDLLLAATSEQDCQRGTRALLQTLGNLGYRASAKKAQICQKQVKYLGYLLKEGQRWLTEARKETVMGQPTPKTPRQLREFLGKAGFCRLFIPGFAEMAAPLYPLTKPGTLFNWGPDQQKAYQEIKQALLTAPALGLPDLTKPFELFVDEKQGYAKGVLTQKLGPWRRPVAYLSKKLDPVAAGWPPCLRMVAAIAVLTKDAGKLTMGQPLVILAPHAVEALVKQPPDRWLSNARMTHYQAMLLDTDRVQFGPVVALNPATLLPLPEKEAPHDCLEILAETHGTRPDLTDQPIPDADYTWYTDGSSFLQEGQRRAGAAVTTETEVIWARALPAGTSAQRAELIALTQALKMAEGKKLNVYTDSRYAFATAHVHGEIYRRRGWLTSEGREIKNKNEILALLKALFLPKRLSIIHCPGHQKGNSAEARGNRMADQAAREAAMKAVLETSTLLAGKRTADGSEFEKRTADGSEFESPKKKAKVE

SEQ ID NO: 1064 - protein, 2096 aa, synthetic construct
  source 1..2096: note = Description of Artificial Sequence: Synthetic polypeptide
MPAAKRVKLDGGDKKYSIGLDIGTNSVGWAVITDEYKVPSKKFKVLGNTDRHSIKKNLIGALLFDSGETAEATRLKRTARRRYTRRKNRICYLQEIFSNEMAKVDDSFFHRLEESFLVEEDKKHERHPIFGNIVDEVAYHEKYPTIYHLRKKLVDSTDKADLRLIYLALAHMIKFRGHFLIEGDLNPDNSDVDKLFIQLVQTYNQLFEENPINASGVDAKAILSARLSKSRRLENLIAQLPGEKKNGLFGNLIALSLGLTPNFKSNFDLAEDAKLQLSKDTYDDDLDNLLAQIGDQYADLFLAAKNLSDAILLSDILRVNTEITKAPLSASMIKRYDEHHQDLTLLKALVRQQLPEKYKEIFFDQSKNGYAGYIDGGASQEEFYKFIKPILEKMDGTEELLVKLNREDLLRKQRTFDNGSIPHQIHLGELHAILRRQEDFYPFLKDNREKIEKILTFRIPYYVGPLARGNSRFAWMTRKSEETITPWNFEEVVDKGASAQSFIERMTNFDKNLPNEKVLPKHSLLYEYFTVYNELTKVKYVTEGMRKPAFLSGEQKKAIVDLLFKTNRKVTVKQLKEDYFKKIECFDSVEISGVEDRFNASLGTYHDLLKIIKDKDFLDNEENEDILEDIVLTLTLFEDREMIEERLKTYAHLFDDKVMKQLKRRRYTGWGRLSRKLINGIRDKQSGKTILDFLKSDGFANRNFMQLIHDDSLTFKEDIQKAQVSGQGDSLHEHIANLAGSPAIKKGILQTVKVVDELVKVMGRHKPENIVIEMARENQTTQKGQKNSRERMKRIEEGIKELGSQILKEHPVENTQLQNEKLYLYYLQNGRDMYVDQELDINRLSDYDVDHIVPQSFLKDDSIDNKVLTRSDKARGKSDNVPSEEVVKKMKNYWRQLLNAKLITQRKFDNLTKAERGGLSELDKAGFIKRQLVETRQITKHVAQILDSRMNTKYDENDKLIREVKVITLKSKLVSDFRKDFQFYKVREINNYHHAHDAYLNAVVGTALIKKYPKLESEFVYGDYKVYDVRKMIAKSEQEIGKATAKYFFYSNIMNFFKTEITLANGEIRKRPLIETNGETGEIVWDKGRDFATVRKVLSMPQVNIVKKTEVQTGGFSKESILPKRNSDKLIARKKDWDPKKYGGFDSPTVAYSVLVVAKVEKGKSKKLKSVKELLGITIMERSSFEKNPIDFLEAKGYKEVKKDLIIKLPKYSLFELENGRKRMLASAGELQKGNELALPSKYVNFLYLASHYEKLKGSPEDNEQKQLFVEQHKHYLDEIIEQISEFSKRVILADANLDKVLSAYNKHRDKPIREQAENIIHLFTLTNLGAPAAFKYFDTTIDRKRYTSTKEVLDATLIHQSITGLYETRIDLSQLGGDGGEAAAKPAPGSSGGTLNIEDEYRLHETSKEPDVPLGSTWLSDFPQAWAETGGMGLAVRQAPLIIPLKATSTPVSIKQYPMSQEARLGIKPHIQRLLDQGILVPCQSPWNTPLLPVKKPGTNDYRPVQDLREVNKRVEDIHPTVPNPYNLLSGLPPSHQWYTVLDLKDAFFCLRLHPTSQPLFAFEWRDPEMGISGQLTWTRLPQGFKNSPTLFNEALHRDLADFRIQHPDLILLQYVDDLLLAATSEQDCQRGTRALLQTLGNLGYRASAKKAQICQKQVKYLGYLLKEGQRWLTEARKETVMGQPTPKTPRQLREFLGKAGFCRLFIPGFAEMAAPLYPLTKPGTLFNWGPDQQKAYQEIKQALLTAPALGLPDLTKPFELFVDEKQGYAKGVLTQKLGPWRRPVAYLSKKLDPVAAGWPPCLRMVAAIAVLTKDAGKLTMGQPLVILAPHAVEALVKQPPDRWLSNARMTHYQAMLLDTDRVQFGPVVALNPATLLPLPEKEAPHDCLEILAETHGTRPDLTDQPIPDADYTWYTDGSSFLQEGQRRAGAAVTTETEVIWARALPAGTSAQRAELIALTQALKMAEGKKLNVYTDSRYAFATAHVHGEIYRRRGWLTSEGREIKNKNEILALLKALFLPKRLSIIHCPGHQKGNSAEARGNRMADQAAREAAMKAVLETSTLLAGKRTADGSEFEKRTADGSEFESPKKKAKVE

SEQ ID NO: 1065 - protein, 2094 aa, synthetic construct
  source 1..2094: note = Description of Artificial Sequence: Synthetic polypeptide
MPAAKRVKLDGGDKKYSIGLDIGTNSVGWAVITDEYKVPSKKFKVLGNTDRHSIKKNLIGALLFDSGETAEATRLKRTARRRYTRRKNRICYLQEIFSNEMAKVDDSFFHRLEESFLVEEDKKHERHPIFGNIVDEVAYHEKYPTIYHLRKKLVDSTDKADLRLIYLALAHMIKFRGHFLIEGDLNPDNSDVDKLFIQLVQTYNQLFEENPINASGVDAKAILSARLSKSRRLENLIAQLPGEKKNGLFGNLIALSLGLTPNFKSNFDLAEDAKLQLSKDTYDDDLDNLLAQIGDQYADLFLAAKNLSDAILLSDILRVNTEITKAPLSASMIKRYDEHHQDLTLLKALVRQQLPEKYKEIFFDQSKNGYAGYIDGGASQEEFYKFIKPILEKMDGTEELLVKLNREDLLRKQRTFDNGSIPHQIHLGELHAILRRQEDFYPFLKDNREKIEKILTFRIPYYVGPLARGNSRFAWMTRKSEETITPWNFEEVVDKGASAQSFIERMTNFDKNLPNEKVLPKHSLLYEYFTVYNELTKVKYVTEGMRKPAFLSGEQKKAIVDLLFKTNRKVTVKQLKEDYFKKIECFDSVEISGVEDRFNASLGTYHDLLKIIKDKDFLDNEENEDILEDIVLTLTLFEDREMIEERLKTYAHLFDDKVMKQLKRRRYTGWGRLSRKLINGIRDKQSGKTILDFLKSDGFANRNFMQLIHDDSLTFKEDIQKAQVSGQGDSLHEHIANLAGSPAIKKGILQTVKVVDELVKVMGRHKPENIVIEMARENQTTQKGQKNSRERMKRIEEGIKELGSQILKEHPVENTQLQNEKLYLYYLQNGRDMYVDQELDINRLSDYDVDHIVPQSFLKDDSIDNKVLTRSDKARGKSDNVPSEEVVKKMKNYWRQLLNAKLITQRKFDNLTKAERGGLSELDKAGFIKRQLVETRQITKHVAQILDSRMNTKYDENDKLIREVKVITLKSKLVSDFRKDFQFYKVREINNYHHAHDAYLNAVVGTALIKKYPKLESEFVYGDYKVYDVRKMIAKSEQEIGKATAKYFFYSNIMNFFKTEITLANGEIRKRPLIETNGETGEIVWDKGRDFATVRKVLSMPQVNIVKKTEVQTGGFSKESILPKRNSDKLIARKKDWDPKKYGGFDSPTVAYSVLVVAKVEKGKSKKLKSVKELLGITIMERSSFEKNPIDFLEAKGYKEVKKDLIIKLPKYSLFELENGRKRMLASAGELQKGNELALPSKYVNFLYLASHYEKLKGSPEDNEQKQLFVEQHKHYLDEIIEQISEFSKRVILADANLDKVLSAYNKHRDKPIREQAENIIHLFTLTNLGAPAAFKYFDTTIDRKRYTSTKEVLDATLIHQSITGLYETRIDLSQLGGDGGGGSGGSGGSGGTLNIEDEYRLHETSKEPDVPLGSTWLSDFPQAWAETGGMGLAVRQAPLIIPLKATSTPVSIKQYPMSQEARLGIKPHIQRLLDQGILVPCQSPWNTPLLPVKKPGTNDYRPVQDLREVNKRVEDIHPTVPNPYNLLSGLPPSHQWYTVLDLKDAFFCLRLHPTSQPLFAFEWRDPEMGISGQLTWTRLPQGFKNSPTLFNEALHRDLADFRIQHPDLILLQYVDDLLLAATSEQDCQRGTRALLQTLGNLGYRASAKKAQICQKQVKYLGYLLKEGQRWLTEARKETVMGQPTPKTPRQLREFLGKAGFCRLFIPGFAEMAAPLYPLTKPGTLFNWGPDQQKAYQEIKQALLTAPALGLPDLTKPFELFVDEKQGYAKGVLTQKLGPWRRPVAYLSKKLDPVAAGWPPCLRMVAAIAVLTKDAGKLTMGQPLVILAPHAVEALVKQPPDRWLSNARMTHYQAMLLDTDRVQFGPVVALNPATLLPLPEKEAPHDCLEILAETHGTRPDLTDQPIPDADYTWYTDGSSFLQEGQRRAGAAVTTETEVIWARALPAGTSAQRAELIALTQALKMAEGKKLNVYTDSRYAFATAHVHGEIYRRRGWLTSEGREIKNKNEILALLKALFLPKRLSIIHCPGHQKGNSAEARGNRMADQAAREAAMKAVLETSTLLAGKRTADGSEFEKRTADGSEFESPKKKAKVE

SEQ ID NO: 1066 - protein, 2096 aa, synthetic construct
  source 1..2096: note = Description of Artificial Sequence: Synthetic polypeptide
MPAAKRVKLDGGDKKYSIGLDIGTNSVGWAVITDEYKVPSKKFKVLGNTDRHSIKKNLIGALLFDSGETAEATRLKRTARRRYTRRKNRICYLQEIFSNEMAKVDDSFFHRLEESFLVEEDKKHERHPIFGNIVDEVAYHEKYPTIYHLRKKLVDSTDKADLRLIYLALAHMIKFRGHFLIEGDLNPDNSDVDKLFIQLVQTYNQLFEENPINASGVDAKAILSARLSKSRRLENLIAQLPGEKKNGLFGNLIALSLGLTPNFKSNFDLAEDAKLQLSKDTYDDDLDNLLAQIGDQYADLFLAAKNLSDAILLSDILRVNTEITKAPLSASMIKRYDEHHQDLTLLKALVRQQLPEKYKEIFFDQSKNGYAGYIDGGASQEEFYKFIKPILEKMDGTEELLVKLNREDLLRKQRTFDNGSIPHQIHLGELHAILRRQEDFYPFLKDNREKIEKILTFRIPYYVGPLARGNSRFAWMTRKSEETITPWNFEEVVDKGASAQSFIERMTNFDKNLPNEKVLPKHSLLYEYFTVYNELTKVKYVTEGMRKPAFLSGEQKKAIVDLLFKTNRKVTVKQLKEDYFKKIECFDSVEISGVEDRFNASLGTYHDLLKIIKDKDFLDNEENEDILEDIVLTLTLFEDREMIEERLKTYAHLFDDKVMKQLKRRRYTGWGRLSRKLINGIRDKQSGKTILDFLKSDGFANRNFMQLIHDDSLTFKEDIQKAQVSGQGDSLHEHIANLAGSPAIKKGILQTVKVVDELVKVMGRHKPENIVIEMARENQTTQKGQKNSRERMKRIEEGIKELGSQILKEHPVENTQLQNEKLYLYYLQNGRDMYVDQELDINRLSDYDVDHIVPQSFLKDDSIDNKVLTRSDKARGKSDNVPSEEVVKKMKNYWRQLLNAKLITQRKFDNLTKAERGGLSELDKAGFIKRQLVETRQITKHVAQILDSRMNTKYDENDKLIREVKVITLKSKLVSDFRKDFQFYKVREINNYHHAHDAYLNAVVGTALIKKYPKLESEFVYGDYKVYDVRKMIAKSEQEIGKATAKYFFYSNIMNFFKTEITLANGEIRKRPLIETNGETGEIVWDKGRDFATVRKVLSMPQVNIVKKTEVQTGGFSKESILPKRNSDKLIARKKDWDPKKYGGFDSPTVAYSVLVVAKVEKGKSKKLKSVKELLGITIMERSSFEKNPIDFLEAKGYKEVKKDLIIKLPKYSLFELENGRKRMLASAGELQKGNELALPSKYVNFLYLASHYEKLKGSPEDNEQKQLFVEQHKHYLDEIIEQISEFSKRVILADANLDKVLSAYNKHRDKPIREQAENIIHLFTLTNLGAPAAFKYFDTTIDRKRYTSTKEVLDATLIHQSITGLYETRIDLSQLGGDGGPAPEAAAKGGSGGTLNIEDEYRLHETSKEPDVPLGSTWLSDFPQAWAETGGMGLAVRQAPLIIPLKATSTPVSIKQYPMSQEARLGIKPHIQRLLDQGILVPCQSPWNTPLLPVKKPGTNDYRPVQDLREVNKRVEDIHPTVPNPYNLLSGLPPSHQWYTVLDLKDAFFCLRLHPTSQPLFAFEWRDPEMGISGQLTWTRLPQGFKNSPTLFNEALHRDLADFRIQHPDLILLQYVDDLLLAATSEQDCQRGTRALLQTLGNLGYRASAKKAQICQKQVKYLGYLLKEGQRWLTEARKETVMGQPTPKTPRQLREFLGKAGFCRLFIPGFAEMAAPLYPLTKPGTLFNWGPDQQKAYQEIKQALLTAPALGLPDLTKPFELFVDEKQGYAKGVLTQKLGPWRRPVAYLSKKLDPVAAGWPPCLRMVAAIAVLTKDAGKLTMGQPLVILAPHAVEALVKQPPDRWLSNARMTHYQAMLLDTDRVQFGPVVALNPATLLPLPEKEAPHDCLEILAETHGTRPDLTDQPIPDADYTWYTDGSSFLQEGQRRAGAAVTTETEVIWARALPAGTSAQRAELIALTQALKMAEGKKLNVYTDSRYAFATAHVHGEIYRRRGWLTSEGREIKNKNEILALLKALFLPKRLSIIHCPGHQKGNSAEARGNRMADQAAREAAMKAVLETSTLLAGKRTADGSEFEKRTADGSEFESPKKKAKVE

SEQ ID NO: 1067 - protein, 2103 aa, synthetic construct
  source 1..2103: note = Description of Artificial Sequence: Synthetic polypeptide
MPAAKRVKLDGGDKKYSIGLDIGTNSVGWAVITDEYKVPSKKFKVLGNTDRHSIKKNLIGALLFDSGETAEATRLKRTARRRYTRRKNRICYLQEIFSNEMAKVDDSFFHRLEESFLVEEDKKHERHPIFGNIVDEVAYHEKYPTIYHLRKKLVDSTDKADLRLIYLALAHMIKFRGHFLIEGDLNPDNSDVDKLFIQLVQTYNQLFEENPINASGVDAKAILSARLSKSRRLENLIAQLPGEKKNGLFGNLIALSLGLTPNFKSNFDLAEDAKLQLSKDTYDDDLDNLLAQIGDQYADLFLAAKNLSDAILLSDILRVNTEITKAPLSASMIKRYDEHHQDLTLLKALVRQQLPEKYKEIFFDQSKNGYAGYIDGGASQEEFYKFIKPILEKMDGTEELLVKLNREDLLRKQRTFDNGSIPHQIHLGELHAILRRQEDFYPFLKDNREKIEKILTFRIPYYVGPLARGNSRFAWMTRKSEETITPWNFEEVVDKGASAQSFIERMTNFDKNLPNEKVLPKHSLLYEYFTVYNELTKVKYVTEGMRKPAFLSGEQKKAIVDLLFKTNRKVTVKQLKEDYFKKIECFDSVEISGVEDRFNASLGTYHDLLKIIKDKDFLDNEENEDILEDIVLTLTLFEDREMIEERLKTYAHLFDDKVMKQLKRRRYTGWGRLSRKLINGIRDKQSGKTILDFLKSDGFANRNFMQLIHDDSLTFKEDIQKAQVSGQGDSLHEHIANLAGSPAIKKGILQTVKVVDELVKVMGRHKPENIVIEMARENQTTQKGQKNSRERMKRIEEGIKELGSQILKEHPVENTQLQNEKLYLYYLQNGRDMYVDQELDINRLSDYDVDHIVPQSFLKDDSIDNKVLTRSDKARGKSDNVPSEEVVKKMKNYWRQLLNAKLITQRKFDNLTKAERGGLSELDKAGFIKRQLVETRQITKHVAQILDSRMNTKYDENDKLIREVKVITLKSKLVSDFRKDFQFYKVREINNYHHAHDAYLNAVVGTALIKKYPKLESEFVYGDYKVYDVRKMIAKSEQEIGKATAKYFFYSNIMNFFKTEITLANGEIRKRPLIETNGETGEIVWDKGRDFATVRKVLSMPQVNIVKKTEVQTGGFSKESILPKRNSDKLIARKKDWDPKKYGGFDSPTVAYSVLVVAKVEKGKSKKLKSVKELLGITIMERSSFEKNPIDFLEAKGYKEVKKDLIIKLPKYSLFELENGRKRMLASAGELQKGNELALPSKYVNFLYLASHYEKLKGSPEDNEQKQLFVEQHKHYLDEIIEQISEFSKRVILADANLDKVLSAYNKHRDKPIREQAENIIHLFTLTNLGAPAAFKYFDTTIDRKRYTSTKEVLDATLIHQSITGLYETRIDLSQLGGDGGGSSGSSGSSGSSGSSGSSGGTLNIEDEYRLHETSKEPDVPLGSTWLSDFPQAWAETGGMGLAVRQAPLIIPLKATSTPVSIKQYPMSQEARLGIKPHIQRLLDQGILVPCQSPWNTPLLPVKKPGTNDYRPVQDLREVNKRVEDIHPTVPNPYNLLSGLPPSHQWYTVLDLKDAFFCLRLHPTSQPLFAFEWRDPEMGISGQLTWTRLPQGFKNSPTLFNEALHRDLADFRIQHPDLILLQYVDDLLLAATSEQDCQRGTRALLQTLGNLGYRASAKKAQICQKQVKYLGYLLKEGQRWLTEARKETVMGQPTPKTPRQLREFLGKAGFCRLFIPGFAEMAAPLYPLTKPGTLFNWGPDQQKAYQEIKQALLTAPALGLPDLTKPFELFVDEKQGYAKGVLTQKLGPWRRPVAYLSKKLDPVAAGWPPCLRMVAAIAVLTKDAGKLTMGQPLVILAPHAVEALVKQPPDRWLSNARMTHYQAMLLDTDRVQFGPVVALNPATLLPLPEKEAPHDCLEILAETHGTRPDLTDQPIPDADYTWYTDGSSFLQEGQRRAGAAVTTETEVIWARALPAGTSAQRAELIALTQALKMAEGKKLNVYTDSRYAFATAHVHGEIYRRRGWLTSEGREIKNKNEILALLKALFLPKRLSIIHCPGHQKGNSAEARGNRMADQAAREAAMKAVLETSTLLAGKRTADGSEFEKRTADGSEFESPKKKAKVE

SEQ ID NO: 1068 - protein, 2096 aa, synthetic construct
  source 1..2096: note = Description of Artificial Sequence: Synthetic polypeptide
MPAAKRVKLDGGDKKYSIGLDIGTNSVGWAVITDEYKVPSKKFKVLGNTDRHSIKKNLIGALLFDSGETAEATRLKRTARRRYTRRKNRICYLQEIFSNEMAKVDDSFFHRLEESFLVEEDKKHERHPIFGNIVDEVAYHEKYPTIYHLRKKLVDSTDKADLRLIYLALAHMIKFRGHFLIEGDLNPDNSDVDKLFIQLVQTYNQLFEENPINASGVDAKAILSARLSKSRRLENLIAQLPGEKKNGLFGNLIALSLGLTPNFKSNFDLAEDAKLQLSKDTYDDDLDNLLAQIGDQYADLFLAAKNLSDAILLSDILRVNTEITKAPLSASMIKRYDEHHQDLTLLKALVRQQLPEKYKEIFFDQSKNGYAGYIDGGASQEEFYKFIKPILEKMDGTEELLVKLNREDLLRKQRTFDNGSIPHQIHLGELHAILRRQEDFYPFLKDNREKIEKILTFRIPYYVGPLARGNSRFAWMTRKSEETITPWNFEEVVDKGASAQSFIERMTNFDKNLPNEKVLPKHSLLYEYFTVYNELTKVKYVTEGMRKPAFLSGEQKKAIVDLLFKTNRKVTVKQLKEDYFKKIECFDSVEISGVEDRFNASLGTYHDLLKIIKDKDFLDNEENEDILEDIVLTLTLFEDREMIEERLKTYAHLFDDKVMKQLKRRRYTGWGRLSRKLINGIRDKQSGKTILDFLKSDGFANRNFMQLIHDDSLTFKEDIQKAQVSGQGDSLHEHIANLAGSPAIKKGILQTVKVVDELVKVMGRHKPENIVIEMARENQTTQKGQKNSRERMKRIEEGIKELGSQILKEHPVENTQLQNEKLYLYYLQNGRDMYVDQELDINRLSDYDVDHIVPQSFLKDDSIDNKVLTRSDKARGKSDNVPSEEVVKKMKNYWRQLLNAKLITQRKFDNLTKAERGGLSELDKAGFIKRQLVETRQITKHVAQILDSRMNTKYDENDKLIREVKVITLKSKLVSDFRKDFQFYKVREINNYHHAHDAYLNAVVGTALIKKYPKLESEFVYGDYKVYDVRKMIAKSEQEIGKATAKYFFYSNIMNFFKTEITLANGEIRKRPLIETNGETGEIVWDKGRDFATVRKVLSMPQVNIVKKTEVQTGGFSKESILPKRNSDKLIARKKDWDPKKYGGFDSPTVAYSVLVVAKVEKGKSKKLKSVKELLGITIMERSSFEKNPIDFLEAKGYKEVKKDLIIKLPKYSLFELENGRKRMLASAGELQKGNELALPSKYVNFLYLASHYEKLKGSPEDNEQKQLFVEQHKHYLDEIIEQISEFSKRVILADANLDKVLSAYNKHRDKPIREQAENIIHLFTLTNLGAPAAFKYFDTTIDRKRYTSTKEVLDATLIHQSITGLYETRIDLSQLGGDGGEAAAKGSSGGSGGTLNIEDEYRLHETSKEPDVPLGSTWLSDFPQAWAETGGMGLAVRQAPLIIPLKATSTPVSIKQYPMSQEARLGIKPHIQRLLDQGILVPCQSPWNTPLLPVKKPGTNDYRPVQDLREVNKRVEDIHPTVPNPYNLLSGLPPSHQWYTVLDLKDAFFCLRLHPTSQPLFAFEWRDPEMGISGQLTWTRLPQGFKNSPTLFNEALHRDLADFRIQHPDLILLQYVDDLLLAATSEQDCQRGTRALLQTLGNLGYRASAKKAQICQKQVKYLGYLLKEGQRWLTEARKETVMGQPTPKTPRQLREFLGKAGFCRLFIPGFAEMAAPLYPLTKPGTLFNWGPDQQKAYQEIKQALLTAPALGLPDLTKPFELFVDEKQGYAKGVLTQKLGPWRRPVAYLSKKLDPVAAGWPPCLRMVAAIAVLTKDAGKLTMGQPLVILAPHAVEALVKQPPDRWLSNARMTHYQAMLLDTDRVQFGPVVALNPATLLPLPEKEAPHDCLEILAETHGTRPDLTDQPIPDADYTWYTDGSSFLQEGQRRAGAAVTTETEVIWARALPAGTSAQRAELIALTQALKMAEGKKLNVYTDSRYAFATAHVHGEIYRRRGWLTSEGREIKNKNEILALLKALFLPKRLSIIHCPGHQKGNSAEARGNRMADQAAREAAMKAVLETSTLLAGKRTADGSEFEKRTADGSEFESPKKKAKVE

SEQ ID NO: 1069 - protein, 2096 aa, synthetic construct
  source 1..2096: note = Description of Artificial Sequence: Synthetic polypeptide
MPAAKRVKLDGGDKKYSIGLDIGTNSVGWAVITDEYKVPSKKFKVLGNTDRHSIKKNLIGALLFDSGETAEATRLKRTARRRYTRRKNRICYLQEIFSNEMAKVDDSFFHRLEESFLVEEDKKHERHPIFGNIVDEVAYHEKYPTIYHLRKKLVDSTDKADLRLIYLALAHMIKFRGHFLIEGDLNPDNSDVDKLFIQLVQTYNQLFEENPINASGVDAKAILSARLSKSRRLENLIAQLPGEKKNGLFGNLIALSLGLTPNFKSNFDLAEDAKLQLSKDTYDDDLDNLLAQIGDQYADLFLAAKNLSDAILLSDILRVNTEITKAPLSASMIKRYDEHHQDLTLLKALVRQQLPEKYKEIFFDQSKNGYAGYIDGGASQEEFYKFIKPILEKMDGTEELLVKLNREDLLRKQRTFDNGSIPHQIHLGELHAILRRQEDFYPFLKDNREKIEKILTFRIPYYVGPLARGNSRFAWMTRKSEETITPWNFEEVVDKGASAQSFIERMTNFDKNLPNEKVLPKHSLLYEYFTVYNELTKVKYVTEGMRKPAFLSGEQKKAIVDLLFKTNRKVTVKQLKEDYFKKIECFDSVEISGVEDRFNASLGTYHDLLKIIKDKDFLDNEENEDILEDIVLTLTLFEDREMIEERLKTYAHLFDDKVMKQLKRRRYTGWGRLSRKLINGIRDKQSGKTILDFLKSDGFANRNFMQLIHDDSLTFKEDIQKAQVSGQGDSLHEHIANLAGSPAIKKGILQTVKVVDELVKVMGRHKPENIVIEMARENQTTQKGQKNSRERMKRIEEGIKELGSQILKEHPVENTQLQNEKLYLYYLQNGRDMYVDQELDINRLSDYDVDHIVPQSFLKDDSIDNKVLTRSDKARGKSDNVPSEEVVKKMKNYWRQLLNAKLITQRKFDNLTKAERGGLSELDKAGFIKRQLVETRQITKHVAQILDSRMNTKYDENDKLIREVKVITLKSKLVSDFRKDFQFYKVREINNYHHAHDAYLNAVVGTALIKKYPKLESEFVYGDYKVYDVRKMIAKSEQEIGKATAKYFFYSNIMNFFKTEITLANGEIRKRPLIETNGETGEIVWDKGRDFATVRKVLSMPQVNIVKKTEVQTGGFSKESILPKRNSDKLIARKKDWDPKKYGGFDSPTVAYSVLVVAKVEKGKSKKLKSVKELLGITIMERSSFEKNPIDFLEAKGYKEVKKDLIIKLPKYSLFELENGRKRMLASAGELQKGNELALPSKYVNFLYLASHYEKLKGSPEDNEQKQLFVEQHKHYLDEIIEQISEFSKRVILADANLDKVLSAYNKHRDKPIREQAENIIHLFTLTNLGAPAAFKYFDTTIDRKRYTSTKEVLDATLIHQSITGLYETRIDLSQLGGDGGPAPAPAPAPAPGGTLNIEDEYRLHETSKEPDVPLGSTWLSDFPQAWAETGGMGLAVRQAPLIIPLKATSTPVSIKQYPMSQEARLGIKPHIQRLLDQGILVPCQSPWNTPLLPVKKPGTNDYRPVQDLREVNKRVEDIHPTVPNPYNLLSGLPPSHQWYTVLDLKDAFFCLRLHPTSQPLFAFEWRDPEMGISGQLTWTRLPQGFKNSPTLFNEALHRDLADFRIQHPDLILLQYVDDLLLAATSEQDCQRGTRALLQTLGNLGYRASAKKAQICQKQVKYLGYLLKEGQRWLTEARKETVMGQPTPKTPRQLREFLGKAGFCRLFIPGFAEMAAPLYPLTKPGTLFNWGPDQQKAYQEIKQALLTAPALGLPDLTKPFELFVDEKQGYAKGVLTQKLGPWRRPVAYLSKKLDPVAAGWPPCLRMVAAIAVLTKDAGKLTMGQPLVILAPHAVEALVKQPPDRWLSNARMTHYQAMLLDTDRVQFGPVVALNPATLLPLPEKEAPHDCLEILAETHGTRPDLTDQPIPDADYTWYTDGSSFLQEGQRRAGAAVTTETEVIWARALPAGTSAQRAELIALTQALKMAEGKKLNVYTDSRYAFATAHVHGEIYRRRGWLTSEGREIKNKNEILALLKALFLPKRLSIIHCPGHQKGNSAEARGNRMADQAAREAAMKAVLETSTLLAGKRTADGSEFEKRTADGSEFESPKKKAKVE

SEQ ID NO: 1070 - protein, 2091 aa, synthetic construct
  source 1..2091: note = Description of Artificial Sequence: Synthetic polypeptide
MPAAKRVKLDGGDKKYSIGLDIGTNSVGWAVITDEYKVPSKKFKVLGNTDRHSIKKNLIGALLFDSGETAEATRLKRTARRRYTRRKNRICYLQEIFSNEMAKVDDSFFHRLEESFLVEEDKKHERHPIFGNIVDEVAYHEKYPTIYHLRKKLVDSTDKADLRLIYLALAHMIKFRGHFLIEGDLNPDNSDVDKLFIQLVQTYNQLFEENPINASGVDAKAILSARLSKSRRLENLIAQLPGEKKNGLFGNLIALSLGLTPNFKSNFDLAEDAKLQLSKDTYDDDLDNLLAQIGDQYADLFLAAKNLSDAILLSDILRVNTEITKAPLSASMIKRYDEHHQDLTLLKALVRQQLPEKYKEIFFDQSKNGYAGYIDGGASQEEFYKFIKPILEKMDGTEELLVKLNREDLLRKQRTFDNGSIPHQIHLGELHAILRRQEDFYPFLKDNREKIEKILTFRIPYYVGPLARGNSRFAWMTRKSEETITPWNFEEVVDKGASAQSFIERMTNFDKNLPNEKVLPKHSLLYEYFTVYNELTKVKYVTEGMRKPAFLSGEQKKAIVDLLFKTNRKVTVKQLKEDYFKKIECFDSVEISGVEDRFNASLGTYHDLLKIIKDKDFLDNEENEDILEDIVLTLTLFEDREMIEERLKTYAHLFDDKVMKQLKRRRYTGWGRLSRKLINGIRDKQSGKTILDFLKSDGFANRNFMQLIHDDSLTFKEDIQKAQVSGQGDSLHEHIANLAGSPAIKKGILQTVKVVDELVKVMGRHKPENIVIEMARENQTTQKGQKNSRERMKRIEEGIKELGSQILKEHPVENTQLQNEKLYLYYLQNGRDMYVDQELDINRLSDYDVDHIVPQSFLKDDSIDNKVLTRSDKARGKSDNVPSEEVVKKMKNYWRQLLNAKLITQRKFDNLTKAERGGLSELDKAGFIKRQLVETRQITKHVAQILDSRMNTKYDENDKLIREVKVITLKSKLVSDFRKDFQFYKVREINNYHHAHDAYLNAVVGTALIKKYPKLESEFVYGDYKVYDVRKMIAKSEQEIGKATAKYFFYSNIMNFFKTEITLANGEIRKRPLIETNGETGEIVWDKGRDFATVRKVLSMPQVNIVKKTEVQTGGFSKESILPKRNSDKLIARKKDWDPKKYGGFDSPTVAYSVLVVAKVEKGKSKKLKSVKELLGITIMERSSFEKNPIDFLEAKGYKEVKKDLIIKLPKYSLFELENGRKRMLASAGELQKGNELALPSKYVNFLYLASHYEKLKGSPEDNEQKQLFVEQHKHYLDEIIEQISEFSKRVILADANLDKVLSAYNKHRDKPIREQAENIIHLFTLTNLGAPAAFKYFDTTIDRKRYTSTKEVLDATLIHQSITGLYETRIDLSQLGGDGGGSSGGGGGTLNIEDEYRLHETSKEPDVPLGSTWLSDFPQAWAETGGMGLAVRQAPLIIPLKATSTPVSIKQYPMSQEARLGIKPHIQRLLDQGILVPCQSPWNTPLLPVKKPGTNDYRPVQDLREVNKRVEDIHPTVPNPYNLLSGLPPSHQWYTVLDLKDAFFCLRLHPTSQPLFAFEWRDPEMGISGQLTWTRLPQGFKNSPTLFNEALHRDLADFRIQHPDLILLQYVDDLLLAATSEQDCQRGTRALLQTLGNLGYRASAKKAQICQKQVKYLGYLLKEGQRWLTEARKETVMGQPTPKTPRQLREFLGKAGFCRLFIPGFAEMAAPLYPLTKPGTLFNWGPDQQKAYQEIKQALLTAPALGLPDLTKPFELFVDEKQGYAKGVLTQKLGPWRRPVAYLSKKLDPVAAGWPPCLRMVAAIAVLTKDAGKLTMGQPLVILAPHAVEALVKQPPDRWLSNARMTHYQAMLLDTDRVQFGPVVALNPATLLPLPEKEAPHDCLEILAETHGTRPDLTDQPIPDADYTWYTDGSSFLQEGQRRAGAAVTTETEVIWARALPAGTSAQRAELIALTQALKMAEGKKLNVYTDSRYAFATAHVHGEIYRRRGWLTSEGREIKNKNEILALLKALFLPKRLSIIHCPGHQKGNSAEARGNRMADQAAREAAMKAVLETSTLLAGKRTADGSEFEKRTADGSEFESPKKKAKVE

SEQ ID NO: 1071 - protein, 2094 aa, synthetic construct
  source 1..2094: note = Description of Artificial Sequence: Synthetic polypeptide
MPAAKRVKLDGGDKKYSIGLDIGTNSVGWAVITDEYKVPSKKFKVLGNTDRHSIKKNLIGALLFDSGETAEATRLKRTARRRYTRRKNRICYLQEIFSNEMAKVDDSFFHRLEESFLVEEDKKHERHPIFGNIVDEVAYHEKYPTIYHLRKKLVDSTDKADLRLIYLALAHMIKFRGHFLIEGDLNPDNSDVDKLFIQLVQTYNQLFEENPINASGVDAKAILSARLSKSRRLENLIAQLPGEKKNGLFGNLIALSLGLTPNFKSNFDLAEDAKLQLSKDTYDDDLDNLLAQIGDQYADLFLAAKNLSDAILLSDILRVNTEITKAPLSASMIKRYDEHHQDLTLLKALVRQQLPEKYKEIFFDQSKNGYAGYIDGGASQEEFYKFIKPILEKMDGTEELLVKLNREDLLRKQRTFDNGSIPHQIHLGELHAILRRQEDFYPFLKDNREKIEKILTFRIPYYVGPLARGNSRFAWMTRKSEETITPWNFEEVVDKGASAQSFIERMTNFDKNLPNEKVLPKHSLLYEYFTVYNELTKVKYVTEGMRKPAFLSGEQKKAIVDLLFKTNRKVTVKQLKEDYFKKIECFDSVEISGVEDRFNASLGTYHDLLKIIKDKDFLDNEENEDILEDIVLTLTLFEDREMIEERLKTYAHLFDDKVMKQLKRRRYTGWGRLSRKLINGIRDKQSGKTILDFLKSDGFANRNFMQLIHDDSLTFKEDIQKAQVSGQGDSLHEHIANLAGSPAIKKGILQTVKVVDELVKVMGRHKPENIVIEMARENQTTQKGQKNSRERMKRIEEGIKELGSQILKEHPVENTQLQNEKLYLYYLQNGRDMYVDQELDINRLSDYDVDHIVPQSFLKDDSIDNKVLTRSDKARGKSDNVPSEEVVKKMKNYWRQLLNAKLITQRKFDNLTKAERGGLSELDKAGFIKRQLVETRQITKHVAQILDSRMNTKYDENDKLIREVKVITLKSKLVSDFRKDFQFYKVREINNYHHAHDAYLNAVVGTALIKKYPKLESEFVYGDYKVYDVRKMIAKSEQEIGKATAKYFFYSNIMNFFKTEITLANGEIRKRPLIETNGETGEIVWDKGRDFATVRKVLSMPQVNIVKKTEVQTGGFSKESILPKRNSDKLIARKKDWDPKKYGGFDSPTVAYSVLVVAKVEKGKSKKLKSVKELLGITIMERSSFEKNPIDFLEAKGYKEVKKDLIIKLPKYSLFELENGRKRMLASAGELQKGNELALPSKYVNFLYLASHYEKLKGSPEDNEQKQLFVEQHKHYLDEIIEQISEFSKRVILADANLDKVLSAYNKHRDKPIREQAENIIHLFTLTNLGAPAAFKYFDTTIDRKRYTSTKEVLDATLIHQSITGLYETRIDLSQLGGDGGPAPGGSGGGGGTLNIEDEYRLHETSKEPDVPLGSTWLSDFPQAWAETGGMGLAVRQAPLIIPLKATSTPVSIKQYPMSQEARLGIKPHIQRLLDQGILVPCQSPWNTPLLPVKKPGTNDYRPVQDLREVNKRVEDIHPTVPNPYNLLSGLPPSHQWYTVLDLKDAFFCLRLHPTSQPLFAFEWRDPEMGISGQLTWTRLPQGFKNSPTLFNEALHRDLADFRIQHPDLILLQYVDDLLLAATSEQDCQRGTRALLQTLGNLGYRASAKKAQICQKQVKYLGYLLKEGQRWLTEARKETVMGQPTPKTPRQLREFLGKAGFCRLFIPGFAEMAAPLYPLTKPGTLFNWGPDQQKAYQEIKQALLTAPALGLPDLTKPFELFVDEKQGYAKGVLTQKLGPWRRPVAYLSKKLDPVAAGWPPCLRMVAAIAVLTKDAGKLTMGQPLVILAPHAVEALVKQPPDRWLSNARMTHYQAMLLDTDRVQFGPVVALNPATLLPLPEKEAPHDCLEILAETHGTRPDLTDQPIPDADYTWYTDGSSFLQEGQRRAGAAVTTETEVIWARALPAGTSAQRAELIALTQALKMAEGKKLNVYTDSRYAFATAHVHGEIYRRRGWLTSEGREIKNKNEILALLKALFLPKRLSIIHCPGHQKGNSAEARGNRMADQAAREAAMKAVLETSTLLAGKRTADGSEFEKRTADGSEFESPKKKAKVE

SEQ ID NO: 1072 - protein, 2097 aa, synthetic construct
  source 1..2097: note = Description of Artificial Sequence: Synthetic polypeptide
MPAAKRVKLDGGDKKYSIGLDIGTNSVGWAVITDEYKVPSKKFKVLGNTDRHSIKKNLIGALLFDSGETAEATRLKRTARRRYTRRKNRICYLQEIFSNEMAKVDDSFFHRLEESFLVEEDKKHERHPIFGNIVDEVAYHEKYPTIYHLRKKLVDSTDKADLRLIYLALAHMIKFRGHFLIEGDLNPDNSDVDKLFIQLVQTYNQLFEENPINASGVDAKAILSARLSKSRRLENLIAQLPGEKKNGLFGNLIALSLGLTPNFKSNFDLAEDAKLQLSKDTYDDDLDNLLAQIGDQYADLFLAAKNLSDAILLSDILRVNTEITKAPLSASMIKRYDEHHQDLTLLKALVRQQLPEKYKEIFFDQSKNGYAGYIDGGASQEEFYKFIKPILEKMDGTEELLVKLNREDLLRKQRTFDNGSIPHQIHLGELHAILRRQEDFYPFLKDNREKIEKILTFRIPYYVGPLARGNSRFAWMTRKSEETITPWNFEEVVDKGASAQSFIERMTNFDKNLPNEKVLPKHSLLYEYFTVYNELTKVKYVTEGMRKPAFLSGEQKKAIVDLLFKTNRKVTVKQLKEDYFKKIECFDSVEISGVEDRFNASLGTYHDLLKIIKDKDFLDNEENEDILEDIVLTLTLFEDREMIEERLKTYAHLFDDKVMKQLKRRRYTGWGRLSRKLINGIRDKQSGKTILDFLKSDGFANRNFMQLIHDDSLTFKEDIQKAQVSGQGDSLHEHIANLAGSPAIKKGILQTVKVVDELVKVMGRHKPENIVIEMARENQTTQKGQKNSRERMKRIEEGIKELGSQILKEHPVENTQLQNEKLYLYYLQNGRDMYVDQELDINRLSDYDVDHIVPQSFLKDDSIDNKVLTRSDKARGKSDNVPSEEVVKKMKNYWRQLLNAKLITQRKFDNLTKAERGGLSELDKAGFIKRQLVETRQITKHVAQILDSRMNTKYDENDKLIREVKVITLKSKLVSDFRKDFQFYKVREINNYHHAHDAYLNAVVGTALIKKYPKLESEFVYGDYKVYDVRKMIAKSEQEIGKATAKYFFYSNIMNFFKTEITLANGEIRKRPLIETNGETGEIVWDKGRDFATVRKVLSMPQVNIVKKTEVQTGGFSKESILPKRNSDKLIARKKDWDPKKYGGFDSPTVAYSVLVVAKVEKGKSKKLKSVKELLGITIMERSSFEKNPIDFLEAKGYKEVKKDLIIKLPKYSLFELENGRKRMLASAGELQKGNELALPSKYVNFLYLASHYEKLKGSPEDNEQKQLFVEQHKHYLDEIIEQISEFSKRVILADANLDKVLSAYNKHRDKPIREQAENIIHLFTLTNLGAPAAFKYFDTTIDRKRYTSTKEVLDATLIHQSITGLYETRIDLSQLGGDGGGSAGSAAGSGEFGGTLNIEDEYRLHETSKEPDVPLGSTWLSDFPQAWAETGGMGLAVRQAPLIIPLKATSTPVSIKQYPMSQEARLGIKPHIQRLLDQGILVPCQSPWNTPLLPVKKPGTNDYRPVQDLREVNKRVEDIHPTVPNPYNLLSGLPPSHQWYTVLDLKDAFFCLRLHPTSQPLFAFEWRDPEMGISGQLTWTRLPQGFKNSPTLFNEALHRDLADFRIQHPDLILLQYVDDLLLAATSEQDCQRGTRALLQTLGNLGYRASAKKAQICQKQVKYLGYLLKEGQRWLTEARKETVMGQPTPKTPRQLREFLGKAGFCRLFIPGFAEMAAPLYPLTKPGTLFNWGPDQQKAYQEIKQALLTAPALGLPDLTKPFELFVDEKQGYAKGVLTQKLGPWRRPVAYLSKKLDPVAAGWPPCLRMVAAIAVLTKDAGKLTMGQPLVILAPHAVEALVKQPPDRWLSNARMTHYQAMLLDTDRVQFGPVVALNPATLLPLPEKEAPHDCLEILAETHGTRPDLTDQPIPDADYTWYTDGSSFLQEGQRRAGAAVTTETEVIWARALPAGTSAQRAELIALTQALKMAEGKKLNVYTDSRYAFATAHVHGEIYRRRGWLTSEGREIKNKNEILALLKALFLPKRLSIIHCPGHQKGNSAEARGNRMADQAAREAAMKAVLETSTLLAGKRTADGSEFEKRTADGSEFESPKKKAKVE

SEQ ID NO: 1073 - protein, 2094 aa, synthetic construct
  source 1..2094: note = Description of Artificial Sequence: Synthetic polypeptide
MPAAKRVKLDGGDKKYSIGLDIGTNSVGWAVITDEYKVPSKKFKVLGNTDRHSIKKNLIGALLFDSGETAEATRLKRTARRRYTRRKNRICYLQEIFSNEMAKVDDSFFHRLEESFLVEEDKKHERHPIFGNIVDEVAYHEKYPTIYHLRKKLVDSTDKADLRLIYLALAHMIKFRGHFLIEGDLNPDNSDVDKLFIQLVQTYNQLFEENPINASGVDAKAILSARLSKSRRLENLIAQLPGEKKNGLFGNLIALSLGLTPNFKSNFDLAEDAKLQLSKDTYDDDLDNLLAQIGDQYADLFLAAKNLSDAILLSDILRVNTEITKAPLSASMIKRYDEHHQDLTLLKALVRQQLPEKYKEIFFDQSKNGYAGYIDGGASQEEFYKFIKPILEKMDGTEELLVKLNREDLLRKQRTFDNGSIPHQIHLGELHAILRRQEDFYPFLKDNREKIEKILTFRIPYYVGPLARGNSRFAWMTRKSEETITPWNFEEVVDKGASAQSFIERMTNFDKNLPNEKVLPKHSLLYEYFTVYNELTKVKYVTEGMRKPAFLSGEQKKAIVDLLFKTNRKVTVKQLKEDYFKKIECFDSVEISGVEDRFNASLGTYHDLLKIIKDKDFLDNEENEDILEDIVLTLTLFEDREMIEERLKTYAHLFDDKVMKQLKRRRYTGWGRLSRKLINGIRDKQSGKTILDFLKSDGFANRNFMQLIHDDSLTFKEDIQKAQVSGQGDSLHEHIANLAGSPAIKKGILQTVKVVDELVKVMGRHKPENIVIEMARENQTTQKGQKNSRERMKRIEEGIKELGSQILKEHPVENTQLQNEKLYLYYLQNGRDMYVDQELDINRLSDYDVDHIVPQSFLKDDSIDNKVLTRSDKARGKSDNVPSEEVVKKMKNYWRQLLNAKLITQRKFDNLTKAERGGLSELDKAGFIKRQLVETRQITKHVAQILDSRMNTKYDENDKLIREVKVITLKSKLVSDFRKDFQFYKVREINNYHHAHDAYLNAVVGTALIKKYPKLESEFVYGDYKVYDVRKMIAKSEQEIGKATAKYFFYSNIMNFFKTEITLANGEIRKRPLIETNGETGEIVWDKGRDFATVRKVLSMPQVNIVKKTEVQTGGFSKESILPKRNSDKLIARKKDWDPKKYGGFDSPTVAYSVLVVAKVEKGKSKKLKSVKELLGITIMERSSFEKNPIDFLEAKGYKEVKKDLIIKLPKYSLFELENGRKRMLASAGELQKGNELALPSKYVNFLYLASHYEKLKGSPEDNEQKQLFVEQHKHYLDEIIEQISEFSKRVILADANLDKVLSAYNKHRDKPIREQAENIIHLFTLTNLGAPAAFKYFDTTIDRKRYTSTKEVLDATLIHQSITGLYETRIDLSQLGGDGGGGGGSSPAPGGTLNIEDEYRLHETSKEPDVPLGSTWLSDFPQAWAETGGMGLAVRQAPLIIPLKATSTPVSIKQYPMSQEARLGIKPHIQRLLDQGILVPCQSPWNTPLLPVKKPGTNDYRPVQDLREVNKRVEDIHPTVPNPYNLLSGLPPSHQWYTVLDLKDAFFCLRLHPTSQPLFAFEWRDPEMGISGQLTWTRLPQGFKNSPTLFNEALHRDLADFRIQHPDLILLQYVDDLLLAATSEQDCQRGTRALLQTLGNLGYRASAKKAQICQKQVKYLGYLLKEGQRWLTEARKETVMGQPTPKTPRQLREFLGKAGFCRLFIPGFAEMAAPLYPLTKPGTLFNWGPDQQKAYQEIKQALLTAPALGLPDLTKPFELFVDEKQGYAKGVLTQKLGPWRRPVAYLSKKLDPVAAGWPPCLRMVAAIAVLTKDAGKLTMGQPLVILAPHAVEALVKQPPDRWLSNARMTHYQAMLLDTDRVQFGPVVALNPATLLPLPEKEAPHDCLEILAETHGTRPDLTDQPIPDADYTWYTDGSSFLQEGQRRAGAAVTTETEVIWARALPAGTSAQRAELIALTQALKMAEGKKLNVYTDSRYAFATAHVHGEIYRRRGWLTSEGREIKNKNEILALLKALFLPKRLSIIHCPGHQKGNSAEARGNRMADQAAREAAMKAVLETSTLLAGKRTADGSEFEKRTADGSEFESPKKKAKVE

SEQ ID NO: 1074 - protein, 2095 aa, synthetic construct
  source 1..2095: note = Description of Artificial Sequence: Synthetic polypeptide
MPAAKRVKLDGGDKKYSIGLDIGTNSVGWAVITDEYKVPSKKFKVLGNTDRHSIKKNLIGALLFDSGETAEATRLKRTARRRYTRRKNRICYLQEIFSNEMAKVDDSFFHRLEESFLVEEDKKHERHPIFGNIVDEVAYHEKYPTIYHLRKKLVDSTDKADLRLIYLALAHMIKFRGHFLIEGDLNPDNSDVDKLFIQLVQTYNQLFEENPINASGVDAKAILSARLSKSRRLENLIAQLPGEKKNGLFGNLIALSLGLTPNFKSNFDLAEDAKLQLSKDTYDDDLDNLLAQIGDQYADLFLAAKNLSDAILLSDILRVNTEITKAPLSASMIKRYDEHHQDLTLLKALVRQQLPEKYKEIFFDQSKNGYAGYIDGGASQEEFYKFIKPILEKMDGTEELLVKLNREDLLRKQRTFDNGSIPHQIHLGELHAILRRQEDFYPFLKDNREKIEKILTFRIPYYVGPLARGNSRFAWMTRKSEETITPWNFEEVVDKGASAQSFIERMTNFDKNLPNEKVLPKHSLLYEYFTVYNELTKVKYVTEGMRKPAFLSGEQKKAIVDLLFKTNRKVTVKQLKEDYFKKIECFDSVEISGVEDRFNASLGTYHDLLKIIKDKDFLDNEENEDILEDIVLTLTLFEDREMIEERLKTYAHLFDDKVMKQLKRRRYTGWGRLSRKLINGIRDKQSGKTILDFLKSDGFANRNFMQLIHDDSLTFKEDIQKAQVSGQGDSLHEHIANLAGSPAIKKGILQTVKVVDELVKVMGRHKPENIVIEMARENQTTQKGQKNSRERMKRIEEGIKELGSQILKEHPVENTQLQNEKLYLYYLQNGRDMYVDQELDINRLSDYDVDHIVPQSFLKDDSIDNKVLTRSDKARGKSDNVPSEEVVKKMKNYWRQLLNAKLITQRKFDNLTKAERGGLSELDKAGFIKRQLVETRQITKHVAQILDSRMNTKYDENDKLIREVKVITLKSKLVSDFRKDFQFYKVREINNYHHAHDAYLNAVVGTALIKKYPKLESEFVYGDYKVYDVRKMIAKSEQEIGKATAKYFFYSNIMNFFKTEITLANGEIRKRPLIETNGETGEIVWDKGRDFATVRKVLSMPQVNIVKKTEVQTGGFSKESILPKRNSDKLIARKKDWDPKKYGGFDSPTVAYSVLVVAKVEKGKSKKLKSVKELLGITIMERSSFEKNPIDFLEAKGYKEVKKDLIIKLPKYSLFELENGRKRMLASAGELQKGNELALPSKYVNFLYLASHYEKLKGSPEDNEQKQLFVEQHKHYLDEIIEQISEFSKRVILADANLDKVLSAYNKHRDKPIREQAENIIHLFTLTNLGAPAAFKYFDTTIDRKRYTSTKEVLDATLIHQSITGLYETRIDLSQLGGDGGGGGGSGGGGSGGTLNIEDEYRLHETSKEPDVPLGSTWLSDFPQAWAETGGMGLAVRQAPLIIPLKATSTPVSIKQYPMSQEARLGIKPHIQRLLDQGILVPCQSPWNTPLLPVKKPGTNDYRPVQDLREVNKRVEDIHPTVPNPYNLLSGLPPSHQWYTVLDLKDAFFCLRLHPTSQPLFAFEWRDPEMGISGQLTWTRLPQGFKNSPTLFNEALHRDLADFRIQHPDLILLQYVDDLLLAATSEQDCQRGTRALLQTLGNLGYRASAKKAQICQKQVKYLGYLLKEGQRWLTEARKETVMGQPTPKTPRQLREFLGKAGFCRLFIPGFAEMAAPLYPLTKPGTLFNWGPDQQKAYQEIKQALLTAPALGLPDLTKPFELFVDEKQGYAKGVLTQKLGPWRRPVAYLSKKLDPVAAGWPPCLRMVAAIAVLTKDAGKLTMGQPLVILAPHAVEALVKQPPDRWLSNARMTHYQAMLLDTDRVQFGPVVALNPATLLPLPEKEAPHDCLEILAETHGTRPDLTDQPIPDADYTWYTDGSSFLQEGQRRAGAAVTTETEVIWARALPAGTSAQRAELIALTQALKMAEGKKLNVYTDSRYAFATAHVHGEIYRRRGWLTSEGREIKNKNEILALLKALFLPKRLSIIHCPGHQKGNSAEARGNRMADQAAREAAMKAVLETSTLLAGKRTADGSEFEKRTADGSEFESPKKKAKVE

SEQ ID NO: 1075 - protein, 2096 aa, synthetic construct
  source 1..2096: note = Description of Artificial Sequence: Synthetic polypeptide
MPAAKRVKLDGGDKKYSIGLDIGTNSVGWAVITDEYKVPSKKFKVLGNTDRHSIKKNLIGALLFDSGETAEATRLKRTARRRYTRRKNRICYLQEIFSNEMAKVDDSFFHRLEESFLVEEDKKHERHPIFGNIVDEVAYHEKYPTIYHLRKKLVDSTDKADLRLIYLALAHMIKFRGHFLIEGDLNPDNSDVDKLFIQLVQTYNQLFEENPINASGVDAKAILSARLSKSRRLENLIAQLPGEKKNGLFGNLIALSLGLTPNFKSNFDLAEDAKLQLSKDTYDDDLDNLLAQIGDQYADLFLAAKNLSDAILLSDILRVNTEITKAPLSASMIKRYDEHHQDLTLLKALVRQQLPEKYKEIFFDQSKNGYAGYIDGGASQEEFYKFIKPILEKMDGTEELLVKLNREDLLRKQRTFDNGSIPHQIHLGELHAILRRQEDFYPFLKDNREKIEKILTFRIPYYVGPLARGNSRFAWMTRKSEETITPWNFEEVVDKGASAQSFIERMTNFDKNLPNEKVLPKHSLLYEYFTVYNELTKVKYVTEGMRKPAFLSGEQKKAIVDLLFKTNRKVTVKQLKEDYFKKIECFDSVEISGVEDRFNASLGTYHDLLKIIKDKDFLDNEENEDILEDIVLTLTLFEDREMIEERLKTYAHLFDDKVMKQLKRRRYTGWGRLSRKLINGIRDKQSGKTILDFLKSDGFANRNFMQLIHDDSLTFKEDIQKAQVSGQGDSLHEHIANLAGSPAIKKGILQTVKVVDELVKVMGRHKPENIVIEMARENQTTQKGQKNSRERMKRIEEGIKELGSQILKEHPVENTQLQNEKLYLYYLQNGRDMYVDQELDINRLSDYDVDHIVPQSFLKDDSIDNKVLTRSDKARGKSDNVPSEEVVKKMKNYWRQLLNAKLITQRKFDNLTKAERGGLSELDKAGFIKRQLVETRQITKHVAQILDSRMNTKYDENDKLIREVKVITLKSKLVSDFRKDFQFYKVREINNYHHAHDAYLNAVVGTALIKKYPKLESEFVYGDYKVYDVRKMIAKSEQEIGKATAKYFFYSNIMNFFKTEITLANGEIRKRPLIETNGETGEIVWDKGRDFATVRKVLSMPQVNIVKKTEVQTGGFSKESILPKRNSDKLIARKKDWDPKKYGGFDSPTVAYSVLVVAKVEKGKSKKLKSVKELLGITIMERSSFEKNPIDFLEAKGYKEVKKDLIIKLPKYSLFELENGRKRMLASAGELQKGNELALPSKYVNFLYLASHYEKLKGSPEDNEQKQLFVEQHKHYLDEIIEQISEFSKRVILADANLDKVLSAYNKHRDKPIREQAENIIHLFTLTNLGAPAAFKYFDTTIDRKRYTSTKEVLDATLIHQSITGLYETRIDLSQLGGDGGGSSEAAAKGGSGGTLNIEDEYRLHETSKEPDVPLGSTWLSDFPQAWAETGGMGLAVRQAPLIIPLKATSTPVSIKQYPMSQEARLGIKPHIQRLLDQGILVPCQSPWNTPLLPVKKPGTNDYRPVQDLREVNKRVEDIHPTVPNPYNLLSGLPPSHQWYTVLDLKDAFFCLRLHPTSQPLFAFEWRDPEMGISGQLTWTRLPQGFKNSPTLFNEALHRDLADFRIQHPDLILLQYVDDLLLAATSEQDCQRGTRALLQTLGNLGYRASAKKAQICQKQVKYLGYLLKEGQRWLTEARKETVMGQPTPKTPRQLREFLGKAGFCRLFIPGFAEMAAPLYPLTKPGTLFNWGPDQQKAYQEIKQALLTAPALGLPDLTKPFELFVDEKQGYAKGVLTQKLGPWRRPVAYLSKKLDPVAAGWPPCLRMVAAIAVLTKDAGKLTMGQPLVILAPHAVEALVKQPPDRWLSNARMTHYQAMLLDTDRVQFGPVVALNPATLLPLPEKEAPHDCLEILAETHGTRPDLTDQPIPDADYTWYTDGSSFLQEGQRRAGAAVTTETEVIWARALPAGTSAQRAELIALTQALKMAEGKKLNVYTDSRYAFATAHVHGEIYRRRGWLTSEGREIKNKNEILALLKALFLPKRLSIIHCPGHQKGNSAEARGNRMADQAAREAAMKAVLETSTLLAGKRTADGSEFEKRTADGSEFESPKKKAKVE

SEQ ID NO: 1076 - protein, 2096 aa, synthetic construct
  source 1..2096: note = Description of Artificial Sequence: Synthetic polypeptide
MPAAKRVKLDGGDKKYSIGLDIGTNSVGWAVITDEYKVPSKKFKVLGNTDRHSIKKNLIGALLFDSGETAEATRLKRTARRRYTRRKNRICYLQEIFSNEMAKVDDSFFHRLEESFLVEEDKKHERHPIFGNIVDEVAYHEKYPTIYHLRKKLVDSTDKADLRLIYLALAHMIKFRGHFLIEGDLNPDNSDVDKLFIQLVQTYNQLFEENPINASGVDAKAILSARLSKSRRLENLIAQLPGEKKNGLFGNLIALSLGLTPNFKSNFDLAEDAKLQLSKDTYDDDLDNLLAQIGDQYADLFLAAKNLSDAILLSDILRVNTEITKAPLSASMIKRYDEHHQDLTLLKALVRQQLPEKYKEIFFDQSKNGYAGYIDGGASQEEFYKFIKPILEKMDGTEELLVKLNREDLLRKQRTFDNGSIPHQIHLGELHAILRRQEDFYPFLKDNREKIEKILTFRIPYYVGPLARGNSRFAWMTRKSEETITPWNFEEVVDKGASAQSFIERMTNFDKNLPNEKVLPKHSLLYEYFTVYNELTKVKYVTEGMRKPAFLSGEQKKAIVDLLFKTNRKVTVKQLKEDYFKKIECFDSVEISGVEDRFNASLGTYHDLLKIIKDKDFLDNEENEDILEDIVLTLTLFEDREMIEERLKTYAHLFDDKVMKQLKRRRYTGWGRLSRKLINGIRDKQSGKTILDFLKSDGFANRNFMQLIHDDSLTFKEDIQKAQVSGQGDSLHEHIANLAGSPAIKKGILQTVKVVDELVKVMGRHKPENIVIEMARENQTTQKGQKNSRERMKRIEEGIKELGSQILKEHPVENTQLQNEKLYLYYLQNGRDMYVDQELDINRLSDYDVDHIVPQSFLKDDSIDNKVLTRSDKARGKSDNVPSEEVVKKMKNYWRQLLNAKLITQRKFDNLTKAERGGLSELDKAGFIKRQLVETRQITKHVAQILDSRMNTKYDENDKLIREVKVITLKSKLVSDFRKDFQFYKVREINNYHHAHDAYLNAVVGTALIKKYPKLESEFVYGDYKVYDVRKMIAKSEQEIGKATAKYFFYSNIMNFFKTEITLANGEIRKRPLIETNGETGEIVWDKGRDFATVRKVLSMPQVNIVKKTEVQTGGFSKESILPKRNSDKLIARKKDWDPKKYGGFDSPTVAYSVLVVAKVEKGKSKKLKSVKELLGITIMERSSFEKNPIDFLEAKGYKEVKKDLIIKLPKYSLFELENGRKRMLASAGELQKGNELALPSKYVNFLYLASHYEKLKGSPEDNEQKQLFVEQHKHYLDEIIEQISEFSKRVILADANLDKVLSAYNKHRDKPIREQAENIIHLFTLTNLGAPAAFKYFDTTIDRKRYTSTKEVLDATLIHQSITGLYETRIDLSQLGGDGGGGGPAPEAAAKGGTLNIEDEYRLHETSKEPDVPLGSTWLSDFPQAWAETGGMGLAVRQAPLIIPLKATSTPVSIKQYPMSQEARLGIKPHIQRLLDQGILVPCQSPWNTPLLPVKKPGTNDYRPVQDLREVNKRVEDIHPTVPNPYNLLSGLPPSHQWYTVLDLKDAFFCLRLHPTSQPLFAFEWRDPEMGISGQLTWTRLPQGFKNSPTLFNEALHRDLADFRIQHPDLILLQYVDDLLLAATSEQDCQRGTRALLQTLGNLGYRASAKKAQICQKQVKYLGYLLKEGQRWLTEARKETVMGQPTPKTPRQLREFLGKAGFCRLFIPGFAEMAAPLYPLTKPGTLFNWGPDQQKAYQEIKQALLTAPALGLPDLTKPFELFVDEKQGYAKGVLTQKLGPWRRPVAYLSKKLDPVAAGWPPCLRMVAAIAVLTKDAGKLTMGQPLVILAPHAVEALVKQPPDRWLSNARMTHYQAMLLDTDRVQFGPVVALNPATLLPLPEKEAPHDCLEILAETHGTRPDLTDQPIPDADYTWYTDGSSFLQEGQRRAGAAVTTETEVIWARALPAGTSAQRAELIALTQALKMAEGKKLNVYTDSRYAFATAHVHGEIYRRRGWLTSEGREIKNKNEILALLKALFLPKRLSIIHCPGHQKGNSAEARGNRMADQAAREAAMKAVLETSTLLAGKRTADGSEFEKRTADGSEFESPKKKAKVE

SEQ ID NO: 1077 - protein, 2097 aa, synthetic construct
  source 1..2097: note = Description of Artificial Sequence: Synthetic polypeptide
MPAAKRVKLDGGDKKYSIGLDIGTNSVGWAVITDEYKVPSKKFKVLGNTDRHSIKKNLIGALLFDSGETAEATRLKRTARRRYTRRKNRICYLQEIFSNEMAKVDDSFFHRLEESFLVEEDKKHERHPIFGNIVDEVAYHEKYPTIYHLRKKLVDSTDKADLRLIYLALAHMIKFRGHFLIEGDLNPDNSDVDKLFIQLVQTYNQLFEENPINASGVDAKAILSARLSKSRRLENLIAQLPGEKKNGLFGNLIALSLGLTPNFKSNFDLAEDAKLQLSKDTYDDDLDNLLAQIGDQYADLFLAAKNLSDAILLSDILRVNTEITKAPLSASMIKRYDEHHQDLTLLKALVRQQLPEKYKEIFFDQSKNGYAGYIDGGASQEEFYKFIKPILEKMDGTEELLVKLNREDLLRKQRTFDNGSIPHQIHLGELHAILRRQEDFYPFLKDNREKIEKILTFRIPYYVGPLARGNSRFAWMTRKSEETITPWNFEEVVDKGASAQSFIERMTNFDKNLPNEKVLPKHSLLYEYFTVYNELTKVKYVTEGMRKPAFLSGEQKKAIVDLLFKTNRKVTVKQLKEDYFKKIECFDSVEISGVEDRFNASLGTYHDLLKIIKDKDFLDNEENEDILEDIVLTLTLFEDREMIEERLKTYAHLFDDKVMKQLKRRRYTGWGRLSRKLINGIRDKQSGKTILDFLKSDGFANRNFMQLIHDDSLTFKEDIQKAQVSGQGDSLHEHIANLAGSPAIKKGILQTVKVVDELVKVMGRHKPENIVIEMARENQTTQKGQKNSRERMKRIEEGIKELGSQILKEHPVENTQLQNEKLYLYYLQNGRDMYVDQELDINRLSDYDVDHIVPQSFLKDDSIDNKVLTRSDKARGKSDNVPSEEVVKKMKNYWRQLLNAKLITQRKFDNLTKAERGGLSELDKAGFIKRQLVETRQITKHVAQILDSRMNTKYDENDKLIREVKVITLKSKLVSDFRKDFQFYKVREINNYHHAHDAYLNAVVGTALIKKYPKLESEFVYGDYKVYDVRKMIAKSEQEIGKATAKYFFYSNIMNFFKTEITLANGEIRKRPLIETNGETGEIVWDKGRDFATVRKVLSMPQVNIVKKTEVQTGGFSKESILPKRNSDKLIARKKDWDPKKYGGFDSPTVAYSVLVVAKVEKGKSKKLKSVKELLGITIMERSSFEKNPIDFLEAKGYKEVKKDLIIKLPKYSLFELENGRKRMLASAGELQKGNELALPSKYVNFLYLASHYEKLKGSPEDNEQKQLFVEQHKHYLDEIIEQISEFSKRVILADANLDKVLSAYNKHRDKPIREQAENIIHLFTLTNLGAPAAFKYFDTTIDRKRYTSTKEVLDATLIHQSITGLYETRIDLSQLGGDGGGSSGSSGSSGSSGGTLNIEDEYRLHETSKEPDVPLGSTWLSDFPQAWAETGGMGLAVRQAPLIIPLKATSTPVSIKQYPMSQEARLGIKPHIQRLLDQGILVPCQSPWNTPLLPVKKPGTNDYRPVQDLREVNKRVEDIHPTVPNPYNLLSGLPPSHQWYTVLDLKDAFFCLRLHPTSQPLFAFEWRDPEMGISGQLTWTRLPQGFKNSPTLFNEALHRDLADFRIQHPDLILLQYVDDLLLAATSEQDCQRGTRALLQTLGNLGYRASAKKAQICQKQVKYLGYLLKEGQRWLTEARKETVMGQPTPKTPRQLREFLGKAGFCRLFIPGFAEMAAPLYPLTKPGTLFNWGPDQQKAYQEIKQALLTAPALGLPDLTKPFELFVDEKQGYAKGVLTQKLGPWRRPVAYLSKKLDPVAAGWPPCLRMVAAIAVLTKDAGKLTMGQPLVILAPHAVEALVKQPPDRWLSNARMTHYQAMLLDTDRVQFGPVVALNPATLLPLPEKEAPHDCLEILAETHGTRPDLTDQPIPDADYTWYTDGSSFLQEGQRRAGAAVTTETEVIWARALPAGTSAQRAELIALTQALKMAEGKKLNVYTDSRYAFATAHVHGEIYRRRGWLTSEGREIKNKNEILALLKALFLPKRLSIIHCPGHQKGNSAEARGNRMADQAAREAAMKAVLETSTLLAGKRTADGSEFEKRTADGSEFESPKKKAKVE

SEQ ID NO: 1078 - protein, 2093 aa, synthetic construct
  source 1..2093: note = Description of Artificial Sequence: Synthetic polypeptide
MPAAKRVKLDGGDKKYSIGLDIGTNSVGWAVITDEYKVPSKKFKVLGNTDRHSIKKNLIGALLFDSGETAEATRLKRTARRRYTRRKNRICYLQEIFSNEMAKVDDSFFHRLEESFLVEEDKKHERHPIFGNIVDEVAYHEKYPTIYHLRKKLVDSTDKADLRLIYLALAHMIKFRGHFLIEGDLNPDNSDVDKLFIQLVQTYNQLFEENPINASGVDAKAILSARLSKSRRLENLIAQLPGEKKNGLFGNLIALSLGLTPNFKSNFDLAEDAKLQLSKDTYDDDLDNLLAQIGDQYADLFLAAKNLSDAILLSDILRVNTEITKAPLSASMIKRYDEHHQDLTLLKALVRQQLPEKYKEIFFDQSKNGYAGYIDGGASQEEFYKFIKPILEKMDGTEELLVKLNREDLLRKQRTFDNGSIPHQIHLGELHAILRRQEDFYPFLKDNREKIEKILTFRIPYYVGPLARGNSRFAWMTRKSEETITPWNFEEVVDKGASAQSFIERMTNFDKNLPNEKVLPKHSLLYEYFTVYNELTKVKYVTEGMRKPAFLSGEQKKAIVDLLFKTNRKVTVKQLKEDYFKKIECFDSVEISGVEDRFNASLGTYHDLLKIIKDKDFLDNEENEDILEDIVLTLTLFEDREMIEERLKTYAHLFDDKVMKQLKRRRYTGWGRLSRKLINGIRDKQSGKTILDFLKSDGFANRNFMQLIHDDSLTFKEDIQKAQVSGQGDSLHEHIANLAGSPAIKKGILQTVKVVDELVKVMGRHKPENIVIEMARENQTTQKGQKNSRERMKRIEEGIKELGSQILKEHPVENTQLQNEKLYLYYLQNGRDMYVDQELDINRLSDYDVDHIVPQSFLKDDSIDNKVLTRSDKARGKSDNVPSEEVVKKMKNYWRQLLNAKLITQRKFDNLTKAERGGLSELDKAGFIKRQLVETRQITKHVAQILDSRMNTKYDENDKLIREVKVITLKSKLVSDFRKDFQFYKVREINNYHHAHDAYLNAVVGTALIKKYPKLESEFVYGDYKVYDVRKMIAKSEQEIGKATAKYFFYSNIMNFFKTEITLANGEIRKRPLIETNGETGEIVWDKGRDFATVRKVLSMPQVNIVKKTEVQTGGFSKESILPKRNSDKLIARKKDWDPKKYGGFDSPTVAYSVLVVAKVEKGKSKKLKSVKELLGITIMERSSFEKNPIDFLEAKGYKEVKKDLIIKLPKYSLFELENGRKRMLASAGELQKGNELALPSKYVNFLYLASHYEKLKGSPEDNEQKQLFVEQHKHYLDEIIEQISEFSKRVILADANLDKVLSAYNKHRDKPIREQAENIIHLFTLTNLGAPAAFKYFDTTIDRKRYTSTKEVLDATLIHQSITGLYETRIDLSQLGGDGGEAAAKGSSGGTLNIEDEYRLHETSKEPDVPLGSTWLSDFPQAWAETGGMGLAVRQAPLIIPLKATSTPVSIKQYPMSQEARLGIKPHIQRLLDQGILVPCQSPWNTPLLPVKKPGTNDYRPVQDLREVNKRVEDIHPTVPNPYNLLSGLPPSHQWYTVLDLKDAFFCLRLHPTSQPLFAFEWRDPEMGISGQLTWTRLPQGFKNSPTLFNEALHRDLADFRIQHPDLILLQYVDDLLLAATSEQDCQRGTRALLQTLGNLGYRASAKKAQICQKQVKYLGYLLKEGQRWLTEARKETVMGQPTPKTPRQLREFLGKAGFCRLFIPGFAEMAAPLYPLTKPGTLFNWGPDQQKAYQEIKQALLTAPALGLPDLTKPFELFVDEKQGYAKGVLTQKLGPWRRPVAYLSKKLDPVAAGWPPCLRMVAAIAVLTKDAGKLTMGQPLVILAPHAVEALVKQPPDRWLSNARMTHYQAMLLDTDRVQFGPVVALNPATLLPLPEKEAPHDCLEILAETHGTRPDLTDQPIPDADYTWYTDGSSFLQEGQRRAGAAVTTETEVIWARALPAGTSAQRAELIALTQALKMAEGKKLNVYTDSRYAFATAHVHGEIYRRRGWLTSEGREIKNKNEILALLKALFLPKRLSIIHCPGHQKGNSAEARGNRMADQAAREAAMKAVLETSTLLAGKRTADGSEFEKRTADGSEFESPKKKAKVE

SEQ ID NO: 1079 - protein, 2100 aa, synthetic construct
  source 1..2100: note = Description of Artificial Sequence: Synthetic polypeptide
MPAAKRVKLDGGDKKYSIGLDIGTNSVGWAVITDEYKVPSKKFKVLGNTDRHSIKKNLIGALLFDSGETAEATRLKRTARRRYTRRKNRICYLQEIFSNEMAKVDDSFFHRLEESFLVEEDKKHERHPIFGNIVDEVAYHEKYPTIYHLRKKLVDSTDKADLRLIYLALAHMIKFRGHFLIEGDLNPDNSDVDKLFIQLVQTYNQLFEENPINASGVDAKAILSARLSKSRRLENLIAQLPGEKKNGLFGNLIALSLGLTPNFKSNFDLAEDAKLQLSKDTYDDDLDNLLAQIGDQYADLFLAAKNLSDAILLSDILRVNTEITKAPLSASMIKRYDEHHQDLTLLKALVRQQLPEKYKEIFFDQSKNGYAGYIDGGASQEEFYKFIKPILEKMDGTEELLVKLNREDLLRKQRTFDNGSIPHQIHLGELHAILRRQEDFYPFLKDNREKIEKILTFRIPYYVGPLARGNSRFAWMTRKSEETITPWNFEEVVDKGASAQSFIERMTNFDKNLPNEKVLPKHSLLYEYFTVYNELTKVKYVTEGMRKPAFLSGEQKKAIVDLLFKTNRKVTVKQLKEDYFKKIECFDSVEISGVEDRFNASLGTYHDLLKIIKDKDFLDNEENEDILEDIVLTLTLFEDREMIEERLKTYAHLFDDKVMKQLKRRRYTGWGRLSRKLINGIRDKQSGKTILDFLKSDGFANRNFMQLIHDDSLTFKEDIQKAQVSGQGDSLHEHIANLAGSPAIKKGILQTVKVVDELVKVMGRHKPENIVIEMARENQTTQKGQKNSRERMKRIEEGIKELGSQILKEHPVENTQLQNEKLYLYYLQNGRDMYVDQELDINRLSDYDVDHIVPQSFLKDDSIDNKVLTRSDKARGKSDNVPSEEVVKKMKNYWRQLLNAKLITQRKFDNLTKAERGGLSELDKAGFIKRQLVETRQITKHVAQILDSRMNTKYDENDKLIREVKVITLKSKLVSDFRKDFQFYKVREINNYHHAHDAYLNAVVGTALIKKYPKLESEFVYGDYKVYDVRKMIAKSEQEIGKATAKYFFYSNIMNFFKTEITLANGEIRKRPLIETNGETGEIVWDKGRDFATVRKVLSMPQVNIVKKTEVQTGGFSKESILPKRNSDKLIARKKDWDPKKYGGFDSPTVAYSVLVVAKVEKGKSKKLKSVKELLGITIMERSSFEKNPIDFLEAKGYKEVKKDLIIKLPKYSLFELENGRKRMLASAGELQKGNELALPSKYVNFLYLASHYEKLKGSPEDNEQKQLFVEQHKHYLDEIIEQISEFSKRVILADANLDKVLSAYNKHRDKPIREQAENIIHLFTLTNLGAPAAFKYFDTTIDRKRYTSTKEVLDATLIHQSITGLYETRIDLSQLGGDGGGGGGSEAAAKGGGGSGGTLNIEDEYRLHETSKEPDVPLGSTWLSDFPQAWAETGGMGLAVRQAPLIIPLKATSTPVSIKQYPMSQEARLGIKPHIQRLLDQGILVPCQSPWNTPLLPVKKPGTNDYRPVQDLREVNKRVEDIHPTVPNPYNLLSGLPPSHQWYTVLDLKDAFFCLRLHPTSQPLFAFEWRDPEMGISGQLTWTRLPQGFKNSPTLFNEALHRDLADFRIQHPDLILLQYVDDLLLAATSEQDCQRGTRALLQTLGNLGYRASAKKAQICQKQVKYLGYLLKEGQRWLTEARKETVMGQPTPKTPRQLREFLGKAGFCRLFIPGFAEMAAPLYPLTKPGTLFNWGPDQQKAYQEIKQALLTAPALGLPDLTKPFELFVDEKQGYAKGVLTQKLGPWRRPVAYLSKKLDPVAAGWPPCLRMVAAIAVLTKDAGKLTMGQPLVILAPHAVEALVKQPPDRWLSNARMTHYQAMLLDTDRVQFGPVVALNPATLLPLPEKEAPHDCLEILAETHGTRPDLTDQPIPDADYTWYTDGSSFLQEGQRRAGAAVTTETEVIWARALPAGTSAQRAELIALTQALKMAEGKKLNVYTDSRYAFATAHVHGEIYRRRGWLTSEGREIKNKNEILALLKALFLPKRLSIIHCPGHQKGNSAEARGNRMADQAAREAAMKAVLETSTLLAGKRTADGSEFEKRTADGSEFESPKKKAKVE

SEQ ID NO: 1080 - protein, 2088 aa, synthetic construct
  source 1..2088: note = Description of Artificial Sequence: Synthetic polypeptide
MPAAKRVKLDGGDKKYSIGLDIGTNSVGWAVITDEYKVPSKKFKVLGNTDRHSIKKNLIGALLFDSGETAEATRLKRTARRRYTRRKNRICYLQEIFSNEMAKVDDSFFHRLEESFLVEEDKKHERHPIFGNIVDEVAYHEKYPTIYHLRKKLVDSTDKADLRLIYLALAHMIKFRGHFLIEGDLNPDNSDVDKLFIQLVQTYNQLFEENPINASGVDAKAILSARLSKSRRLENLIAQLPGEKKNGLFGNLIALSLGLTPNFKSNFDLAEDAKLQLSKDTYDDDLDNLLAQIGDQYADLFLAAKNLSDAILLSDILRVNTEITKAPLSASMIKRYDEHHQDLTLLKALVRQQLPEKYKEIFFDQSKNGYAGYIDGGASQEEFYKFIKPILEKMDGTEELLVKLNREDLLRKQRTFDNGSIPHQIHLGELHAILRRQEDFYPFLKDNREKIEKILTFRIPYYVGPLARGNSRFAWMTRKSEETITPWNFEEVVDKGASAQSFIERMTNFDKNLPNEKVLPKHSLLYEYFTVYNELTKVKYVTEGMRKPAFLSGEQKKAIVDLLFKTNRKVTVKQLKEDYFKKIECFDSVEISGVEDRFNASLGTYHDLLKIIKDKDFLDNEENEDILEDIVLTLTLFEDREMIEERLKTYAHLFDDKVMKQLKRRRYTGWGRLSRKLINGIRDKQSGKTILDFLKSDGFANRNFMQLIHDDSLTFKEDIQKAQVSGQGDSLHEHIANLAGSPAIKKGILQTVKVVDELVKVMGRHKPENIVIEMARENQTTQKGQKNSRERMKRIEEGIKELGSQILKEHPVENTQLQNEKLYLYYLQNGRDMYVDQELDINRLSDYDVDHIVPQSFLKDDSIDNKVLTRSDKARGKSDNVPSEEVVKKMKNYWRQLLNAKLITQRKFDNLTKAERGGLSELDKAGFIKRQLVETRQITKHVAQILDSRMNTKYDENDKLIREVKVITLKSKLVSDFRKDFQFYKVREINNYHHAHDAYLNAVVGTALIKKYPKLESEFVYGDYKVYDVRKMIAKSEQEIGKATAKYFFYSNIMNFFKTEITLANGEIRKRPLIETNGETGEIVWDKGRDFATVRKVLSMPQVNIVKKTEVQTGGFSKESILPKRNSDKLIARKKDWDPKKYGGFDSPTVAYSVLVVAKVEKGKSKKLKSVKELLGITIMERSSFEKNPIDFLEAKGYKEVKKDLIIKLPKYSLFELENGRKRMLASAGELQKGNELALPSKYVNFLYLASHYEKLKGSPEDNEQKQLFVEQHKHYLDEIIEQISEFSKRVILADANLDKVLSAYNKHRDKPIREQAENIIHLFTLTNLGAPAAFKYFDTTIDRKRYTSTKEVLDATLIHQSITGLYETRIDLSQLGGDGGGGGGGTLNIEDEYRLHETSKEPDVPLGSTWLSDFPQAWAETGGMGLAVRQAPLIIPLKATSTPVSIKQYPMSQEARLGIKPHIQRLLDQGILVPCQSPWNTPLLPVKKPGTNDYRPVQDLREVNKRVEDIHPTVPNPYNLLSGLPPSHQWYTVLDLKDAFFCLRLHPTSQPLFAFEWRDPEMGISGQLTWTRLPQGFKNSPTLFNEALHRDLADFRIQHPDLILLQYVDDLLLAATSEQDCQRGTRALLQTLGNLGYRASAKKAQICQKQVKYLGYLLKEGQRWLTEARKETVMGQPTPKTPRQLREFLGKAGFCRLFIPGFAEMAAPLYPLTKPGTLFNWGPDQQKAYQEIKQALLTAPALGLPDLTKPFELFVDEKQGYAKGVLTQKLGPWRRPVAYLSKKLDPVAAGWPPCLRMVAAIAVLTKDAGKLTMGQPLVILAPHAVEALVKQPPDRWLSNARMTHYQAMLLDTDRVQFGPVVALNPATLLPLPEKEAPHDCLEILAETHGTRPDLTDQPIPDADYTWYTDGSSFLQEGQRRAGAAVTTETEVIWARALPAGTSAQRAELIALTQALKMAEGKKLNVYTDSRYAFATAHVHGEIYRRRGWLTSEGREIKNKNEILALLKALFLPKRLSIIHCPGHQKGNSAEARGNRMADQAAREAAMKAVLETSTLLAGKRTADGSEFEKRTADGSEFESPKKKAKVE

SEQ ID NO: 1081 - protein, 2096 aa, synthetic construct
  source 1..2096: note = Description of Artificial Sequence: Synthetic polypeptide
MPAAKRVKLDGGDKKYSIGLDIGTNSVGWAVITDEYKVPSKKFKVLGNTDRHSIKKNLIGALLFDSGETAEATRLKRTARRRYTRRKNRICYLQEIFSNEMAKVDDSFFHRLEESFLVEEDKKHERHPIFGNIVDEVAYHEKYPTIYHLRKKLVDSTDKADLRLIYLALAHMIKFRGHFLIEGDLNPDNSDVDKLFIQLVQTYNQLFEENPINASGVDAKAILSARLSKSRRLENLIAQLPGEKKNGLFGNLIALSLGLTPNFKSNFDLAEDAKLQLSKDTYDDDLDNLLAQIGDQYADLFLAAKNLSDAILLSDILRVNTEITKAPLSASMIKRYDEHHQDLTLLKALVRQQLPEKYKEIFFDQSKNGYAGYIDGGASQEEFYKFIKPILEKMDGTEELLVKLNREDLLRKQRTFDNGSIPHQIHLGELHAILRRQEDFYPFLKDNREKIEKILTFRIPYYVGPLARGNSRFAWMTRKSEETITPWNFEEVVDKGASAQSFIERMTNFDKNLPNEKVLPKHSLLYEYFTVYNELTKVKYVTEGMRKPAFLSGEQKKAIVDLLFKTNRKVTVKQLKEDYFKKIECFDSVEISGVEDRFNASLGTYHDLLKIIKDKDFLDNEENEDILEDIVLTLTLFEDREMIEERLKTYAHLFDDKVMKQLKRRRYTGWGRLSRKLINGIRDKQSGKTILDFLKSDGFANRNFMQLIHDDSLTFKEDIQKAQVSGQGDSLHEHIANLAGSPAIKKGILQTVKVVDELVKVMGRHKPENIVIEMARENQTTQKGQKNSRERMKRIEEGIKELGSQILKEHPVENTQLQNEKLYLYYLQNGRDMYVDQELDINRLSDYDVDHIVPQSFLKDDSIDNKVLTRSDKARGKSDNVPSEEVVKKMKNYWRQLLNAKLITQRKFDNLTKAERGGLSELDKAGFIKRQLVETRQITKHVAQILDSRMNTKYDENDKLIREVKVITLKSKLVSDFRKDFQFYKVREINNYHHAHDAYLNAVVGTALIKKYPKLESEFVYGDYKVYDVRKMIAKSEQEIGKATAKYFFYSNIMNFFKTEITLANGEIRKRPLIETNGETGEIVWDKGRDFATVRKVLSMPQVNIVKKTEVQTGGFSKESILPKRNSDKLIARKKDWDPKKYGGFDSPTVAYSVLVVAKVEKGKSKKLKSVKELLGITIMERSSFEKNPIDFLEAKGYKEVKKDLIIKLPKYSLFELENGRKRMLASAGELQKGNELALPSKYVNFLYLASHYEKLKGSPEDNEQKQLFVEQHKHYLDEIIEQISEFSKRVILADANLDKVLSAYNKHRDKPIREQAENIIHLFTLTNLGAPAAFKYFDTTIDRKRYTSTKEVLDATLIHQSITGLYETRIDLSQLGGDGGGGSEAAAKGGGGGTLNIEDEYRLHETSKEPDVPLGSTWLSDFPQAWAETGGMGLAVRQAPLIIPLKATSTPVSIKQYPMSQEARLGIKPHIQRLLDQGILVPCQSPWNTPLLPVKKPGTNDYRPVQDLREVNKRVEDIHPTVPNPYNLLSGLPPSHQWYTVLDLKDAFFCLRLHPTSQPLFAFEWRDPEMGISGQLTWTRLPQGFKNSPTLFNEALHRDLADFRIQHPDLILLQYVDDLLLAATSEQDCQRGTRALLQTLGNLGYRASAKKAQICQKQVKYLGYLLKEGQRWLTEARKETVMGQPTPKTPRQLREFLGKAGFCRLFIPGFAEMAAPLYPLTKPGTLFNWGPDQQKAYQEIKQALLTAPALGLPDLTKPFELFVDEKQGYAKGVLTQKLGPWRRPVAYLSKKLDPVAAGWPPCLRMVAAIAVLTKDAGKLTMGQPLVILAPHAVEALVKQPPDRWLSNARMTHYQAMLLDTDRVQFGPVVALNPATLLPLPEKEAPHDCLEILAETHGTRPDLTDQPIPDADYTWYTDGSSFLQEGQRRAGAAVTTETEVIWARALPAGTSAQRAELIALTQALKMAEGKKLNVYTDSRYAFATAHVHGEIYRRRGWLTSEGREIKNKNEILALLKALFLPKRLSIIHCPGHQKGNSAEARGNRMADQAAREAAMKAVLETSTLLAGKRTADGSEFEKRTADGSEFESPKKKAKVE

SEQ ID NO: 1082 - protein, 2094 aa, synthetic construct
  source 1..2094: note = Description of Artificial Sequence: Synthetic polypeptide
MPAAKRVKLDGGDKKYSIGLDIGTNSVGWAVITDEYKVPSKKFKVLGNTDRHSIKKNLIGALLFDSGETAEATRLKRTARRRYTRRKNRICYLQEIFSNEMAKVDDSFFHRLEESFLVEEDKKHERHPIFGNIVDEVAYHEKYPTIYHLRKKLVDSTDKADLRLIYLALAHMIKFRGHFLIEGDLNPDNSDVDKLFIQLVQTYNQLFEENPINASGVDAKAILSARLSKSRRLENLIAQLPGEKKNGLFGNLIALSLGLTPNFKSNFDLAEDAKLQLSKDTYDDDLDNLLAQIGDQYADLFLAAKNLSDAILLSDILRVNTEITKAPLSASMIKRYDEHHQDLTLLKALVRQQLPEKYKEIFFDQSKNGYAGYIDGGASQEEFYKFIKPILEKMDGTEELLVKLNREDLLRKQRTFDNGSIPHQIHLGELHAILRRQEDFYPFLKDNREKIEKILTFRIPYYVGPLARGNSRFAWMTRKSEETITPWNFEEVVDKGASAQSFIERMTNFDKNLPNEKVLPKHSLLYEYFTVYNELTKVKYVTEGMRKPAFLSGEQKKAIVDLLFKTNRKVTVKQLKEDYFKKIECFDSVEISGVEDRFNASLGTYHDLLKIIKDKDFLDNEENEDILEDIVLTLTLFEDREMIEERLKTYAHLFDDKVMKQLKRRRYTGWGRLSRKLINGIRDKQSGKTILDFLKSDGFANRNFMQLIHDDSLTFKEDIQKAQVSGQGDSLHEHIANLAGSPAIKKGILQTVKVVDELVKVMGRHKPENIVIEMARENQTTQKGQKNSRERMKRIEEGIKELGSQILKEHPVENTQLQNEKLYLYYLQNGRDMYVDQELDINRLSDYDVDHIVPQSFLKDDSIDNKVLTRSDKARGKSDNVPSEEVVKKMKNYWRQLLNAKLITQRKFDNLTKAERGGLSELDKAGFIKRQLVETRQITKHVAQILDSRMNTKYDENDKLIREVKVITLKSKLVSDFRKDFQFYKVREINNYHHAHDAYLNAVVGTALIKKYPKLESEFVYGDYKVYDVRKMIAKSEQEIGKATAKYFFYSNIMNFFKTEITLANGEIRKRPLIETNGETGEIVWDKGRDFATVRKVLSMPQVNIVKKTEVQTGGFSKESILPKRNSDKLIARKKDWDPKKYGGFDSPTVAYSVLVVAKVEKGKSKKLKSVKELLGITIMERSSFEKNPIDFLEAKGYKEVKKDLIIKLPKYSLFELENGRKRMLASAGELQKGNELALPSKYVNFLYLASHYEKLKGSPEDNEQKQLFVEQHKHYLDEIIEQISEFSKRVILADANLDKVLSAYNKHRDKPIREQAENIIHLFTLTNLGAPAAFKYFDTTIDRKRYTSTKEVLDATLIHQSITGLYETRIDLSQLGGDGGGSSGGSGGGGGTLNIEDEYRLHETSKEPDVPLGSTWLSDFPQAWAETGGMGLAVRQAPLIIPLKATSTPVSIKQYPMSQEARLGIKPHIQRLLDQGILVPCQSPWNTPLLPVKKPGTNDYRPVQDLREVNKRVEDIHPTVPNPYNLLSGLPPSHQWYTVLDLKDAFFCLRLHPTSQPLFAFEWRDPEMGISGQLTWTRLPQGFKNSPTLFNEALHRDLADFRIQHPDLILLQYVDDLLLAATSEQDCQRGTRALLQTLGNLGYRASAKKAQICQKQVKYLGYLLKEGQRWLTEARKETVMGQPTPKTPRQLREFLGKAGFCRLFIPGFAEMAAPLYPLTKPGTLFNWGPDQQKAYQEIKQALLTAPALGLPDLTKPFELFVDEKQGYAKGVLTQKLGPWRRPVAYLSKKLDPVAAGWPPCLRMVAAIAVLTKDAGKLTMGQPLVILAPHAVEALVKQPPDRWLSNARMTHYQAMLLDTDRVQFGPVVALNPATLLPLPEKEAPHDCLEILAETHGTRPDLTDQPIPDADYTWYTDGSSFLQEGQRRAGAAVTTETEVIWARALPAGTSAQRAELIALTQALKMAEGKKLNVYTDSRYAFATAHVHGEIYRRRGWLTSEGREIKNKNEILALLKALFLPKRLSIIHCPGHQKGNSAEARGNRMADQAAREAAMKAVLETSTLLAGKRTADGSEFEKRTADGSEFESPKKKAKVE

SEQ ID NO: 1083 - protein, 2093 aa, synthetic construct
  source 1..2093: note = Description of Artificial Sequence: Synthetic polypeptide
MPAAKRVKLDGGDKKYSIGLDIGTNSVGWAVITDEYKVPSKKFKVLGNTDRHSIKKNLIGALLFDSGETAEATRLKRTARRRYTRRKNRICYLQEIFSNEMAKVDDSFFHRLEESFLVEEDKKHERHPIFGNIVDEVAYHEKYPTIYHLRKKLVDSTDKADLRLIYLALAHMIKFRGHFLIEGDLNPDNSDVDKLFIQLVQTYNQLFEENPINASGVDAKAILSARLSKSRRLENLIAQLPGEKKNGLFGNLIALSLGLTPNFKSNFDLAEDAKLQLSKDTYDDDLDNLLAQIGDQYADLFLAAKNLSDAILLSDILRVNTEITKAPLSASMIKRYDEHHQDLTLLKALVRQQLPEKYKEIFFDQSKNGYAGYIDGGASQEEFYKFIKPILEKMDGTEELLVKLNREDLLRKQRTFDNGSIPHQIHLGELHAILRRQEDFYPFLKDNREKIEKILTFRIPYYVGPLARGNSRFAWMTRKSEETITPWNFEEVVDKGASAQSFIERMTNFDKNLPNEKVLPKHSLLYEYFTVYNELTKVKYVTEGMRKPAFLSGEQKKAIVDLLFKTNRKVTVKQLKEDYFKKIECFDSVEISGVEDRFNASLGTYHDLLKIIKDKDFLDNEENEDILEDIVLTLTLFEDREMIEERLKTYAHLFDDKVMKQLKRRRYTGWGRLSRKLINGIRDKQSGKTILDFLKSDGFANRNFMQLIHDDSLTFKEDIQKAQVSGQGDSLHEHIANLAGSPAIKKGILQTVKVVDELVKVMGRHKPENIVIEMARENQTTQKGQKNSRERMKRIEEGIKELGSQILKEHPVENTQLQNEKLYLYYLQNGRDMYVDQELDINRLSDYDVDHIVPQSFLKDDSIDNKVLTRSDKARGKSDNVPSEEVVKKMKNYWRQLLNAKLITQRKFDNLTKAERGGLSELDKAGFIKRQLVETRQITKHVAQILDSRMNTKYDENDKLIREVKVITLKSKLVSDFRKDFQFYKVREINNYHHAHDAYLNAVVGTALIKKYPKLESEFVYGDYKVYDVRKMIAKSEQEIGKATAKYFFYSNIMNFFKTEITLANGEIRKRPLIETNGETGEIVWDKGRDFATVRKVLSMPQVNIVKKTEVQTGGFSKESILPKRNSDKLIARKKDWDPKKYGGFDSPTVAYSVLVVAKVEKGKSKKLKSVKELLGITIMERSSFEKNPIDFLEAKGYKEVKKDLIIKLPKYSLFELENGRKRMLASAGELQKGNELALPSKYVNFLYLASHYEKLKGSPEDNEQKQLFVEQHKHYLDEIIEQISEFSKRVILADANLDKVLSAYNKHRDKPIREQAENIIHLFTLTNLGAPAAFKYFDTTIDRKRYTSTKEVLDATLIHQSITGLYETRIDLSQLGGDGGGGSEAAAKGGTLNIEDEYRLHETSKEPDVPLGSTWLSDFPQAWAETGGMGLAVRQAPLIIPLKATSTPVSIKQYPMSQEARLGIKPHIQRLLDQGILVPCQSPWNTPLLPVKKPGTNDYRPVQDLREVNKRVEDIHPTVPNPYNLLSGLPPSHQWYTVLDLKDAFFCLRLHPTSQPLFAFEWRDPEMGISGQLTWTRLPQGFKNSPTLFNEALHRDLADFRIQHPDLILLQYVDDLLLAATSEQDCQRGTRALLQTLGNLGYRASAKKAQICQKQVKYLGYLLKEGQRWLTEARKETVMGQPTPKTPRQLREFLGKAGFCRLFIPGFAEMAAPLYPLTKPGTLFNWGPDQQKAYQEIKQALLTAPALGLPDLTKPFELFVDEKQGYAKGVLTQKLGPWRRPVAYLSKKLDPVAAGWPPCLRMVAAIAVLTKDAGKLTMGQPLVILAPHAVEALVKQPPDRWLSNARMTHYQAMLLDTDRVQFGPVVALNPATLLPLPEKEAPHDCLEILAETHGTRPDLTDQPIPDADYTWYTDGSSFLQEGQRRAGAAVTTETEVIWARALPAGTSAQRAELIALTQALKMAEGKKLNVYTDSRYAFATAHVHGEIYRRRGWLTSEGREIKNKNEILALLKALFLPKRLSIIHCPGHQKGNSAEARGNRMADQAAREAAMKAVLETSTLLAGKRTADGSEFEKRTADGSEFESPKKKAKVE

SEQ ID NO: 1084 - protein, 2094 aa, synthetic construct
  source 1..2094: note = Description of Artificial Sequence: Synthetic polypeptide
MPAAKRVKLDGGDKKYSIGLDIGTNSVGWAVITDEYKVPSKKFKVLGNTDRHSIKKNLIGALLFDSGETAEATRLKRTARRRYTRRKNRICYLQEIFSNEMAKVDDSFFHRLEESFLVEEDKKHERHPIFGNIVDEVAYHEKYPTIYHLRKKLVDSTDKADLRLIYLALAHMIKFRGHFLIEGDLNPDNSDVDKLFIQLVQTYNQLFEENPINASGVDAKAILSARLSKSRRLENLIAQLPGEKKNGLFGNLIALSLGLTPNFKSNFDLAEDAKLQLSKDTYDDDLDNLLAQIGDQYADLFLAAKNLSDAILLSDILRVNTEITKAPLSASMIKRYDEHHQDLTLLKALVRQQLPEKYKEIFFDQSKNGYAGYIDGGASQEEFYKFIKPILEKMDGTEELLVKLNREDLLRKQRTFDNGSIPHQIHLGELHAILRRQEDFYPFLKDNREKIEKILTFRIPYYVGPLARGNSRFAWMTRKSEETITPWNFEEVVDKGASAQSFIERMTNFDKNLPNEKVLPKHSLLYEYFTVYNELTKVKYVTEGMRKPAFLSGEQKKAIVDLLFKTNRKVTVKQLKEDYFKKIECFDSVEISGVEDRFNASLGTYHDLLKIIKDKDFLDNEENEDILEDIVLTLTLFEDREMIEERLKTYAHLFDDKVMKQLKRRRYTGWGRLSRKLINGIRDKQSGKTILDFLKSDGFANRNFMQLIHDDSLTFKEDIQKAQVSGQGDSLHEHIANLAGSPAIKKGILQTVKVVDELVKVMGRHKPENIVIEMARENQTTQKGQKNSRERMKRIEEGIKELGSQILKEHPVENTQLQNEKLYLYYLQNGRDMYVDQELDINRLSDYDVDHIVPQSFLKDDSIDNKVLTRSDKARGKSDNVPSEEVVKKMKNYWRQLLNAKLITQRKFDNLTKAERGGLSELDKAGFIKRQLVETRQITKHVAQILDSRMNTKYDENDKLIREVKVITLKSKLVSDFRKDFQFYKVREINNYHHAHDAYLNAVVGTALIKKYPKLESEFVYGDYKVYDVRKMIAKSEQEIGKATAKYFFYSNIMNFFKTEITLANGEIRKRPLIETNGETGEIVWDKGRDFATVRKVLSMPQVNIVKKTEVQTGGFSKESILPKRNSDKLIARKKDWDPKKYGGFDSPTVAYSVLVVAKVEKGKSKKLKSVKELLGITIMERSSFEKNPIDFLEAKGYKEVKKDLIIKLPKYSLFELENGRKRMLASAGELQKGNELALPSKYVNFLYLASHYEKLKGSPEDNEQKQLFVEQHKHYLDEIIEQISEFSKRVILADANLDKVLSAYNKHRDKPIREQAENIIHLFTLTNLGAPAAFKYFDTTIDRKRYTSTKEVLDATLIHQSITGLYETRIDLSQLGGDGGGSSGGGPAPGGTLNIEDEYRLHETSKEPDVPLGSTWLSDFPQAWAETGGMGLAVRQAPLIIPLKATSTPVSIKQYPMSQEARLGIKPHIQRLLDQGILVPCQSPWNTPLLPVKKPGTNDYRPVQDLREVNKRVEDIHPTVPNPYNLLSGLPPSHQWYTVLDLKDAFFCLRLHPTSQPLFAFEWRDPEMGISGQLTWTRLPQGFKNSPTLFNEALHRDLADFRIQHPDLILLQYVDDLLLAATSEQDCQRGTRALLQTLGNLGYRASAKKAQICQKQVKYLGYLLKEGQRWLTEARKETVMGQPTPKTPRQLREFLGKAGFCRLFIPGFAEMAAPLYPLTKPGTLFNWGPDQQKAYQEIKQALLTAPALGLPDLTKPFELFVDEKQGYAKGVLTQKLGPWRRPVAYLSKKLDPVAAGWPPCLRMVAAIAVLTKDAGKLTMGQPLVILAPHAVEALVKQPPDRWLSNARMTHYQAMLLDTDRVQFGPVVALNPATLLPLPEKEAPHDCLEILAETHGTRPDLTDQPIPDADYTWYTDGSSFLQEGQRRAGAAVTTETEVIWARALPAGTSAQRAELIALTQALKMAEGKKLNVYTDSRYAFATAHVHGEIYRRRGWLTSEGREIKNKNEILALLKALFLPKRLSIIHCPGHQKGNSAEARGNRMADQAAREAAMKAVLETSTLLAGKRTADGSEFEKRTADGSEFESPKKKAKVE

SEQ ID NO: 1085 - protein, 2094 aa, synthetic construct
  source 1..2094: note = Description of Artificial Sequence: Synthetic polypeptide
MPAAKRVKLDGGDKKYSIGLDIGTNSVGWAVITDEYKVPSKKFKVLGNTDRHSIKKNLIGALLFDSGETAEATRLKRTARRRYTRRKNRICYLQEIFSNEMAKVDDSFFHRLEESFLVEEDKKHERHPIFGNIVDEVAYHEKYPTIYHLRKKLVDSTDKADLRLIYLALAHMIKFRGHFLIEGDLNPDNSDVDKLFIQLVQTYNQLFEENPINASGVDAKAILSARLSKSRRLENLIAQLPGEKKNGLFGNLIALSLGLTPNFKSNFDLAEDAKLQLSKDTYDDDLDNLLAQIGDQYADLFLAAKNLSDAILLSDILRVNTEITKAPLSASMIKRYDEHHQDLTLLKALVRQQLPEKYKEIFFDQSKNGYAGYIDGGASQEEFYKFIKPILEKMDGTEELLVKLNREDLLRKQRTFDNGSIPHQIHLGELHAILRRQEDFYPFLKDNREKIEKILTFRIPYYVGPLARGNSRFAWMTRKSEETITPWNFEEVVDKGASAQSFIERMTNFDKNLPNEKVLPKHSLLYEYFTVYNELTKVKYVTEGMRKPAFLSGEQKKAIVDLLFKTNRKVTVKQLKEDYFKKIECFDSVEISGVEDRFNASLGTYHDLLKIIKDKDFLDNEENEDILEDIVLTLTLFEDREMIEERLKTYAHLFDDKVMKQLKRRRYTGWGRLSRKLINGIRDKQSGKTILDFLKSDGFANRNFMQLIHDDSLTFKEDIQKAQVSGQGDSLHEHIANLAGSPAIKKGILQTVKVVDELVKVMGRHKPENIVIEMARENQTTQKGQKNSRERMKRIEEGIKELGSQILKEHPVENTQLQNEKLYLYYLQNGRDMYVDQELDINRLSDYDVDHIVPQSFLKDDSIDNKVLTRSDKARGKSDNVPSEEVVKKMKNYWRQLLNAKLITQRKFDNLTKAERGGLSELDKAGFIKRQLVETRQITKHVAQILDSRMNTKYDENDKLIREVKVITLKSKLVSDFRKDFQFYKVREINNYHHAHDAYLNAVVGTALIKKYPKLESEFVYGDYKVYDVRKMIAKSEQEIGKATAKYFFYSNIMNFFKTEITLANGEIRKRPLIETNGETGEIVWDKGRDFATVRKVLSMPQVNIVKKTEVQTGGFSKESILPKRNSDKLIARKKDWDPKKYGGFDSPTVAYSVLVVAKVEKGKSKKLKSVKELLGITIMERSSFEKNPIDFLEAKGYKEVKKDLIIKLPKYSLFELENGRKRMLASAGELQKGNELALPSKYVNFLYLASHYEKLKGSPEDNEQKQLFVEQHKHYLDEIIEQISEFSKRVILADANLDKVLSAYNKHRDKPIREQAENIIHLFTLTNLGAPAAFKYFDTTIDRKRYTSTKEVLDATLIHQSITGLYETRIDLSQLGGDGGGGSGGGPAPGGTLNIEDEYRLHETSKEPDVPLGSTWLSDFPQAWAETGGMGLAVRQAPLIIPLKATSTPVSIKQYPMSQEARLGIKPHIQRLLDQGILVPCQSPWNTPLLPVKKPGTNDYRPVQDLREVNKRVEDIHPTVPNPYNLLSGLPPSHQWYTVLDLKDAFFCLRLHPTSQPLFAFEWRDPEMGISGQLTWTRLPQGFKNSPTLFNEALHRDLADFRIQHPDLILLQYVDDLLLAATSEQDCQRGTRALLQTLGNLGYRASAKKAQICQKQVKYLGYLLKEGQRWLTEARKETVMGQPTPKTPRQLREFLGKAGFCRLFIPGFAEMAAPLYPLTKPGTLFNWGPDQQKAYQEIKQALLTAPALGLPDLTKPFELFVDEKQGYAKGVLTQKLGPWRRPVAYLSKKLDPVAAGWPPCLRMVAAIAVLTKDAGKLTMGQPLVILAPHAVEALVKQPPDRWLSNARMTHYQAMLLDTDRVQFGPVVALNPATLLPLPEKEAPHDCLEILAETHGTRPDLTDQPIPDADYTWYTDGSSFLQEGQRRAGAAVTTETEVIWARALPAGTSAQRAELIALTQALKMAEGKKLNVYTDSRYAFATAHVHGEIYRRRGWLTSEGREIKNKNEILALLKALFLPKRLSIIHCPGHQKGNSAEARGNRMADQAAREAAMKAVLETSTLLAGKRTADGSEFEKRTADGSEFESPKKKAKVE

SEQ ID NO: 1086 - protein, 2091 aa, synthetic construct
  source 1..2091: note = Description of Artificial Sequence: Synthetic polypeptide
MPAAKRVKLDGGDKKYSIGLDIGTNSVGWAVITDEYKVPSKKFKVLGNTDRHSIKKNLIGALLFDSGETAEATRLKRTARRRYTRRKNRICYLQEIFSNEMAKVDDSFFHRLEESFLVEEDKKHERHPIFGNIVDEVAYHEKYPTIYHLRKKLVDSTDKADLRLIYLALAHMIKFRGHFLIEGDLNPDNSDVDKLFIQLVQTYNQLFEENPINASGVDAKAILSARLSKSRRLENLIAQLPGEKKNGLFGNLIALSLGLTPNFKSNFDLAEDAKLQLSKDTYDDDLDNLLAQIGDQYADLFLAAKNLSDAILLSDILRVNTEITKAPLSASMIKRYDEHHQDLTLLKALVRQQLPEKYKEIFFDQSKNGYAGYIDGGASQEEFYKFIKPILEKMDGTEELLVKLNREDLLRKQRTFDNGSIPHQIHLGELHAILRRQEDFYPFLKDNREKIEKILTFRIPYYVGPLARGNSRFAWMTRKSEETITPWNFEEVVDKGASAQSFIERMTNFDKNLPNEKVLPKHSLLYEYFTVYNELTKVKYVTEGMRKPAFLSGEQKKAIVDLLFKTNRKVTVKQLKEDYFKKIECFDSVEISGVEDRFNASLGTYHDLLKIIKDKDFLDNEENEDILEDIVLTLTLFEDREMIEERLKTYAHLFDDKVMKQLKRRRYTGWGRLSRKLINGIRDKQSGKTILDFLKSDGFANRNFMQLIHDDSLTFKEDIQKAQVSGQGDSLHEHIANLAGSPAIKKGILQTVKVVDELVKVMGRHKPENIVIEMARENQTTQKGQKNSRERMKRIEEGIKELGSQILKEHPVENTQLQNEKLYLYYLQNGRDMYVDQELDINRLSDYDVDHIVPQSFLKDDSIDNKVLTRSDKARGKSDNVPSEEVVKKMKNYWRQLLNAKLITQRKFDNLTKAERGGLSELDKAGFIKRQLVETRQITKHVAQILDSRMNTKYDENDKLIREVKVITLKSKLVSDFRKDFQFYKVREINNYHHAHDAYLNAVVGTALIKKYPKLESEFVYGDYKVYDVRKMIAKSEQEIGKATAKYFFYSNIMNFFKTEITLANGEIRKRPLIETNGETGEIVWDKGRDFATVRKVLSMPQVNIVKKTEVQTGGFSKESILPKRNSDKLIARKKDWDPKKYGGFDSPTVAYSVLVVAKVEKGKSKKLKSVKELLGITIMERSSFEKNPIDFLEAKGYKEVKKDLIIKLPKYSLFELENGRKRMLASAGELQKGNELALPSKYVNFLYLASHYEKLKGSPEDNEQKQLFVEQHKHYLDEIIEQISEFSKRVILADANLDKVLSAYNKHRDKPIREQAENIIHLFTLTNLGAPAAFKYFDTTIDRKRYTSTKEVLDATLIHQSITGLYETRIDLSQLGGDGGGSSPAPGGTLNIEDEYRLHETSKEPDVPLGSTWLSDFPQAWAETGGMGLAVRQAPLIIPLKATSTPVSIKQYPMSQEARLGIKPHIQRLLDQGILVPCQSPWNTPLLPVKKPGTNDYRPVQDLREVNKRVEDIHPTVPNPYNLLSGLPPSHQWYTVLDLKDAFFCLRLHPTSQPLFAFEWRDPEMGISGQLTWTRLPQGFKNSPTLFNEALHRDLADFRIQHPDLILLQYVDDLLLAATSEQDCQRGTRALLQTLGNLGYRASAKKAQICQKQVKYLGYLLKEGQRWLTEARKETVMGQPTPKTPRQLREFLGKAGFCRLFIPGFAEMAAPLYPLTKPGTLFNWGPDQQKAYQEIKQALLTAPALGLPDLTKPFELFVDEKQGYAKGVLTQKLGPWRRPVAYLSKKLDPVAAGWPPCLRMVAAIAVLTKDAGKLTMGQPLVILAPHAVEALVKQPPDRWLSNARMTHYQAMLLDTDRVQFGPVVALNPATLLPLPEKEAPHDCLEILAETHGTRPDLTDQPIPDADYTWYTDGSSFLQEGQRRAGAAVTTETEVIWARALPAGTSAQRAELIALTQALKMAEGKKLNVYTDSRYAFATAHVHGEIYRRRGWLTSEGREIKNKNEILALLKALFLPKRLSIIHCPGHQKGNSAEARGNRMADQAAREAAMKAVLETSTLLAGKRTADGSEFEKRTADGSEFESPKKKAKVE

SEQ ID NO: 1087 - protein, 2094 aa, synthetic construct
  source 1..2094: note = Description of Artificial Sequence: Synthetic polypeptide
MPAAKRVKLDGGDKKYSIGLDIGTNSVGWAVITDEYKVPSKKFKVLGNTDRHSIKKNLIGALLFDSGETAEATRLKRTARRRYTRRKNRICYLQEIFSNEMAKVDDSFFHRLEESFLVEEDKKHERHPIFGNIVDEVAYHEKYPTIYHLRKKLVDSTDKADLRLIYLALAHMIKFRGHFLIEGDLNPDNSDVDKLFIQLVQTYNQLFEENPINASGVDAKAILSARLSKSRRLENLIAQLPGEKKNGLFGNLIALSLGLTPNFKSNFDLAEDAKLQLSKDTYDDDLDNLLAQIGDQYADLFLAAKNLSDAILLSDILRVNTEITKAPLSASMIKRYDEHHQDLTLLKALVRQQLPEKYKEIFFDQSKNGYAGYIDGGASQEEFYKFIKPILEKMDGTEELLVKLNREDLLRKQRTFDNGSIPHQIHLGELHAILRRQEDFYPFLKDNREKIEKILTFRIPYYVGPLARGNSRFAWMTRKSEETITPWNFEEVVDKGASAQSFIERMTNFDKNLPNEKVLPKHSLLYEYFTVYNELTKVKYVTEGMRKPAFLSGEQKKAIVDLLFKTNRKVTVKQLKEDYFKKIECFDSVEISGVEDRFNASLGTYHDLLKIIKDKDFLDNEENEDILEDIVLTLTLFEDREMIEERLKTYAHLFDDKVMKQLKRRRYTGWGRLSRKLINGIRDKQSGKTILDFLKSDGFANRNFMQLIHDDSLTFKEDIQKAQVSGQGDSLHEHIANLAGSPAIKKGILQTVKVVDELVKVMGRHKPENIVIEMARENQTTQKGQKNSRERMKRIEEGIKELGSQILKEHPVENTQLQNEKLYLYYLQNGRDMYVDQELDINRLSDYDVDHIVPQSFLKDDSIDNKVLTRSDKARGKSDNVPSEEVVKKMKNYWRQLLNAKLITQRKFDNLTKAERGGLSELDKAGFIKRQLVETRQITKHVAQILDSRMNTKYDENDKLIREVKVITLKSKLVSDFRKDFQFYKVREINNYHHAHDAYLNAVVGTALIKKYPKLESEFVYGDYKVYDVRKMIAKSEQEIGKATAKYFFYSNIMNFFKTEITLANGEIRKRPLIETNGETGEIVWDKGRDFATVRKVLSMPQVNIVKKTEVQTGGFSKESILPKRNSDKLIARKKDWDPKKYGGFDSPTVAYSVLVVAKVEKGKSKKLKSVKELLGITIMERSSFEKNPIDFLEAKGYKEVKKDLIIKLPKYSLFELENGRKRMLASAGELQKGNELALPSKYVNFLYLASHYEKLKGSPEDNEQKQLFVEQHKHYLDEIIEQISEFSKRVILADANLDKVLSAYNKHRDKPIREQAENIIHLFTLTNLGAPAAFKYFDTTIDRKRYTSTKEVLDATLIHQSITGLYETRIDLSQLGGDGGGGGGSSGGSGGTLNIEDEYRLHETSKEPDVPLGSTWLSDFPQAWAETGGMGLAVRQAPLIIPLKATSTPVSIKQYPMSQEARLGIKPHIQRLLDQGILVPCQSPWNTPLLPVKKPGTNDYRPVQDLREVNKRVEDIHPTVPNPYNLLSGLPPSHQWYTVLDLKDAFFCLRLHPTSQPLFAFEWRDPEMGISGQLTWTRLPQGFKNSPTLFNEALHRDLADFRIQHPDLILLQYVDDLLLAATSEQDCQRGTRALLQTLGNLGYRASAKKAQICQKQVKYLGYLLKEGQRWLTEARKETVMGQPTPKTPRQLREFLGKAGFCRLFIPGFAEMAAPLYPLTKPGTLFNWGPDQQKAYQEIKQALLTAPALGLPDLTKPFELFVDEKQGYAKGVLTQKLGPWRRPVAYLSKKLDPVAAGWPPCLRMVAAIAVLTKDAGKLTMGQPLVILAPHAVEALVKQPPDRWLSNARMTHYQAMLLDTDRVQFGPVVALNPATLLPLPEKEAPHDCLEILAETHGTRPDLTDQPIPDADYTWYTDGSSFLQEGQRRAGAAVTTETEVIWARALPAGTSAQRAELIALTQALKMAEGKKLNVYTDSRYAFATAHVHGEIYRRRGWLTSEGREIKNKNEILALLKALFLPKRLSIIHCPGHQKGNSAEARGNRMADQAAREAAMKAVLETSTLLAGKRTADGSEFEKRTADGSEFESPKKKAKVE

SEQ ID NO: 1088 - protein, 2096 aa, synthetic construct
  source 1..2096: note = Description of Artificial Sequence: Synthetic polypeptide
MPAAKRVKLDGGDKKYSIGLDIGTNSVGWAVITDEYKVPSKKFKVLGNTDRHSIKKNLIGALLFDSGETAEATRLKRTARRRYTRRKNRICYLQEIFSNEMAKVDDSFFHRLEESFLVEEDKKHERHPIFGNIVDEVAYHEKYPTIYHLRKKLVDSTDKADLRLIYLALAHMIKFRGHFLIEGDLNPDNSDVDKLFIQLVQTYNQLFEENPINASGVDAKAILSARLSKSRRLENLIAQLPGEKKNGLFGNLIALSLGLTPNFKSNFDLAEDAKLQLSKDTYDDDLDNLLAQIGDQYADLFLAAKNLSDAILLSDILRVNTEITKAPLSASMIKRYDEHHQDLTLLKALVRQQLPEKYKEIFFDQSKNGYAGYIDGGASQEEFYKFIKPILEKMDGTEELLVKLNREDLLRKQRTFDNGSIPHQIHLGELHAILRRQEDFYPFLKDNREKIEKILTFRIPYYVGPLARGNSRFAWMTRKSEETITPWNFEEVVDKGASAQSFIERMTNFDKNLPNEKVLPKHSLLYEYFTVYNELTKVKYVTEGMRKPAFLSGEQKKAIVDLLFKTNRKVTVKQLKEDYFKKIECFDSVEISGVEDRFNASLGTYHDLLKIIKDKDFLDNEENEDILEDIVLTLTLFEDREMIEERLKTYAHLFDDKVMKQLKRRRYTGWGRLSRKLINGIRDKQSGKTILDFLKSDGFANRNFMQLIHDDSLTFKEDIQKAQVSGQGDSLHEHIANLAGSPAIKKGILQTVKVVDELVKVMGRHKPENIVIEMARENQTTQKGQKNSRERMKRIEEGIKELGSQILKEHPVENTQLQNEKLYLYYLQNGRDMYVDQELDINRLSDYDVDHIVPQSFLKDDSIDNKVLTRSDKARGKSDNVPSEEVVKKMKNYWRQLLNAKLITQRKFDNLTKAERGGLSELDKAGFIKRQLVETRQITKHVAQILDSRMNTKYDENDKLIREVKVITLKSKLVSDFRKDFQFYKVREINNYHHAHDAYLNAVVGTALIKKYPKLESEFVYGDYKVYDVRKMIAKSEQEIGKATAKYFFYSNIMNFFKTEITLANGEIRKRPLIETNGETGEIVWDKGRDFATVRKVLSMPQVNIVKKTEVQTGGFSKESILPKRNSDKLIARKKDWDPKKYGGFDSPTVAYSVLVVAKVEKGKSKKLKSVKELLGITIMERSSFEKNPIDFLEAKGYKEVKKDLIIKLPKYSLFELENGRKRMLASAGELQKGNELALPSKYVNFLYLASHYEKLKGSPEDNEQKQLFVEQHKHYLDEIIEQISEFSKRVILADANLDKVLSAYNKHRDKPIREQAENIIHLFTLTNLGAPAAFKYFDTTIDRKRYTSTKEVLDATLIHQSITGLYETRIDLSQLGGDGGGGGEAAAKGSSGGTLNIEDEYRLHETSKEPDVPLGSTWLSDFPQAWAETGGMGLAVRQAPLIIPLKATSTPVSIKQYPMSQEARLGIKPHIQRLLDQGILVPCQSPWNTPLLPVKKPGTNDYRPVQDLREVNKRVEDIHPTVPNPYNLLSGLPPSHQWYTVLDLKDAFFCLRLHPTSQPLFAFEWRDPEMGISGQLTWTRLPQGFKNSPTLFNEALHRDLADFRIQHPDLILLQYVDDLLLAATSEQDCQRGTRALLQTLGNLGYRASAKKAQICQKQVKYLGYLLKEGQRWLTEARKETVMGQPTPKTPRQLREFLGKAGFCRLFIPGFAEMAAPLYPLTKPGTLFNWGPDQQKAYQEIKQALLTAPALGLPDLTKPFELFVDEKQGYAKGVLTQKLGPWRRPVAYLSKKLDPVAAGWPPCLRMVAAIAVLTKDAGKLTMGQPLVILAPHAVEALVKQPPDRWLSNARMTHYQAMLLDTDRVQFGPVVALNPATLLPLPEKEAPHDCLEILAETHGTRPDLTDQPIPDADYTWYTDGSSFLQEGQRRAGAAVTTETEVIWARALPAGTSAQRAELIALTQALKMAEGKKLNVYTDSRYAFATAHVHGEIYRRRGWLTSEGREIKNKNEILALLKALFLPKRLSIIHCPGHQKGNSAEARGNRMADQAAREAAMKAVLETSTLLAGKRTADGSEFEKRTADGSEFESPKKKAKVE

SEQ ID NO: 1089 - protein, 2094 aa, synthetic construct
  source 1..2094: note = Description of Artificial Sequence: Synthetic polypeptide
MPAAKRVKLDGGDKKYSIGLDIGTNSVGWAVITDEYKVPSKKFKVLGNTDRHSIKKNLIGALLFDSGETAEATRLKRTARRRYTRRKNRICYLQEIFSNEMAKVDDSFFHRLEESFLVEEDKKHERHPIFGNIVDEVAYHEKYPTIYHLRKKLVDSTDKADLRLIYLALAHMIKFRGHFLIEGDLNPDNSDVDKLFIQLVQTYNQLFEENPINASGVDAKAILSARLSKSRRLENLIAQLPGEKKNGLFGNLIALSLGLTPNFKSNFDLAEDAKLQLSKDTYDDDLDNLLAQIGDQYADLFLAAKNLSDAILLSDILRVNTEITKAPLSASMIKRYDEHHQDLTLLKALVRQQLPEKYKEIFFDQSKNGYAGYIDGGASQEEFYKFIKPILEKMDGTEELLVKLNREDLLRKQRTFDNGSIPHQIHLGELHAILRRQEDFYPFLKDNREKIEKILTFRIPYYVGPLARGNSRFAWMTRKSEETITPWNFEEVVDKGASAQSFIERMTNFDKNLPNEKVLPKHSLLYEYFTVYNELTKVKYVTEGMRKPAFLSGEQKKAIVDLLFKTNRKVTVKQLKEDYFKKIECFDSVEISGVEDRFNASLGTYHDLLKIIKDKDFLDNEENEDILEDIVLTLTLFEDREMIEERLKTYAHLFDDKVMKQLKRRRYTGWGRLSRKLINGIRDKQSGKTILDFLKSDGFANRNFMQLIHDDSLTFKEDIQKAQVSGQGDSLHEHIANLAGSPAIKKGILQTVKVVDELVKVMGRHKPENIVIEMARENQTTQKGQKNSRERMKRIEEGIKELGSQILKEHPVENTQLQNEKLYLYYLQNGRDMYVDQELDINRLSDYDVDHIVPQSFLKDDSIDNKVLTRSDKARGKSDNVPSEEVVKKMKNYWRQLLNAKLITQRKFDNLTKAERGGLSELDKAGFIKRQLVETRQITKHVAQILDSRMNTKYDENDKLIREVKVITLKSKLVSDFRKDFQFYKVREINNYHHAHDAYLNAVVGTALIKKYPKLESEFVYGDYKVYDVRKMIAKSEQEIGKATAKYFFYSNIMNFFKTEITLANGEIRKRPLIETNGETGEIVWDKGRDFATVRKVLSMPQVNIVKKTEVQTGGFSKESILPKRNSDKLIARKKDWDPKKYGGFDSPTVAYSVLVVAKVEKGKSKKLKSVKELLGITIMERSSFEKNPIDFLEAKGYKEVKKDLIIKLPKYSLFELENGRKRMLASAGELQKGNELALPSKYVNFLYLASHYEKLKGSPEDNEQKQLFVEQHKHYLDEIIEQISEFSKRVILADANLDKVLSAYNKHRDKPIREQAENIIHLFTLTNLGAPAAFKYFDTTIDRKRYTSTKEVLDATLIHQSITGLYETRIDLSQLGGDGGGSSGSSGSSGGTLNIEDEYRLHETSKEPDVPLGSTWLSDFPQAWAETGGMGLAVRQAPLIIPLKATSTPVSIKQYPMSQEARLGIKPHIQRLLDQGILVPCQSPWNTPLLPVKKPGTNDYRPVQDLREVNKRVEDIHPTVPNPYNLLSGLPPSHQWYTVLDLKDAFFCLRLHPTSQPLFAFEWRDPEMGISGQLTWTRLPQGFKNSPTLFNEALHRDLADFRIQHPDLILLQYVDDLLLAATSEQDCQRGTRALLQTLGNLGYRASAKKAQICQKQVKYLGYLLKEGQRWLTEARKETVMGQPTPKTPRQLREFLGKAGFCRLFIPGFAEMAAPLYPLTKPGTLFNWGPDQQKAYQEIKQALLTAPALGLPDLTKPFELFVDEKQGYAKGVLTQKLGPWRRPVAYLSKKLDPVAAGWPPCLRMVAAIAVLTKDAGKLTMGQPLVILAPHAVEALVKQPPDRWLSNARMTHYQAMLLDTDRVQFGPVVALNPATLLPLPEKEAPHDCLEILAETHGTRPDLTDQPIPDADYTWYTDGSSFLQEGQRRAGAAVTTETEVIWARALPAGTSAQRAELIALTQALKMAEGKKLNVYTDSRYAFATAHVHGEIYRRRGWLTSEGREIKNKNEILALLKALFLPKRLSIIHCPGHQKGNSAEARGNRMADQAAREAAMKAVLETSTLLAGKRTADGSEFEKRTADGSEFESPKKKAKVE

SEQ ID NO: 1090 - protein, 2096 aa, synthetic construct
  source 1..2096: note = Description of Artificial Sequence: Synthetic polypeptide
MPAAKRVKLDGGDKKYSIGLDIGTNSVGWAVITDEYKVPSKKFKVLGNTDRHSIKKNLIGALLFDSGETAEATRLKRTARRRYTRRKNRICYLQEIFSNEMAKVDDSFFHRLEESFLVEEDKKHERHPIFGNIVDEVAYHEKYPTIYHLRKKLVDSTDKADLRLIYLALAHMIKFRGHFLIEGDLNPDNSDVDKLFIQLVQTYNQLFEENPINASGVDAKAILSARLSKSRRLENLIAQLPGEKKNGLFGNLIALSLGLTPNFKSNFDLAEDAKLQLSKDTYDDDLDNLLAQIGDQYADLFLAAKNLSDAILLSDILRVNTEITKAPLSASMIKRYDEHHQDLTLLKALVRQQLPEKYKEIFFDQSKNGYAGYIDGGASQEEFYKFIKPILEKMDGTEELLVKLNREDLLRKQRTFDNGSIPHQIHLGELHAILRRQEDFYPFLKDNREKIEKILTFRIPYYVGPLARGNSRFAWMTRKSEETITPWNFEEVVDKGASAQSFIERMTNFDKNLPNEKVLPKHSLLYEYFTVYNELTKVKYVTEGMRKPAFLSGEQKKAIVDLLFKTNRKVTVKQLKEDYFKKIECFDSVEISGVEDRFNASLGTYHDLLKIIKDKDFLDNEENEDILEDIVLTLTLFEDREMIEERLKTYAHLFDDKVMKQLKRRRYTGWGRLSRKLINGIRDKQSGKTILDFLKSDGFANRNFMQLIHDDSLTFKEDIQKAQVSGQGDSLHEHIANLAGSPAIKKGILQTVKVVDELVKVMGRHKPENIVIEMARENQTTQKGQKNSRERMKRIEEGIKELGSQILKEHPVENTQLQNEKLYLYYLQNGRDMYVDQELDINRLSDYDVDHIVPQSFLKDDSIDNKVLTRSDKARGKSDNVPSEEVVKKMKNYWRQLLNAKLITQRKFDNLTKAERGGLSELDKAGFIKRQLVETRQITKHVAQILDSRMNTKYDENDKLIREVKVITLKSKLVSDFRKDFQFYKVREINNYHHAHDAYLNAVVGTALIKKYPKLESEFVYGDYKVYDVRKMIAKSEQEIGKATAKYFFYSNIMNFFKTEITLANGEIRKRPLIETNGETGEIVWDKGRDFATVRKVLSMPQVNIVKKTEVQTGGFSKESILPKRNSDKLIARKKDWDPKKYGGFDSPTVAYSVLVVAKVEKGKSKKLKSVKELLGITIMERSSFEKNPIDFLEAKGYKEVKKDLIIKLPKYSLFELENGRKRMLASAGELQKGNELALPSKYVNFLYLASHYEKLKGSPEDNEQKQLFVEQHKHYLDEIIEQISEFSKRVILADANLDKVLSAYNKHRDKPIREQAENIIHLFTLTNLGAPAAFKYFDTTIDRKRYTSTKEVLDATLIHQSITGLYETRIDLSQLGGDGGGGSPAPEAAAKGGTLNIEDEYRLHETSKEPDVPLGSTWLSDFPQAWAETGGMGLAVRQAPLIIPLKATSTPVSIKQYPMSQEARLGIKPHIQRLLDQGILVPCQSPWNTPLLPVKKPGTNDYRPVQDLREVNKRVEDIHPTVPNPYNLLSGLPPSHQWYTVLDLKDAFFCLRLHPTSQPLFAFEWRDPEMGISGQLTWTRLPQGFKNSPTLFNEALHRDLADFRIQHPDLILLQYVDDLLLAATSEQDCQRGTRALLQTLGNLGYRASAKKAQICQKQVKYLGYLLKEGQRWLTEARKETVMGQPTPKTPRQLREFLGKAGFCRLFIPGFAEMAAPLYPLTKPGTLFNWGPDQQKAYQEIKQALLTAPALGLPDLTKPFELFVDEKQGYAKGVLTQKLGPWRRPVAYLSKKLDPVAAGWPPCLRMVAAIAVLTKDAGKLTMGQPLVILAPHAVEALVKQPPDRWLSNARMTHYQAMLLDTDRVQFGPVVALNPATLLPLPEKEAPHDCLEILAETHGTRPDLTDQPIPDADYTWYTDGSSFLQEGQRRAGAAVTTETEVIWARALPAGTSAQRAELIALTQALKMAEGKKLNVYTDSRYAFATAHVHGEIYRRRGWLTSEGREIKNKNEILALLKALFLPKRLSIIHCPGHQKGNSAEARGNRMADQAAREAAMKAVLETSTLLAGKRTADGSEFEKRTADGSEFESPKKKAKVE

SEQ ID NO: 1091 - protein, 2096 aa, synthetic construct
  source 1..2096: note = Description of Artificial Sequence: Synthetic polypeptide
MPAAKRVKLDGGDKKYSIGLDIGTNSVGWAVITDEYKVPSKKFKVLGNTDRHSIKKNLIGALLFDSGETAEATRLKRTARRRYTRRKNRICYLQEIFSNEMAKVDDSFFHRLEESFLVEEDKKHERHPIFGNIVDEVAYHEKYPTIYHLRKKLVDSTDKADLRLIYLALAHMIKFRGHFLIEGDLNPDNSDVDKLFIQLVQTYNQLFEENPINASGVDAKAILSARLSKSRRLENLIAQLPGEKKNGLFGNLIALSLGLTPNFKSNFDLAEDAKLQLSKDTYDDDLDNLLAQIGDQYADLFLAAKNLSDAILLSDILRVNTEITKAPLSASMIKRYDEHHQDLTLLKALVRQQLPEKYKEIFFDQSKNGYAGYIDGGASQEEFYKFIKPILEKMDGTEELLVKLNREDLLRKQRTFDNGSIPHQIHLGELHAILRRQEDFYPFLKDNREKIEKILTFRIPYYVGPLARGNSRFAWMTRKSEETITPWNFEEVVDKGASAQSFIERMTNFDKNLPNEKVLPKHSLLYEYFTVYNELTKVKYVTEGMRKPAFLSGEQKKAIVDLLFKTNRKVTVKQLKEDYFKKIECFDSVEISGVEDRFNASLGTYHDLLKIIKDKDFLDNEENEDILEDIVLTLTLFEDREMIEERLKTYAHLFDDKVMKQLKRRRYTGWGRLSRKLINGIRDKQSGKTILDFLKSDGFANRNFMQLIHDDSLTFKEDIQKAQVSGQGDSLHEHIANLAGSPAIKKGILQTVKVVDELVKVMGRHKPENIVIEMARENQTTQKGQKNSRERMKRIEEGIKELGSQILKEHPVENTQLQNEKLYLYYLQNGRDMYVDQELDINRLSDYDVDHIVPQSFLKDDSIDNKVLTRSDKARGKSDNVPSEEVVKKMKNYWRQLLNAKLITQRKFDNLTKAERGGLSELDKAGFIKRQLVETRQITKHVAQILDSRMNTKYDENDKLIREVKVITLKSKLVSDFRKDFQFYKVREINNYHHAHDAYLNAVVGTALIKKYPKLESEFVYGDYKVYDVRKMIAKSEQEIGKATAKYFFYSNIMNFFKTEITLANGEIRKRPLIETNGETGEIVWDKGRDFATVRKVLSMPQVNIVKKTEVQTGGFSKESILPKRNSDKLIARKKDWDPKKYGGFDSPTVAYSVLVVAKVEKGKSKKLKSVKELLGITIMERSSFEKNPIDFLEAKGYKEVKKDLIIKLPKYSLFELENGRKRMLASAGELQKGNELALPSKYVNFLYLASHYEKLKGSPEDNEQKQLFVEQHKHYLDEIIEQISEFSKRVILADANLDKVLSAYNKHRDKPIREQAENIIHLFTLTNLGAPAAFKYFDTTIDRKRYTSTKEVLDATLIHQSITGLYETRIDLSQLGGDGGEAAAKGGGGGSGGTLNIEDEYRLHETSKEPDVPLGSTWLSDFPQAWAETGGMGLAVRQAPLIIPLKATSTPVSIKQYPMSQEARLGIKPHIQRLLDQGILVPCQSPWNTPLLPVKKPGTNDYRPVQDLREVNKRVEDIHPTVPNPYNLLSGLPPSHQWYTVLDLKDAFFCLRLHPTSQPLFAFEWRDPEMGISGQLTWTRLPQGFKNSPTLFNEALHRDLADFRIQHPDLILLQYVDDLLLAATSEQDCQRGTRALLQTLGNLGYRASAKKAQICQKQVKYLGYLLKEGQRWLTEARKETVMGQPTPKTPRQLREFLGKAGFCRLFIPGFAEMAAPLYPLTKPGTLFNWGPDQQKAYQEIKQALLTAPALGLPDLTKPFELFVDEKQGYAKGVLTQKLGPWRRPVAYLSKKLDPVAAGWPPCLRMVAAIAVLTKDAGKLTMGQPLVILAPHAVEALVKQPPDRWLSNARMTHYQAMLLDTDRVQFGPVVALNPATLLPLPEKEAPHDCLEILAETHGTRPDLTDQPIPDADYTWYTDGSSFLQEGQRRAGAAVTTETEVIWARALPAGTSAQRAELIALTQALKMAEGKKLNVYTDSRYAFATAHVHGEIYRRRGWLTSEGREIKNKNEILALLKALFLPKRLSIIHCPGHQKGNSAEARGNRMADQAAREAAMKAVLETSTLLAGKRTADGSEFEKRTADGSEFESPKKKAKVE

SEQ ID NO: 1092 - protein, 2109 aa, synthetic construct
  source 1..2109: note = Description of Artificial Sequence: Synthetic polypeptide
MPAAKRVKLDGGDKKYSIGLDIGTNSVGWAVITDEYKVPSKKFKVLGNTDRHSIKKNLIGALLFDSGETAEATRLKRTARRRYTRRKNRICYLQEIFSNEMAKVDDSFFHRLEESFLVEEDKKHERHPIFGNIVDEVAYHEKYPTIYHLRKKLVDSTDKADLRLIYLALAHMIKFRGHFLIEGDLNPDNSDVDKLFIQLVQTYNQLFEENPINASGVDAKAILSARLSKSRRLENLIAQLPGEKKNGLFGNLIALSLGLTPNFKSNFDLAEDAKLQLSKDTYDDDLDNLLAQIGDQYADLFLAAKNLSDAILLSDILRVNTEITKAPLSASMIKRYDEHHQDLTLLKALVRQQLPEKYKEIFFDQSKNGYAGYIDGGASQEEFYKFIKPILEKMDGTEELLVKLNREDLLRKQRTFDNGSIPHQIHLGELHAILRRQEDFYPFLKDNREKIEKILTFRIPYYVGPLARGNSRFAWMTRKSEETITPWNFEEVVDKGASAQSFIERMTNFDKNLPNEKVLPKHSLLYEYFTVYNELTKVKYVTEGMRKPAFLSGEQKKAIVDLLFKTNRKVTVKQLKEDYFKKIECFDSVEISGVEDRFNASLGTYHDLLKIIKDKDFLDNEENEDILEDIVLTLTLFEDREMIEERLKTYAHLFDDKVMKQLKRRRYTGWGRLSRKLINGIRDKQSGKTILDFLKSDGFANRNFMQLIHDDSLTFKEDIQKAQVSGQGDSLHEHIANLAGSPAIKKGILQTVKVVDELVKVMGRHKPENIVIEMARENQTTQKGQKNSRERMKRIEEGIKELGSQILKEHPVENTQLQNEKLYLYYLQNGRDMYVDQELDINRLSDYDVDHIVPQSFLKDDSIDNKVLTRSDKARGKSDNVPSEEVVKKMKNYWRQLLNAKLITQRKFDNLTKAERGGLSELDKAGFIKRQLVETRQITKHVAQILDSRMNTKYDENDKLIREVKVITLKSKLVSDFRKDFQFYKVREINNYHHAHDAYLNAVVGTALIKKYPKLESEFVYGDYKVYDVRKMIAKSEQEIGKATAKYFFYSNIMNFFKTEITLANGEIRKRPLIETNGETGEIVWDKGRDFATVRKVLSMPQVNIVKKTEVQTGGFSKESILPKRNSDKLIARKKDWDPKKYGGFDSPTVAYSVLVVAKVEKGKSKKLKSVKELLGITIMERSSFEKNPIDFLEAKGYKEVKKDLIIKLPKYSLFELENGRKRMLASAGELQKGNELALPSKYVNFLYLASHYEKLKGSPEDNEQKQLFVEQHKHYLDEIIEQISEFSKRVILADANLDKVLSAYNKHRDKPIREQAENIIHLFTLTNLGAPAAFKYFDTTIDRKRYTSTKEVLDATLIHQSITGLYETRIDLSQLGGDGGSGGSSGGSSGSETPGTSESATPESSGGSSGGSSGGVPWILKKPLELTIKLDLEEQQGTLLNNSILSKKGKEELKQLFEKYSALWQSWENQVGHRRIRPHKIATGTVKPTPQKQYHINPKAKPDIQIVINDLLKQGVLIQKESTMNTPVYPVPKPNGRWRMVLDYRAVNKVTPLIAVQNQHSYGILGSLFKGRYKTTIDLSNGFWAHPIVPEDYWITAFTWQGKQYCWTVLPQGFLNSPGLFNGDVVDLLQGIPNVEVYVDDVYISHDSEKEHLEYLDILFNRLKEAGYIISLKKSNIANSIVDFLGFQITNEGRGLTDTFKEKLENITAPTTLKQLQSILGLLNFARNFIPDFTELIAPLYALIPKSPKNYVPWQIEHSTTLETLITKLNGAEYLQGRKGDKTLIMKVNASYTTGYIRYYNEGEKKPISYVSIVFSKTELKFTELEKLLTTVHKGLLKALDLSMGQNIHVYSPIVSMQNIQKTPQTAKKALASRWLSWLSYLEDPRIRFFYDPQMPALKDLPAVDTGKDNKKHPSNFQHIFYTDGSAITSPTKEGHLNAGMGIVYFINKDGNLQKQQEWSISLGNHTAQFAEIAAFEFALKKCLPLGGNILVVTDSNYVAKAYNEELDVWASNGFVNNRKKPLKHISKWKSVADLKRLRPDVVVTHEPGHQKLDSSPHAYGNNLADQLATQASFKVHAGKRTADGSEFEKRTADGSEFESPKKKAKVE

SEQ ID NO: 1093 - protein, 2122 aa, synthetic construct
  source 1..2122: note = Description of Artificial Sequence: Synthetic polypeptide
MPAAKRVKLDGGDKKYSIGLDIGTNSVGWAVITDEYKVPSKKFKVLGNTDRHSIKKNLIGALLFDSGETAEATRLKRTARRRYTRRKNRICYLQEIFSNEMAKVDDSFFHRLEESFLVEEDKKHERHPIFGNIVDEVAYHEKYPTIYHLRKKLVDSTDKADLRLIYLALAHMIKFRGHFLIEGDLNPDNSDVDKLFIQLVQTYNQLFEENPINASGVDAKAILSARLSKSRRLENLIAQLPGEKKNGLFGNLIALSLGLTPNFKSNFDLAEDAKLQLSKDTYDDDLDNLLAQIGDQYADLFLAAKNLSDAILLSDILRVNTEITKAPLSASMIKRYDEHHQDLTLLKALVRQQLPEKYKEIFFDQSKNGYAGYIDGGASQEEFYKFIKPILEKMDGTEELLVKLNREDLLRKQRTFDNGSIPHQIHLGELHAILRRQEDFYPFLKDNREKIEKILTFRIPYYVGPLARGNSRFAWMTRKSEETITPWNFEEVVDKGASAQSFIERMTNFDKNLPNEKVLPKHSLLYEYFTVYNELTKVKYVTEGMRKPAFLSGEQKKAIVDLLFKTNRKVTVKQLKEDYFKKIECFDSVEISGVEDRFNASLGTYHDLLKIIKDKDFLDNEENEDILEDIVLTLTLFEDREMIEERLKTYAHLFDDKVMKQLKRRRYTGWGRLSRKLINGIRDKQSGKTILDFLKSDGFANRNFMQLIHDDSLTFKEDIQKAQVSGQGDSLHEHIANLAGSPAIKKGILQTVKVVDELVKVMGRHKPENIVIEMARENQTTQKGQKNSRERMKRIEEGIKELGSQILKEHPVENTQLQNEKLYLYYLQNGRDMYVDQELDINRLSDYDVDHIVPQSFLKDDSIDNKVLTRSDKARGKSDNVPSEEVVKKMKNYWRQLLNAKLITQRKFDNLTKAERGGLSELDKAGFIKRQLVETRQITKHVAQILDSRMNTKYDENDKLIREVKVITLKSKLVSDFRKDFQFYKVREINNYHHAHDAYLNAVVGTALIKKYPKLESEFVYGDYKVYDVRKMIAKSEQEIGKATAKYFFYSNIMNFFKTEITLANGEIRKRPLIETNGETGEIVWDKGRDFATVRKVLSMPQVNIVKKTEVQTGGFSKESILPKRNSDKLIARKKDWDPKKYGGFDSPTVAYSVLVVAKVEKGKSKKLKSVKELLGITIMERSSFEKNPIDFLEAKGYKEVKKDLIIKLPKYSLFELENGRKRMLASAGELQKGNELALPSKYVNFLYLASHYEKLKGSPEDNEQKQLFVEQHKHYLDEIIEQISEFSKRVILADANLDKVLSAYNKHRDKPIREQAENIIHLFTLTNLGAPAAFKYFDTTIDRKRYTSTKEVLDATLIHQSITGLYETRIDLSQLGGDGGAEAAAKEAAAKEAAAKEAAAKALEAEAAAKEAAAKEAAAKEAAAKAGGVPWILKKPLELTIKLDLEEQQGTLLNNSILSKKGKEELKQLFEKYSALWQSWENQVGHRRIRPHKIATGTVKPTPQKQYHINPKAKPDIQIVINDLLKQGVLIQKESTMNTPVYPVPKPNGRWRMVLDYRAVNKVTPLIAVQNQHSYGILGSLFKGRYKTTIDLSNGFWAHPIVPEDYWITAFTWQGKQYCWTVLPQGFLNSPGLFNGDVVDLLQGIPNVEVYVDDVYISHDSEKEHLEYLDILFNRLKEAGYIISLKKSNIANSIVDFLGFQITNEGRGLTDTFKEKLENITAPTTLKQLQSILGLLNFARNFIPDFTELIAPLYALIPKSPKNYVPWQIEHSTTLETLITKLNGAEYLQGRKGDKTLIMKVNASYTTGYIRYYNEGEKKPISYVSIVFSKTELKFTELEKLLTTVHKGLLKALDLSMGQNIHVYSPIVSMQNIQKTPQTAKKALASRWLSWLSYLEDPRIRFFYDPQMPALKDLPAVDTGKDNKKHPSNFQHIFYTDGSAITSPTKEGHLNAGMGIVYFINKDGNLQKQQEWSISLGNHTAQFAEIAAFEFALKKCLPLGGNILVVTDSNYVAKAYNEELDVWASNGFVNNRKKPLKHISKWKSVADLKRLRPDVVVTHEPGHQKLDSSPHAYGNNLADQLATQASFKVHAGKRTADGSEFEKRTADGSEFESPKKKAKVE

SEQ ID NO: 1094 - protein, 2106 aa, synthetic construct
  source 1..2106: note = Description of Artificial Sequence: Synthetic polypeptide
MPAAKRVKLDGGDKKYSIGLDIGTNSVGWAVITDEYKVPSKKFKVLGNTDRHSIKKNLIGALLFDSGETAEATRLKRTARRRYTRRKNRICYLQEIFSNEMAKVDDSFFHRLEESFLVEEDKKHERHPIFGNIVDEVAYHEKYPTIYHLRKKLVDSTDKADLRLIYLALAHMIKFRGHFLIEGDLNPDNSDVDKLFIQLVQTYNQLFEENPINASGVDAKAILSARLSKSRRLENLIAQLPGEKKNGLFGNLIALSLGLTPNFKSNFDLAEDAKLQLSKDTYDDDLDNLLAQIGDQYADLFLAAKNLSDAILLSDILRVNTEITKAPLSASMIKRYDEHHQDLTLLKALVRQQLPEKYKEIFFDQSKNGYAGYIDGGASQEEFYKFIKPILEKMDGTEELLVKLNREDLLRKQRTFDNGSIPHQIHLGELHAILRRQEDFYPFLKDNREKIEKILTFRIPYYVGPLARGNSRFAWMTRKSEETITPWNFEEVVDKGASAQSFIERMTNFDKNLPNEKVLPKHSLLYEYFTVYNELTKVKYVTEGMRKPAFLSGEQKKAIVDLLFKTNRKVTVKQLKEDYFKKIECFDSVEISGVEDRFNASLGTYHDLLKIIKDKDFLDNEENEDILEDIVLTLTLFEDREMIEERLKTYAHLFDDKVMKQLKRRRYTGWGRLSRKLINGIRDKQSGKTILDFLKSDGFANRNFMQLIHDDSLTFKEDIQKAQVSGQGDSLHEHIANLAGSPAIKKGILQTVKVVDELVKVMGRHKPENIVIEMARENQTTQKGQKNSRERMKRIEEGIKELGSQILKEHPVENTQLQNEKLYLYYLQNGRDMYVDQELDINRLSDYDVDHIVPQSFLKDDSIDNKVLTRSDKARGKSDNVPSEEVVKKMKNYWRQLLNAKLITQRKFDNLTKAERGGLSELDKAGFIKRQLVETRQITKHVAQILDSRMNTKYDENDKLIREVKVITLKSKLVSDFRKDFQFYKVREINNYHHAHDAYLNAVVGTALIKKYPKLESEFVYGDYKVYDVRKMIAKSEQEIGKATAKYFFYSNIMNFFKTEITLANGEIRKRPLIETNGETGEIVWDKGRDFATVRKVLSMPQVNIVKKTEVQTGGFSKESILPKRNSDKLIARKKDWDPKKYGGFDSPTVAYSVLVVAKVEKGKSKKLKSVKELLGITIMERSSFEKNPIDFLEAKGYKEVKKDLIIKLPKYSLFELENGRKRMLASAGELQKGNELALPSKYVNFLYLASHYEKLKGSPEDNEQKQLFVEQHKHYLDEIIEQISEFSKRVILADANLDKVLSAYNKHRDKPIREQAENIIHLFTLTNLGAPAAFKYFDTTIDRKRYTSTKEVLDATLIHQSITGLYETRIDLSQLGGDGGEAAAKEAAAKEAAAKEAAAKEAAAKEAAAKGGVPWILKKPLELTIKLDLEEQQGTLLNNSILSKKGKEELKQLFEKYSALWQSWENQVGHRRIRPHKIATGTVKPTPQKQYHINPKAKPDIQIVINDLLKQGVLIQKESTMNTPVYPVPKPNGRWRMVLDYRAVNKVTPLIAVQNQHSYGILGSLFKGRYKTTIDLSNGFWAHPIVPEDYWITAFTWQGKQYCWTVLPQGFLNSPGLFNGDVVDLLQGIPNVEVYVDDVYISHDSEKEHLEYLDILFNRLKEAGYIISLKKSNIANSIVDFLGFQITNEGRGLTDTFKEKLENITAPTTLKQLQSILGLLNFARNFIPDFTELIAPLYALIPKSPKNYVPWQIEHSTTLETLITKLNGAEYLQGRKGDKTLIMKVNASYTTGYIRYYNEGEKKPISYVSIVFSKTELKFTELEKLLTTVHKGLLKALDLSMGQNIHVYSPIVSMQNIQKTPQTAKKALASRWLSWLSYLEDPRIRFFYDPQMPALKDLPAVDTGKDNKKHPSNFQHIFYTDGSAITSPTKEGHLNAGMGIVYFINKDGNLQKQQEWSISLGNHTAQFAEIAAFEFALKKCLPLGGNILVVTDSNYVAKAYNEELDVWASNGFVNNRKKPLKHISKWKSVADLKRLRPDVVVTHEPGHQKLDSSPHAYGNNLADQLATQASFKVHAGKRTADGSEFEKRTADGSEFESPKKKAKVE

SEQ ID NO: 1095 - protein, 2094 aa, synthetic construct
  source 1..2094: note = Description of Artificial Sequence: Synthetic polypeptide
MPAAKRVKLDGGDKKYSIGLDIGTNSVGWAVITDEYKVPSKKFKVLGNTDRHSIKKNLIGALLFDSGETAEATRLKRTARRRYTRRKNRICYLQEIFSNEMAKVDDSFFHRLEESFLVEEDKKHERHPIFGNIVDEVAYHEKYPTIYHLRKKLVDSTDKADLRLIYLALAHMIKFRGHFLIEGDLNPDNSDVDKLFIQLVQTYNQLFEENPINASGVDAKAILSARLSKSRRLENLIAQLPGEKKNGLFGNLIALSLGLTPNFKSNFDLAEDAKLQLSKDTYDDDLDNLLAQIGDQYADLFLAAKNLSDAILLSDILRVNTEITKAPLSASMIKRYDEHHQDLTLLKALVRQQLPEKYKEIFFDQSKNGYAGYIDGGASQEEFYKFIKPILEKMDGTEELLVKLNREDLLRKQRTFDNGSIPHQIHLGELHAILRRQEDFYPFLKDNREKIEKILTFRIPYYVGPLARGNSRFAWMTRKSEETITPWNFEEVVDKGASAQSFIERMTNFDKNLPNEKVLPKHSLLYEYFTVYNELTKVKYVTEGMRKPAFLSGEQKKAIVDLLFKTNRKVTVKQLKEDYFKKIECFDSVEISGVEDRFNASLGTYHDLLKIIKDKDFLDNEENEDILEDIVLTLTLFEDREMIEERLKTYAHLFDDKVMKQLKRRRYTGWGRLSRKLINGIRDKQSGKTILDFLKSDGFANRNFMQLIHDDSLTFKEDIQKAQVSGQGDSLHEHIANLAGSPAIKKGILQTVKVVDELVKVMGRHKPENIVIEMARENQTTQKGQKNSRERMKRIEEGIKELGSQILKEHPVENTQLQNEKLYLYYLQNGRDMYVDQELDINRLSDYDVDHIVPQSFLKDDSIDNKVLTRSDKARGKSDNVPSEEVVKKMKNYWRQLLNAKLITQRKFDNLTKAERGGLSELDKAGFIKRQLVETRQITKHVAQILDSRMNTKYDENDKLIREVKVITLKSKLVSDFRKDFQFYKVREINNYHHAHDAYLNAVVGTALIKKYPKLESEFVYGDYKVYDVRKMIAKSEQEIGKATAKYFFYSNIMNFFKTEITLANGEIRKRPLIETNGETGEIVWDKGRDFATVRKVLSMPQVNIVKKTEVQTGGFSKESILPKRNSDKLIARKKDWDPKKYGGFDSPTVAYSVLVVAKVEKGKSKKLKSVKELLGITIMERSSFEKNPIDFLEAKGYKEVKKDLIIKLPKYSLFELENGRKRMLASAGELQKGNELALPSKYVNFLYLASHYEKLKGSPEDNEQKQLFVEQHKHYLDEIIEQISEFSKRVILADANLDKVLSAYNKHRDKPIREQAENIIHLFTLTNLGAPAAFKYFDTTIDRKRYTSTKEVLDATLIHQSITGLYETRIDLSQLGGDGGGSSGSSGSSGSSGSSGSSGGVPWILKKPLELTIKLDLEEQQGTLLNNSILSKKGKEELKQLFEKYSALWQSWENQVGHRRIRPHKIATGTVKPTPQKQYHINPKAKPDIQIVINDLLKQGVLIQKESTMNTPVYPVPKPNGRWRMVLDYRAVNKVTPLIAVQNQHSYGILGSLFKGRYKTTIDLSNGFWAHPIVPEDYWITAFTWQGKQYCWTVLPQGFLNSPGLFNGDVVDLLQGIPNVEVYVDDVYISHDSEKEHLEYLDILFNRLKEAGYIISLKKSNIANSIVDFLGFQITNEGRGLTDTFKEKLENITAPTTLKQLQSILGLLNFARNFIPDFTELIAPLYALIPKSPKNYVPWQIEHSTTLETLITKLNGAEYLQGRKGDKTLIMKVNASYTTGYIRYYNEGEKKPISYVSIVFSKTELKFTELEKLLTTVHKGLLKALDLSMGQNIHVYSPIVSMQNIQKTPQTAKKALASRWLSWLSYLEDPRIRFFYDPQMPALKDLPAVDTGKDNKKHPSNFQHIFYTDGSAITSPTKEGHLNAGMGIVYFINKDGNLQKQQEWSISLGNHTAQFAEIAAFEFALKKCLPLGGNILVVTDSNYVAKAYNEELDVWASNGFVNNRKKPLKHISKWKSVADLKRLRPDVVVTHEPGHQKLDSSPHAYGNNLADQLATQASFKVHAGKRTADGSEFEKRTADGSEFESPKKKAKVE

SEQ ID NO: 1096 - protein, 2087 aa, synthetic construct
  source 1..2087: note = Description of Artificial Sequence: Synthetic polypeptide
MPAAKRVKLDGGDKKYSIGLDIGTNSVGWAVITDEYKVPSKKFKVLGNTDRHSIKKNLIGALLFDSGETAEATRLKRTARRRYTRRKNRICYLQEIFSNEMAKVDDSFFHRLEESFLVEEDKKHERHPIFGNIVDEVAYHEKYPTIYHLRKKLVDSTDKADLRLIYLALAHMIKFRGHFLIEGDLNPDNSDVDKLFIQLVQTYNQLFEENPINASGVDAKAILSARLSKSRRLENLIAQLPGEKKNGLFGNLIALSLGLTPNFKSNFDLAEDAKLQLSKDTYDDDLDNLLAQIGDQYADLFLAAKNLSDAILLSDILRVNTEITKAPLSASMIKRYDEHHQDLTLLKALVRQQLPEKYKEIFFDQSKNGYAGYIDGGASQEEFYKFIKPILEKMDGTEELLVKLNREDLLRKQRTFDNGSIPHQIHLGELHAILRRQEDFYPFLKDNREKIEKILTFRIPYYVGPLARGNSRFAWMTRKSEETITPWNFEEVVDKGASAQSFIERMTNFDKNLPNEKVLPKHSLLYEYFTVYNELTKVKYVTEGMRKPAFLSGEQKKAIVDLLFKTNRKVTVKQLKEDYFKKIECFDSVEISGVEDRFNASLGTYHDLLKIIKDKDFLDNEENEDILEDIVLTLTLFEDREMIEERLKTYAHLFDDKVMKQLKRRRYTGWGRLSRKLINGIRDKQSGKTILDFLKSDGFANRNFMQLIHDDSLTFKEDIQKAQVSGQGDSLHEHIANLAGSPAIKKGILQTVKVVDELVKVMGRHKPENIVIEMARENQTTQKGQKNSRERMKRIEEGIKELGSQILKEHPVENTQLQNEKLYLYYLQNGRDMYVDQELDINRLSDYDVDHIVPQSFLKDDSIDNKVLTRSDKARGKSDNVPSEEVVKKMKNYWRQLLNAKLITQRKFDNLTKAERGGLSELDKAGFIKRQLVETRQITKHVAQILDSRMNTKYDENDKLIREVKVITLKSKLVSDFRKDFQFYKVREINNYHHAHDAYLNAVVGTALIKKYPKLESEFVYGDYKVYDVRKMIAKSEQEIGKATAKYFFYSNIMNFFKTEITLANGEIRKRPLIETNGETGEIVWDKGRDFATVRKVLSMPQVNIVKKTEVQTGGFSKESILPKRNSDKLIARKKDWDPKKYGGFDSPTVAYSVLVVAKVEKGKSKKLKSVKELLGITIMERSSFEKNPIDFLEAKGYKEVKKDLIIKLPKYSLFELENGRKRMLASAGELQKGNELALPSKYVNFLYLASHYEKLKGSPEDNEQKQLFVEQHKHYLDEIIEQISEFSKRVILADANLDKVLSAYNKHRDKPIREQAENIIHLFTLTNLGAPAAFKYFDTTIDRKRYTSTKEVLDATLIHQSITGLYETRIDLSQLGGDGGPAPGGGEAAAKGGVPWILKKPLELTIKLDLEEQQGTLLNNSILSKKGKEELKQLFEKYSALWQSWENQVGHRRIRPHKIATGTVKPTPQKQYHINPKAKPDIQIVINDLLKQGVLIQKESTMNTPVYPVPKPNGRWRMVLDYRAVNKVTPLIAVQNQHSYGILGSLFKGRYKTTIDLSNGFWAHPIVPEDYWITAFTWQGKQYCWTVLPQGFLNSPGLFNGDVVDLLQGIPNVEVYVDDVYISHDSEKEHLEYLDILFNRLKEAGYIISLKKSNIANSIVDFLGFQITNEGRGLTDTFKEKLENITAPTTLKQLQSILGLLNFARNFIPDFTELIAPLYALIPKSPKNYVPWQIEHSTTLETLITKLNGAEYLQGRKGDKTLIMKVNASYTTGYIRYYNEGEKKPISYVSIVFSKTELKFTELEKLLTTVHKGLLKALDLSMGQNIHVYSPIVSMQNIQKTPQTAKKALASRWLSWLSYLEDPRIRFFYDPQMPALKDLPAVDTGKDNKKHPSNFQHIFYTDGSAITSPTKEGHLNAGMGIVYFINKDGNLQKQQEWSISLGNHTAQFAEIAAFEFALKKCLPLGGNILVVTDSNYVAKAYNEELDVWASNGFVNNRKKPLKHISKWKSVADLKRLRPDVVVTHEPGHQKLDSSPHAYGNNLADQLATQASFKVHAGKRTADGSEFEKRTADGSEFESPKKKAKVE

SEQ ID NO: 1097 - protein, 2087 aa, synthetic construct
  source 1..2087: note = Description of Artificial Sequence: Synthetic polypeptide
MPAAKRVKLDGGDKKYSIGLDIGTNSVGWAVITDEYKVPSKKFKVLGNTDRHSIKKNLIGALLFDSGETAEATRLKRTARRRYTRRKNRICYLQEIFSNEMAKVDDSFFHRLEESFLVEEDKKHERHPIFGNIVDEVAYHEKYPTIYHLRKKLVDSTDKADLRLIYLALAHMIKFRGHFLIEGDLNPDNSDVDKLFIQLVQTYNQLFEENPINASGVDAKAILSARLSKSRRLENLIAQLPGEKKNGLFGNLIALSLGLTPNFKSNFDLAEDAKLQLSKDTYDDDLDNLLAQIGDQYADLFLAAKNLSDAILLSDILRVNTEITKAPLSASMIKRYDEHHQDLTLLKALVRQQLPEKYKEIFFDQSKNGYAGYIDGGASQEEFYKFIKPILEKMDGTEELLVKLNREDLLRKQRTFDNGSIPHQIHLGELHAILRRQEDFYPFLKDNREKIEKILTFRIPYYVGPLARGNSRFAWMTRKSEETITPWNFEEVVDKGASAQSFIERMTNFDKNLPNEKVLPKHSLLYEYFTVYNELTKVKYVTEGMRKPAFLSGEQKKAIVDLLFKTNRKVTVKQLKEDYFKKIECFDSVEISGVEDRFNASLGTYHDLLKIIKDKDFLDNEENEDILEDIVLTLTLFEDREMIEERLKTYAHLFDDKVMKQLKRRRYTGWGRLSRKLINGIRDKQSGKTILDFLKSDGFANRNFMQLIHDDSLTFKEDIQKAQVSGQGDSLHEHIANLAGSPAIKKGILQTVKVVDELVKVMGRHKPENIVIEMARENQTTQKGQKNSRERMKRIEEGIKELGSQILKEHPVENTQLQNEKLYLYYLQNGRDMYVDQELDINRLSDYDVDHIVPQSFLKDDSIDNKVLTRSDKARGKSDNVPSEEVVKKMKNYWRQLLNAKLITQRKFDNLTKAERGGLSELDKAGFIKRQLVETRQITKHVAQILDSRMNTKYDENDKLIREVKVITLKSKLVSDFRKDFQFYKVREINNYHHAHDAYLNAVVGTALIKKYPKLESEFVYGDYKVYDVRKMIAKSEQEIGKATAKYFFYSNIMNFFKTEITLANGEIRKRPLIETNGETGEIVWDKGRDFATVRKVLSMPQVNIVKKTEVQTGGFSKESILPKRNSDKLIARKKDWDPKKYGGFDSPTVAYSVLVVAKVEKGKSKKLKSVKELLGITIMERSSFEKNPIDFLEAKGYKEVKKDLIIKLPKYSLFELENGRKRMLASAGELQKGNELALPSKYVNFLYLASHYEKLKGSPEDNEQKQLFVEQHKHYLDEIIEQISEFSKRVILADANLDKVLSAYNKHRDKPIREQAENIIHLFTLTNLGAPAAFKYFDTTIDRKRYTSTKEVLDATLIHQSITGLYETRIDLSQLGGDGGGGSEAAAKPAPGGVPWILKKPLELTIKLDLEEQQGTLLNNSILSKKGKEELKQLFEKYSALWQSWENQVGHRRIRPHKIATGTVKPTPQKQYHINPKAKPDIQIVINDLLKQGVLIQKESTMNTPVYPVPKPNGRWRMVLDYRAVNKVTPLIAVQNQHSYGILGSLFKGRYKTTIDLSNGFWAHPIVPEDYWITAFTWQGKQYCWTVLPQGFLNSPGLFNGDVVDLLQGIPNVEVYVDDVYISHDSEKEHLEYLDILFNRLKEAGYIISLKKSNIANSIVDFLGFQITNEGRGLTDTFKEKLENITAPTTLKQLQSILGLLNFARNFIPDFTELIAPLYALIPKSPKNYVPWQIEHSTTLETLITKLNGAEYLQGRKGDKTLIMKVNASYTTGYIRYYNEGEKKPISYVSIVFSKTELKFTELEKLLTTVHKGLLKALDLSMGQNIHVYSPIVSMQNIQKTPQTAKKALASRWLSWLSYLEDPRIRFFYDPQMPALKDLPAVDTGKDNKKHPSNFQHIFYTDGSAITSPTKEGHLNAGMGIVYFINKDGNLQKQQEWSISLGNHTAQFAEIAAFEFALKKCLPLGGNILVVTDSNYVAKAYNEELDVWASNGFVNNRKKPLKHISKWKSVADLKRLRPDVVVTHEPGHQKLDSSPHAYGNNLADQLATQASFKVHAGKRTADGSEFEKRTADGSEFESPKKKAKVE

SEQ ID NO: 1098 - protein, 2085 aa, synthetic construct
  source 1..2085: note = Description of Artificial Sequence: Synthetic polypeptide
MPAAKRVKLDGGDKKYSIGLDIGTNSVGWAVITDEYKVPSKKFKVLGNTDRHSIKKNLIGALLFDSGETAEATRLKRTARRRYTRRKNRICYLQEIFSNEMAKVDDSFFHRLEESFLVEEDKKHERHPIFGNIVDEVAYHEKYPTIYHLRKKLVDSTDKADLRLIYLALAHMIKFRGHFLIEGDLNPDNSDVDKLFIQLVQTYNQLFEENPINASGVDAKAILSARLSKSRRLENLIAQLPGEKKNGLFGNLIALSLGLTPNFKSNFDLAEDAKLQLSKDTYDDDLDNLLAQIGDQYADLFLAAKNLSDAILLSDILRVNTEITKAPLSASMIKRYDEHHQDLTLLKALVRQQLPEKYKEIFFDQSKNGYAGYIDGGASQEEFYKFIKPILEKMDGTEELLVKLNREDLLRKQRTFDNGSIPHQIHLGELHAILRRQEDFYPFLKDNREKIEKILTFRIPYYVGPLARGNSRFAWMTRKSEETITPWNFEEVVDKGASAQSFIERMTNFDKNLPNEKVLPKHSLLYEYFTVYNELTKVKYVTEGMRKPAFLSGEQKKAIVDLLFKTNRKVTVKQLKEDYFKKIECFDSVEISGVEDRFNASLGTYHDLLKIIKDKDFLDNEENEDILEDIVLTLTLFEDREMIEERLKTYAHLFDDKVMKQLKRRRYTGWGRLSRKLINGIRDKQSGKTILDFLKSDGFANRNFMQLIHDDSLTFKEDIQKAQVSGQGDSLHEHIANLAGSPAIKKGILQTVKVVDELVKVMGRHKPENIVIEMARENQTTQKGQKNSRERMKRIEEGIKELGSQILKEHPVENTQLQNEKLYLYYLQNGRDMYVDQELDINRLSDYDVDHIVPQSFLKDDSIDNKVLTRSDKARGKSDNVPSEEVVKKMKNYWRQLLNAKLITQRKFDNLTKAERGGLSELDKAGFIKRQLVETRQITKHVAQILDSRMNTKYDENDKLIREVKVITLKSKLVSDFRKDFQFYKVREINNYHHAHDAYLNAVVGTALIKKYPKLESEFVYGDYKVYDVRKMIAKSEQEIGKATAKYFFYSNIMNFFKTEITLANGEIRKRPLIETNGETGEIVWDKGRDFATVRKVLSMPQVNIVKKTEVQTGGFSKESILPKRNSDKLIARKKDWDPKKYGGFDSPTVAYSVLVVAKVEKGKSKKLKSVKELLGITIMERSSFEKNPIDFLEAKGYKEVKKDLIIKLPKYSLFELENGRKRMLASAGELQKGNELALPSKYVNFLYLASHYEKLKGSPEDNEQKQLFVEQHKHYLDEIIEQISEFSKRVILADANLDKVLSAYNKHRDKPIREQAENIIHLFTLTNLGAPAAFKYFDTTIDRKRYTSTKEVLDATLIHQSITGLYETRIDLSQLGGDGGPAPGGSGGGGGVPWILKKPLELTIKLDLEEQQGTLLNNSILSKKGKEELKQLFEKYSALWQSWENQVGHRRIRPHKIATGTVKPTPQKQYHINPKAKPDIQIVINDLLKQGVLIQKESTMNTPVYPVPKPNGRWRMVLDYRAVNKVTPLIAVQNQHSYGILGSLFKGRYKTTIDLSNGFWAHPIVPEDYWITAFTWQGKQYCWTVLPQGFLNSPGLFNGDVVDLLQGIPNVEVYVDDVYISHDSEKEHLEYLDILFNRLKEAGYIISLKKSNIANSIVDFLGFQITNEGRGLTDTFKEKLENITAPTTLKQLQSILGLLNFARNFIPDFTELIAPLYALIPKSPKNYVPWQIEHSTTLETLITKLNGAEYLQGRKGDKTLIMKVNASYTTGYIRYYNEGEKKPISYVSIVFSKTELKFTELEKLLTTVHKGLLKALDLSMGQNIHVYSPIVSMQNIQKTPQTAKKALASRWLSWLSYLEDPRIRFFYDPQMPALKDLPAVDTGKDNKKHPSNFQHIFYTDGSAITSPTKEGHLNAGMGIVYFINKDGNLQKQQEWSISLGNHTAQFAEIAAFEFALKKCLPLGGNILVVTDSNYVAKAYNEELDVWASNGFVNNRKKPLKHISKWKSVADLKRLRPDVVVTHEPGHQKLDSSPHAYGNNLADQLATQASFKVHAGKRTADGSEFEKRTADGSEFESPKKKAKVE

SEQ ID NO: 1099 - protein, 2087 aa, synthetic construct
  source 1..2087: note = Description of Artificial Sequence: Synthetic polypeptide
MPAAKRVKLDGGDKKYSIGLDIGTNSVGWAVITDEYKVPSKKFKVLGNTDRHSIKKNLIGALLFDSGETAEATRLKRTARRRYTRRKNRICYLQEIFSNEMAKVDDSFFHRLEESFLVEEDKKHERHPIFGNIVDEVAYHEKYPTIYHLRKKLVDSTDKADLRLIYLALAHMIKFRGHFLIEGDLNPDNSDVDKLFIQLVQTYNQLFEENPINASGVDAKAILSARLSKSRRLENLIAQLPGEKKNGLFGNLIALSLGLTPNFKSNFDLAEDAKLQLSKDTYDDDLDNLLAQIGDQYADLFLAAKNLSDAILLSDILRVNTEITKAPLSASMIKRYDEHHQDLTLLKALVRQQLPEKYKEIFFDQSKNGYAGYIDGGASQEEFYKFIKPILEKMDGTEELLVKLNREDLLRKQRTFDNGSIPHQIHLGELHAILRRQEDFYPFLKDNREKIEKILTFRIPYYVGPLARGNSRFAWMTRKSEETITPWNFEEVVDKGASAQSFIERMTNFDKNLPNEKVLPKHSLLYEYFTVYNELTKVKYVTEGMRKPAFLSGEQKKAIVDLLFKTNRKVTVKQLKEDYFKKIECFDSVEISGVEDRFNASLGTYHDLLKIIKDKDFLDNEENEDILEDIVLTLTLFEDREMIEERLKTYAHLFDDKVMKQLKRRRYTGWGRLSRKLINGIRDKQSGKTILDFLKSDGFANRNFMQLIHDDSLTFKEDIQKAQVSGQGDSLHEHIANLAGSPAIKKGILQTVKVVDELVKVMGRHKPENIVIEMARENQTTQKGQKNSRERMKRIEEGIKELGSQILKEHPVENTQLQNEKLYLYYLQNGRDMYVDQELDINRLSDYDVDHIVPQSFLKDDSIDNKVLTRSDKARGKSDNVPSEEVVKKMKNYWRQLLNAKLITQRKFDNLTKAERGGLSELDKAGFIKRQLVETRQITKHVAQILDSRMNTKYDENDKLIREVKVITLKSKLVSDFRKDFQFYKVREINNYHHAHDAYLNAVVGTALIKKYPKLESEFVYGDYKVYDVRKMIAKSEQEIGKATAKYFFYSNIMNFFKTEITLANGEIRKRPLIETNGETGEIVWDKGRDFATVRKVLSMPQVNIVKKTEVQTGGFSKESILPKRNSDKLIARKKDWDPKKYGGFDSPTVAYSVLVVAKVEKGKSKKLKSVKELLGITIMERSSFEKNPIDFLEAKGYKEVKKDLIIKLPKYSLFELENGRKRMLASAGELQKGNELALPSKYVNFLYLASHYEKLKGSPEDNEQKQLFVEQHKHYLDEIIEQISEFSKRVILADANLDKVLSAYNKHRDKPIREQAENIIHLFTLTNLGAPAAFKYFDTTIDRKRYTSTKEVLDATLIHQSITGLYETRIDLSQLGGDGGGGSPAPEAAAKGGVPWILKKPLELTIKLDLEEQQGTLLNNSILSKKGKEELKQLFEKYSALWQSWENQVGHRRIRPHKIATGTVKPTPQKQYHINPKAKPDIQIVINDLLKQGVLIQKESTMNTPVYPVPKPNGRWRMVLDYRAVNKVTPLIAVQNQHSYGILGSLFKGRYKTTIDLSNGFWAHPIVPEDYWITAFTWQGKQYCWTVLPQGFLNSPGLFNGDVVDLLQGIPNVEVYVDDVYISHDSEKEHLEYLDILFNRLKEAGYIISLKKSNIANSIVDFLGFQITNEGRGLTDTFKEKLENITAPTTLKQLQSILGLLNFARNFIPDFTELIAPLYALIPKSPKNYVPWQIEHSTTLETLITKLNGAEYLQGRKGDKTLIMKVNASYTTGYIRYYNEGEKKPISYVSIVFSKTELKFTELEKLLTTVHKGLLKALDLSMGQNIHVYSPIVSMQNIQKTPQTAKKALASRWLSWLSYLEDPRIRFFYDPQMPALKDLPAVDTGKDNKKHPSNFQHIFYTDGSAITSPTKEGHLNAGMGIVYFINKDGNLQKQQEWSISLGNHTAQFAEIAAFEFALKKCLPLGGNILVVTDSNYVAKAYNEELDVWASNGFVNNRKKPLKHISKWKSVADLKRLRPDVVVTHEPGHQKLDSSPHAYGNNLADQLATQASFKVHAGKRTADGSEFEKRTADGSEFESPKKKAKVE

SEQ ID NO: 1100 - protein, 2087 aa, synthetic construct
  source 1..2087: note = Description of Artificial Sequence: Synthetic polypeptide
MPAAKRVKLDGGDKKYSIGLDIGTNSVGWAVITDEYKVPSKKFKVLGNTDRHSIKKNLIGALLFDSGETAEATRLKRTARRRYTRRKNRICYLQEIFSNEMAKVDDSFFHRLEESFLVEEDKKHERHPIFGNIVDEVAYHEKYPTIYHLRKKLVDSTDKADLRLIYLALAHMIKFRGHFLIEGDLNPDNSDVDKLFIQLVQTYNQLFEENPINASGVDAKAILSARLSKSRRLENLIAQLPGEKKNGLFGNLIALSLGLTPNFKSNFDLAEDAKLQLSKDTYDDDLDNLLAQIGDQYADLFLAAKNLSDAILLSDILRVNTEITKAPLSASMIKRYDEHHQDLTLLKALVRQQLPEKYKEIFFDQSKNGYAGYIDGGASQEEFYKFIKPILEKMDGTEELLVKLNREDLLRKQRTFDNGSIPHQIHLGELHAILRRQEDFYPFLKDNREKIEKILTFRIPYYVGPLARGNSRFAWMTRKSEETITPWNFEEVVDKGASAQSFIERMTNFDKNLPNEKVLPKHSLLYEYFTVYNELTKVKYVTEGMRKPAFLSGEQKKAIVDLLFKTNRKVTVKQLKEDYFKKIECFDSVEISGVEDRFNASLGTYHDLLKIIKDKDFLDNEENEDILEDIVLTLTLFEDREMIEERLKTYAHLFDDKVMKQLKRRRYTGWGRLSRKLINGIRDKQSGKTILDFLKSDGFANRNFMQLIHDDSLTFKEDIQKAQVSGQGDSLHEHIANLAGSPAIKKGILQTVKVVDELVKVMGRHKPENIVIEMARENQTTQKGQKNSRERMKRIEEGIKELGSQILKEHPVENTQLQNEKLYLYYLQNGRDMYVDQELDINRLSDYDVDHIVPQSFLKDDSIDNKVLTRSDKARGKSDNVPSEEVVKKMKNYWRQLLNAKLITQRKFDNLTKAERGGLSELDKAGFIKRQLVETRQITKHVAQILDSRMNTKYDENDKLIREVKVITLKSKLVSDFRKDFQFYKVREINNYHHAHDAYLNAVVGTALIKKYPKLESEFVYGDYKVYDVRKMIAKSEQEIGKATAKYFFYSNIMNFFKTEITLANGEIRKRPLIETNGETGEIVWDKGRDFATVRKVLSMPQVNIVKKTEVQTGGFSKESILPKRNSDKLIARKKDWDPKKYGGFDSPTVAYSVLVVAKVEKGKSKKLKSVKELLGITIMERSSFEKNPIDFLEAKGYKEVKKDLIIKLPKYSLFELENGRKRMLASAGELQKGNELALPSKYVNFLYLASHYEKLKGSPEDNEQKQLFVEQHKHYLDEIIEQISEFSKRVILADANLDKVLSAYNKHRDKPIREQAENIIHLFTLTNLGAPAAFKYFDTTIDRKRYTSTKEVLDATLIHQSITGLYETRIDLSQLGGDGGGSSEAAAKGGGGGVPWILKKPLELTIKLDLEEQQGTLLNNSILSKKGKEELKQLFEKYSALWQSWENQVGHRRIRPHKIATGTVKPTPQKQYHINPKAKPDIQIVINDLLKQGVLIQKESTMNTPVYPVPKPNGRWRMVLDYRAVNKVTPLIAVQNQHSYGILGSLFKGRYKTTIDLSNGFWAHPIVPEDYWITAFTWQGKQYCWTVLPQGFLNSPGLFNGDVVDLLQGIPNVEVYVDDVYISHDSEKEHLEYLDILFNRLKEAGYIISLKKSNIANSIVDFLGFQITNEGRGLTDTFKEKLENITAPTTLKQLQSILGLLNFARNFIPDFTELIAPLYALIPKSPKNYVPWQIEHSTTLETLITKLNGAEYLQGRKGDKTLIMKVNASYTTGYIRYYNEGEKKPISYVSIVFSKTELKFTELEKLLTTVHKGLLKALDLSMGQNIHVYSPIVSMQNIQKTPQTAKKALASRWLSWLSYLEDPRIRFFYDPQMPALKDLPAVDTGKDNKKHPSNFQHIFYTDGSAITSPTKEGHLNAGMGIVYFINKDGNLQKQQEWSISLGNHTAQFAEIAAFEFALKKCLPLGGNILVVTDSNYVAKAYNEELDVWASNGFVNNRKKPLKHISKWKSVADLKRLRPDVVVTHEPGHQKLDSSPHAYGNNLADQLATQASFKVHAGKRTADGSEFEKRTADGSEFESPKKKAKVE

SEQ ID NO: 1101 - protein, 2091 aa, synthetic construct
  source 1..2091: note = Description of Artificial Sequence: Synthetic polypeptide
MPAAKRVKLDGGDKKYSIGLDIGTNSVGWAVITDEYKVPSKKFKVLGNTDRHSIKKNLIGALLFDSGETAEATRLKRTARRRYTRRKNRICYLQEIFSNEMAKVDDSFFHRLEESFLVEEDKKHERHPIFGNIVDEVAYHEKYPTIYHLRKKLVDSTDKADLRLIYLALAHMIKFRGHFLIEGDLNPDNSDVDKLFIQLVQTYNQLFEENPINASGVDAKAILSARLSKSRRLENLIAQLPGEKKNGLFGNLIALSLGLTPNFKSNFDLAEDAKLQLSKDTYDDDLDNLLAQIGDQYADLFLAAKNLSDAILLSDILRVNTEITKAPLSASMIKRYDEHHQDLTLLKALVRQQLPEKYKEIFFDQSKNGYAGYIDGGASQEEFYKFIKPILEKMDGTEELLVKLNREDLLRKQRTFDNGSIPHQIHLGELHAILRRQEDFYPFLKDNREKIEKILTFRIPYYVGPLARGNSRFAWMTRKSEETITPWNFEEVVDKGASAQSFIERMTNFDKNLPNEKVLPKHSLLYEYFTVYNELTKVKYVTEGMRKPAFLSGEQKKAIVDLLFKTNRKVTVKQLKEDYFKKIECFDSVEISGVEDRFNASLGTYHDLLKIIKDKDFLDNEENEDILEDIVLTLTLFEDREMIEERLKTYAHLFDDKVMKQLKRRRYTGWGRLSRKLINGIRDKQSGKTILDFLKSDGFANRNFMQLIHDDSLTFKEDIQKAQVSGQGDSLHEHIANLAGSPAIKKGILQTVKVVDELVKVMGRHKPENIVIEMARENQTTQKGQKNSRERMKRIEEGIKELGSQILKEHPVENTQLQNEKLYLYYLQNGRDMYVDQELDINRLSDYDVDHIVPQSFLKDDSIDNKVLTRSDKARGKSDNVPSEEVVKKMKNYWRQLLNAKLITQRKFDNLTKAERGGLSELDKAGFIKRQLVETRQITKHVAQILDSRMNTKYDENDKLIREVKVITLKSKLVSDFRKDFQFYKVREINNYHHAHDAYLNAVVGTALIKKYPKLESEFVYGDYKVYDVRKMIAKSEQEIGKATAKYFFYSNIMNFFKTEITLANGEIRKRPLIETNGETGEIVWDKGRDFATVRKVLSMPQVNIVKKTEVQTGGFSKESILPKRNSDKLIARKKDWDPKKYGGFDSPTVAYSVLVVAKVEKGKSKKLKSVKELLGITIMERSSFEKNPIDFLEAKGYKEVKKDLIIKLPKYSLFELENGRKRMLASAGELQKGNELALPSKYVNFLYLASHYEKLKGSPEDNEQKQLFVEQHKHYLDEIIEQISEFSKRVILADANLDKVLSAYNKHRDKPIREQAENIIHLFTLTNLGAPAAFKYFDTTIDRKRYTSTKEVLDATLIHQSITGLYETRIDLSQLGGDGGGSSGSSGSSGSSGSSGGVPWILKKPLELTIKLDLEEQQGTLLNNSILSKKGKEELKQLFEKYSALWQSWENQVGHRRIRPHKIATGTVKPTPQKQYHINPKAKPDIQIVINDLLKQGVLIQKESTMNTPVYPVPKPNGRWRMVLDYRAVNKVTPLIAVQNQHSYGILGSLFKGRYKTTIDLSNGFWAHPIVPEDYWITAFTWQGKQYCWTVLPQGFLNSPGLFNGDVVDLLQGIPNVEVYVDDVYISHDSEKEHLEYLDILFNRLKEAGYIISLKKSNIANSIVDFLGFQITNEGRGLTDTFKEKLENITAPTTLKQLQSILGLLNFARNFIPDFTELIAPLYALIPKSPKNYVPWQIEHSTTLETLITKLNGAEYLQGRKGDKTLIMKVNASYTTGYIRYYNEGEKKPISYVSIVFSKTELKFTELEKLLTTVHKGLLKALDLSMGQNIHVYSPIVSMQNIQKTPQTAKKALASRWLSWLSYLEDPRIRFFYDPQMPALKDLPAVDTGKDNKKHPSNFQHIFYTDGSAITSPTKEGHLNAGMGIVYFINKDGNLQKQQEWSISLGNHTAQFAEIAAFEFALKKCLPLGGNILVVTDSNYVAKAYNEELDVWASNGFVNNRKKPLKHISKWKSVADLKRLRPDVVVTHEPGHQKLDSSPHAYGNNLADQLATQASFKVHAGKRTADGSEFEKRTADGSEFESPKKKAKVE

SEQ ID NO: 1102 - protein, 2081 aa, synthetic construct
  source 1..2081: note = Description of Artificial Sequence: Synthetic polypeptide
MPAAKRVKLDGGDKKYSIGLDIGTNSVGWAVITDEYKVPSKKFKVLGNTDRHSIKKNLIGALLFDSGETAEATRLKRTARRRYTRRKNRICYLQEIFSNEMAKVDDSFFHRLEESFLVEEDKKHERHPIFGNIVDEVAYHEKYPTIYHLRKKLVDSTDKADLRLIYLALAHMIKFRGHFLIEGDLNPDNSDVDKLFIQLVQTYNQLFEENPINASGVDAKAILSARLSKSRRLENLIAQLPGEKKNGLFGNLIALSLGLTPNFKSNFDLAEDAKLQLSKDTYDDDLDNLLAQIGDQYADLFLAAKNLSDAILLSDILRVNTEITKAPLSASMIKRYDEHHQDLTLLKALVRQQLPEKYKEIFFDQSKNGYAGYIDGGASQEEFYKFIKPILEKMDGTEELLVKLNREDLLRKQRTFDNGSIPHQIHLGELHAILRRQEDFYPFLKDNREKIEKILTFRIPYYVGPLARGNSRFAWMTRKSEETITPWNFEEVVDKGASAQSFIERMTNFDKNLPNEKVLPKHSLLYEYFTVYNELTKVKYVTEGMRKPAFLSGEQKKAIVDLLFKTNRKVTVKQLKEDYFKKIECFDSVEISGVEDRFNASLGTYHDLLKIIKDKDFLDNEENEDILEDIVLTLTLFEDREMIEERLKTYAHLFDDKVMKQLKRRRYTGWGRLSRKLINGIRDKQSGKTILDFLKSDGFANRNFMQLIHDDSLTFKEDIQKAQVSGQGDSLHEHIANLAGSPAIKKGILQTVKVVDELVKVMGRHKPENIVIEMARENQTTQKGQKNSRERMKRIEEGIKELGSQILKEHPVENTQLQNEKLYLYYLQNGRDMYVDQELDINRLSDYDVDHIVPQSFLKDDSIDNKVLTRSDKARGKSDNVPSEEVVKKMKNYWRQLLNAKLITQRKFDNLTKAERGGLSELDKAGFIKRQLVETRQITKHVAQILDSRMNTKYDENDKLIREVKVITLKSKLVSDFRKDFQFYKVREINNYHHAHDAYLNAVVGTALIKKYPKLESEFVYGDYKVYDVRKMIAKSEQEIGKATAKYFFYSNIMNFFKTEITLANGEIRKRPLIETNGETGEIVWDKGRDFATVRKVLSMPQVNIVKKTEVQTGGFSKESILPKRNSDKLIARKKDWDPKKYGGFDSPTVAYSVLVVAKVEKGKSKKLKSVKELLGITIMERSSFEKNPIDFLEAKGYKEVKKDLIIKLPKYSLFELENGRKRMLASAGELQKGNELALPSKYVNFLYLASHYEKLKGSPEDNEQKQLFVEQHKHYLDEIIEQISEFSKRVILADANLDKVLSAYNKHRDKPIREQAENIIHLFTLTNLGAPAAFKYFDTTIDRKRYTSTKEVLDATLIHQSITGLYETRIDLSQLGGDGGPAPAPGGVPWILKKPLELTIKLDLEEQQGTLLNNSILSKKGKEELKQLFEKYSALWQSWENQVGHRRIRPHKIATGTVKPTPQKQYHINPKAKPDIQIVINDLLKQGVLIQKESTMNTPVYPVPKPNGRWRMVLDYRAVNKVTPLIAVQNQHSYGILGSLFKGRYKTTIDLSNGFWAHPIVPEDYWITAFTWQGKQYCWTVLPQGFLNSPGLFNGDVVDLLQGIPNVEVYVDDVYISHDSEKEHLEYLDILFNRLKEAGYIISLKKSNIANSIVDFLGFQITNEGRGLTDTFKEKLENITAPTTLKQLQSILGLLNFARNFIPDFTELIAPLYALIPKSPKNYVPWQIEHSTTLETLITKLNGAEYLQGRKGDKTLIMKVNASYTTGYIRYYNEGEKKPISYVSIVFSKTELKFTELEKLLTTVHKGLLKALDLSMGQNIHVYSPIVSMQNIQKTPQTAKKALASRWLSWLSYLEDPRIRFFYDPQMPALKDLPAVDTGKDNKKHPSNFQHIFYTDGSAITSPTKEGHLNAGMGIVYFINKDGNLQKQQEWSISLGNHTAQFAEIAAFEFALKKCLPLGGNILVVTDSNYVAKAYNEELDVWASNGFVNNRKKPLKHISKWKSVADLKRLRPDVVVTHEPGHQKLDSSPHAYGNNLADQLATQASFKVHAGKRTADGSEFEKRTADGSEFESPKKKAKVE

SEQ ID NO: 1103 - protein, 2085 aa, synthetic construct
  source 1..2085: note = Description of Artificial Sequence: Synthetic polypeptide
MPAAKRVKLDGGDKKYSIGLDIGTNSVGWAVITDEYKVPSKKFKVLGNTDRHSIKKNLIGALLFDSGETAEATRLKRTARRRYTRRKNRICYLQEIFSNEMAKVDDSFFHRLEESFLVEEDKKHERHPIFGNIVDEVAYHEKYPTIYHLRKKLVDSTDKADLRLIYLALAHMIKFRGHFLIEGDLNPDNSDVDKLFIQLVQTYNQLFEENPINASGVDAKAILSARLSKSRRLENLIAQLPGEKKNGLFGNLIALSLGLTPNFKSNFDLAEDAKLQLSKDTYDDDLDNLLAQIGDQYADLFLAAKNLSDAILLSDILRVNTEITKAPLSASMIKRYDEHHQDLTLLKALVRQQLPEKYKEIFFDQSKNGYAGYIDGGASQEEFYKFIKPILEKMDGTEELLVKLNREDLLRKQRTFDNGSIPHQIHLGELHAILRRQEDFYPFLKDNREKIEKILTFRIPYYVGPLARGNSRFAWMTRKSEETITPWNFEEVVDKGASAQSFIERMTNFDKNLPNEKVLPKHSLLYEYFTVYNELTKVKYVTEGMRKPAFLSGEQKKAIVDLLFKTNRKVTVKQLKEDYFKKIECFDSVEISGVEDRFNASLGTYHDLLKIIKDKDFLDNEENEDILEDIVLTLTLFEDREMIEERLKTYAHLFDDKVMKQLKRRRYTGWGRLSRKLINGIRDKQSGKTILDFLKSDGFANRNFMQLIHDDSLTFKEDIQKAQVSGQGDSLHEHIANLAGSPAIKKGILQTVKVVDELVKVMGRHKPENIVIEMARENQTTQKGQKNSRERMKRIEEGIKELGSQILKEHPVENTQLQNEKLYLYYLQNGRDMYVDQELDINRLSDYDVDHIVPQSFLKDDSIDNKVLTRSDKARGKSDNVPSEEVVKKMKNYWRQLLNAKLITQRKFDNLTKAERGGLSELDKAGFIKRQLVETRQITKHVAQILDSRMNTKYDENDKLIREVKVITLKSKLVSDFRKDFQFYKVREINNYHHAHDAYLNAVVGTALIKKYPKLESEFVYGDYKVYDVRKMIAKSEQEIGKATAKYFFYSNIMNFFKTEITLANGEIRKRPLIETNGETGEIVWDKGRDFATVRKVLSMPQVNIVKKTEVQTGGFSKESILPKRNSDKLIARKKDWDPKKYGGFDSPTVAYSVLVVAKVEKGKSKKLKSVKELLGITIMERSSFEKNPIDFLEAKGYKEVKKDLIIKLPKYSLFELENGRKRMLASAGELQKGNELALPSKYVNFLYLASHYEKLKGSPEDNEQKQLFVEQHKHYLDEIIEQISEFSKRVILADANLDKVLSAYNKHRDKPIREQAENIIHLFTLTNLGAPAAFKYFDTTIDRKRYTSTKEVLDATLIHQSITGLYETRIDLSQLGGDGGGSSGSSGSSGGVPWILKKPLELTIKLDLEEQQGTLLNNSILSKKGKEELKQLFEKYSALWQSWENQVGHRRIRPHKIATGTVKPTPQKQYHINPKAKPDIQIVINDLLKQGVLIQKESTMNTPVYPVPKPNGRWRMVLDYRAVNKVTPLIAVQNQHSYGILGSLFKGRYKTTIDLSNGFWAHPIVPEDYWITAFTWQGKQYCWTVLPQGFLNSPGLFNGDVVDLLQGIPNVEVYVDDVYISHDSEKEHLEYLDILFNRLKEAGYIISLKKSNIANSIVDFLGFQITNEGRGLTDTFKEKLENITAPTTLKQLQSILGLLNFARNFIPDFTELIAPLYALIPKSPKNYVPWQIEHSTTLETLITKLNGAEYLQGRKGDKTLIMKVNASYTTGYIRYYNEGEKKPISYVSIVFSKTELKFTELEKLLTTVHKGLLKALDLSMGQNIHVYSPIVSMQNIQKTPQTAKKALASRWLSWLSYLEDPRIRFFYDPQMPALKDLPAVDTGKDNKKHPSNFQHIFYTDGSAITSPTKEGHLNAGMGIVYFINKDGNLQKQQEWSISLGNHTAQFAEIAAFEFALKKCLPLGGNILVVTDSNYVAKAYNEELDVWASNGFVNNRKKPLKHISKWKSVADLKRLRPDVVVTHEPGHQKLDSSPHAYGNNLADQLATQASFKVHAGKRTADGSEFEKRTADGSEFESPKKKAKVE

SEQ ID NO: 1104 - protein, 2087 aa, synthetic construct
  source 1..2087: note = Description of Artificial Sequence: Synthetic polypeptide
MPAAKRVKLDGGDKKYSIGLDIGTNSVGWAVITDEYKVPSKKFKVLGNTDRHSIKKNLIGALLFDSGETAEATRLKRTARRRYTRRKNRICYLQEIFSNEMAKVDDSFFHRLEESFLVEEDKKHERHPIFGNIVDEVAYHEKYPTIYHLRKKLVDSTDKADLRLIYLALAHMIKFRGHFLIEGDLNPDNSDVDKLFIQLVQTYNQLFEENPINASGVDAKAILSARLSKSRRLENLIAQLPGEKKNGLFGNLIALSLGLTPNFKSNFDLAEDAKLQLSKDTYDDDLDNLLAQIGDQYADLFLAAKNLSDAILLSDILRVNTEITKAPLSASMIKRYDEHHQDLTLLKALVRQQLPEKYKEIFFDQSKNGYAGYIDGGASQEEFYKFIKPILEKMDGTEELLVKLNREDLLRKQRTFDNGSIPHQIHLGELHAILRRQEDFYPFLKDNREKIEKILTFRIPYYVGPLARGNSRFAWMTRKSEETITPWNFEEVVDKGASAQSFIERMTNFDKNLPNEKVLPKHSLLYEYFTVYNELTKVKYVTEGMRKPAFLSGEQKKAIVDLLFKTNRKVTVKQLKEDYFKKIECFDSVEISGVEDRFNASLGTYHDLLKIIKDKDFLDNEENEDILEDIVLTLTLFEDREMIEERLKTYAHLFDDKVMKQLKRRRYTGWGRLSRKLINGIRDKQSGKTILDFLKSDGFANRNFMQLIHDDSLTFKEDIQKAQVSGQGDSLHEHIANLAGSPAIKKGILQTVKVVDELVKVMGRHKPENIVIEMARENQTTQKGQKNSRERMKRIEEGIKELGSQILKEHPVENTQLQNEKLYLYYLQNGRDMYVDQELDINRLSDYDVDHIVPQSFLKDDSIDNKVLTRSDKARGKSDNVPSEEVVKKMKNYWRQLLNAKLITQRKFDNLTKAERGGLSELDKAGFIKRQLVETRQITKHVAQILDSRMNTKYDENDKLIREVKVITLKSKLVSDFRKDFQFYKVREINNYHHAHDAYLNAVVGTALIKKYPKLESEFVYGDYKVYDVRKMIAKSEQEIGKATAKYFFYSNIMNFFKTEITLANGEIRKRPLIETNGETGEIVWDKGRDFATVRKVLSMPQVNIVKKTEVQTGGFSKESILPKRNSDKLIARKKDWDPKKYGGFDSPTVAYSVLVVAKVEKGKSKKLKSVKELLGITIMERSSFEKNPIDFLEAKGYKEVKKDLIIKLPKYSLFELENGRKRMLASAGELQKGNELALPSKYVNFLYLASHYEKLKGSPEDNEQKQLFVEQHKHYLDEIIEQISEFSKRVILADANLDKVLSAYNKHRDKPIREQAENIIHLFTLTNLGAPAAFKYFDTTIDRKRYTSTKEVLDATLIHQSITGLYETRIDLSQLGGDGGPAPGSSEAAAKGGVPWILKKPLELTIKLDLEEQQGTLLNNSILSKKGKEELKQLFEKYSALWQSWENQVGHRRIRPHKIATGTVKPTPQKQYHINPKAKPDIQIVINDLLKQGVLIQKESTMNTPVYPVPKPNGRWRMVLDYRAVNKVTPLIAVQNQHSYGILGSLFKGRYKTTIDLSNGFWAHPIVPEDYWITAFTWQGKQYCWTVLPQGFLNSPGLFNGDVVDLLQGIPNVEVYVDDVYISHDSEKEHLEYLDILFNRLKEAGYIISLKKSNIANSIVDFLGFQITNEGRGLTDTFKEKLENITAPTTLKQLQSILGLLNFARNFIPDFTELIAPLYALIPKSPKNYVPWQIEHSTTLETLITKLNGAEYLQGRKGDKTLIMKVNASYTTGYIRYYNEGEKKPISYVSIVFSKTELKFTELEKLLTTVHKGLLKALDLSMGQNIHVYSPIVSMQNIQKTPQTAKKALASRWLSWLSYLEDPRIRFFYDPQMPALKDLPAVDTGKDNKKHPSNFQHIFYTDGSAITSPTKEGHLNAGMGIVYFINKDGNLQKQQEWSISLGNHTAQFAEIAAFEFALKKCLPLGGNILVVTDSNYVAKAYNEELDVWASNGFVNNRKKPLKHISKWKSVADLKRLRPDVVVTHEPGHQKLDSSPHAYGNNLADQLATQASFKVHAGKRTADGSEFEKRTADGSEFESPKKKAKVE

SEQ ID NO: 1105 - protein, 2087 aa, synthetic construct
  source 1..2087: note = Description of Artificial Sequence: Synthetic polypeptide
MPAAKRVKLDGGDKKYSIGLDIGTNSVGWAVITDEYKVPSKKFKVLGNTDRHSIKKNLIGALLFDSGETAEATRLKRTARRRYTRRKNRICYLQEIFSNEMAKVDDSFFHRLEESFLVEEDKKHERHPIFGNIVDEVAYHEKYPTIYHLRKKLVDSTDKADLRLIYLALAHMIKFRGHFLIEGDLNPDNSDVDKLFIQLVQTYNQLFEENPINASGVDAKAILSARLSKSRRLENLIAQLPGEKKNGLFGNLIALSLGLTPNFKSNFDLAEDAKLQLSKDTYDDDLDNLLAQIGDQYADLFLAAKNLSDAILLSDILRVNTEITKAPLSASMIKRYDEHHQDLTLLKALVRQQLPEKYKEIFFDQSKNGYAGYIDGGASQEEFYKFIKPILEKMDGTEELLVKLNREDLLRKQRTFDNGSIPHQIHLGELHAILRRQEDFYPFLKDNREKIEKILTFRIPYYVGPLARGNSRFAWMTRKSEETITPWNFEEVVDKGASAQSFIERMTNFDKNLPNEKVLPKHSLLYEYFTVYNELTKVKYVTEGMRKPAFLSGEQKKAIVDLLFKTNRKVTVKQLKEDYFKKIECFDSVEISGVEDRFNASLGTYHDLLKIIKDKDFLDNEENEDILEDIVLTLTLFEDREMIEERLKTYAHLFDDKVMKQLKRRRYTGWGRLSRKLINGIRDKQSGKTILDFLKSDGFANRNFMQLIHDDSLTFKEDIQKAQVSGQGDSLHEHIANLAGSPAIKKGILQTVKVVDELVKVMGRHKPENIVIEMARENQTTQKGQKNSRERMKRIEEGIKELGSQILKEHPVENTQLQNEKLYLYYLQNGRDMYVDQELDINRLSDYDVDHIVPQSFLKDDSIDNKVLTRSDKARGKSDNVPSEEVVKKMKNYWRQLLNAKLITQRKFDNLTKAERGGLSELDKAGFIKRQLVETRQITKHVAQILDSRMNTKYDENDKLIREVKVITLKSKLVSDFRKDFQFYKVREINNYHHAHDAYLNAVVGTALIKKYPKLESEFVYGDYKVYDVRKMIAKSEQEIGKATAKYFFYSNIMNFFKTEITLANGEIRKRPLIETNGETGEIVWDKGRDFATVRKVLSMPQVNIVKKTEVQTGGFSKESILPKRNSDKLIARKKDWDPKKYGGFDSPTVAYSVLVVAKVEKGKSKKLKSVKELLGITIMERSSFEKNPIDFLEAKGYKEVKKDLIIKLPKYSLFELENGRKRMLASAGELQKGNELALPSKYVNFLYLASHYEKLKGSPEDNEQKQLFVEQHKHYLDEIIEQISEFSKRVILADANLDKVLSAYNKHRDKPIREQAENIIHLFTLTNLGAPAAFKYFDTTIDRKRYTSTKEVLDATLIHQSITGLYETRIDLSQLGGDGGEAAAKPAPGGGGGVPWILKKPLELTIKLDLEEQQGTLLNNSILSKKGKEELKQLFEKYSALWQSWENQVGHRRIRPHKIATGTVKPTPQKQYHINPKAKPDIQIVINDLLKQGVLIQKESTMNTPVYPVPKPNGRWRMVLDYRAVNKVTPLIAVQNQHSYGILGSLFKGRYKTTIDLSNGFWAHPIVPEDYWITAFTWQGKQYCWTVLPQGFLNSPGLFNGDVVDLLQGIPNVEVYVDDVYISHDSEKEHLEYLDILFNRLKEAGYIISLKKSNIANSIVDFLGFQITNEGRGLTDTFKEKLENITAPTTLKQLQSILGLLNFARNFIPDFTELIAPLYALIPKSPKNYVPWQIEHSTTLETLITKLNGAEYLQGRKGDKTLIMKVNASYTTGYIRYYNEGEKKPISYVSIVFSKTELKFTELEKLLTTVHKGLLKALDLSMGQNIHVYSPIVSMQNIQKTPQTAKKALASRWLSWLSYLEDPRIRFFYDPQMPALKDLPAVDTGKDNKKHPSNFQHIFYTDGSAITSPTKEGHLNAGMGIVYFINKDGNLQKQQEWSISLGNHTAQFAEIAAFEFALKKCLPLGGNILVVTDSNYVAKAYNEELDVWASNGFVNNRKKPLKHISKWKSVADLKRLRPDVVVTHEPGHQKLDSSPHAYGNNLADQLATQASFKVHAGKRTADGSEFEKRTADGSEFESPKKKAKVE

SEQ ID NO: 1106 - protein, 2087 aa, synthetic construct
  source 1..2087: note = Description of Artificial Sequence: Synthetic polypeptide
MPAAKRVKLDGGDKKYSIGLDIGTNSVGWAVITDEYKVPSKKFKVLGNTDRHSIKKNLIGALLFDSGETAEATRLKRTARRRYTRRKNRICYLQEIFSNEMAKVDDSFFHRLEESFLVEEDKKHERHPIFGNIVDEVAYHEKYPTIYHLRKKLVDSTDKADLRLIYLALAHMIKFRGHFLIEGDLNPDNSDVDKLFIQLVQTYNQLFEENPINASGVDAKAILSARLSKSRRLENLIAQLPGEKKNGLFGNLIALSLGLTPNFKSNFDLAEDAKLQLSKDTYDDDLDNLLAQIGDQYADLFLAAKNLSDAILLSDILRVNTEITKAPLSASMIKRYDEHHQDLTLLKALVRQQLPEKYKEIFFDQSKNGYAGYIDGGASQEEFYKFIKPILEKMDGTEELLVKLNREDLLRKQRTFDNGSIPHQIHLGELHAILRRQEDFYPFLKDNREKIEKILTFRIPYYVGPLARGNSRFAWMTRKSEETITPWNFEEVVDKGASAQSFIERMTNFDKNLPNEKVLPKHSLLYEYFTVYNELTKVKYVTEGMRKPAFLSGEQKKAIVDLLFKTNRKVTVKQLKEDYFKKIECFDSVEISGVEDRFNASLGTYHDLLKIIKDKDFLDNEENEDILEDIVLTLTLFEDREMIEERLKTYAHLFDDKVMKQLKRRRYTGWGRLSRKLINGIRDKQSGKTILDFLKSDGFANRNFMQLIHDDSLTFKEDIQKAQVSGQGDSLHEHIANLAGSPAIKKGILQTVKVVDELVKVMGRHKPENIVIEMARENQTTQKGQKNSRERMKRIEEGIKELGSQILKEHPVENTQLQNEKLYLYYLQNGRDMYVDQELDINRLSDYDVDHIVPQSFLKDDSIDNKVLTRSDKARGKSDNVPSEEVVKKMKNYWRQLLNAKLITQRKFDNLTKAERGGLSELDKAGFIKRQLVETRQITKHVAQILDSRMNTKYDENDKLIREVKVITLKSKLVSDFRKDFQFYKVREINNYHHAHDAYLNAVVGTALIKKYPKLESEFVYGDYKVYDVRKMIAKSEQEIGKATAKYFFYSNIMNFFKTEITLANGEIRKRPLIETNGETGEIVWDKGRDFATVRKVLSMPQVNIVKKTEVQTGGFSKESILPKRNSDKLIARKKDWDPKKYGGFDSPTVAYSVLVVAKVEKGKSKKLKSVKELLGITIMERSSFEKNPIDFLEAKGYKEVKKDLIIKLPKYSLFELENGRKRMLASAGELQKGNELALPSKYVNFLYLASHYEKLKGSPEDNEQKQLFVEQHKHYLDEIIEQISEFSKRVILADANLDKVLSAYNKHRDKPIREQAENIIHLFTLTNLGAPAAFKYFDTTIDRKRYTSTKEVLDATLIHQSITGLYETRIDLSQLGGDGGGGSGGGEAAAKGGVPWILKKPLELTIKLDLEEQQGTLLNNSILSKKGKEELKQLFEKYSALWQSWENQVGHRRIRPHKIATGTVKPTPQKQYHINPKAKPDIQIVINDLLKQGVLIQKESTMNTPVYPVPKPNGRWRMVLDYRAVNKVTPLIAVQNQHSYGILGSLFKGRYKTTIDLSNGFWAHPIVPEDYWITAFTWQGKQYCWTVLPQGFLNSPGLFNGDVVDLLQGIPNVEVYVDDVYISHDSEKEHLEYLDILFNRLKEAGYIISLKKSNIANSIVDFLGFQITNEGRGLTDTFKEKLENITAPTTLKQLQSILGLLNFARNFIPDFTELIAPLYALIPKSPKNYVPWQIEHSTTLETLITKLNGAEYLQGRKGDKTLIMKVNASYTTGYIRYYNEGEKKPISYVSIVFSKTELKFTELEKLLTTVHKGLLKALDLSMGQNIHVYSPIVSMQNIQKTPQTAKKALASRWLSWLSYLEDPRIRFFYDPQMPALKDLPAVDTGKDNKKHPSNFQHIFYTDGSAITSPTKEGHLNAGMGIVYFINKDGNLQKQQEWSISLGNHTAQFAEIAAFEFALKKCLPLGGNILVVTDSNYVAKAYNEELDVWASNGFVNNRKKPLKHISKWKSVADLKRLRPDVVVTHEPGHQKLDSSPHAYGNNLADQLATQASFKVHAGKRTADGSEFEKRTADGSEFESPKKKAKVE

SEQ ID NO: 1107 - protein, 2082 aa, synthetic construct
  source 1..2082: note = Description of Artificial Sequence: Synthetic polypeptide
MPAAKRVKLDGGDKKYSIGLDIGTNSVGWAVITDEYKVPSKKFKVLGNTDRHSIKKNLIGALLFDSGETAEATRLKRTARRRYTRRKNRICYLQEIFSNEMAKVDDSFFHRLEESFLVEEDKKHERHPIFGNIVDEVAYHEKYPTIYHLRKKLVDSTDKADLRLIYLALAHMIKFRGHFLIEGDLNPDNSDVDKLFIQLVQTYNQLFEENPINASGVDAKAILSARLSKSRRLENLIAQLPGEKKNGLFGNLIALSLGLTPNFKSNFDLAEDAKLQLSKDTYDDDLDNLLAQIGDQYADLFLAAKNLSDAILLSDILRVNTEITKAPLSASMIKRYDEHHQDLTLLKALVRQQLPEKYKEIFFDQSKNGYAGYIDGGASQEEFYKFIKPILEKMDGTEELLVKLNREDLLRKQRTFDNGSIPHQIHLGELHAILRRQEDFYPFLKDNREKIEKILTFRIPYYVGPLARGNSRFAWMTRKSEETITPWNFEEVVDKGASAQSFIERMTNFDKNLPNEKVLPKHSLLYEYFTVYNELTKVKYVTEGMRKPAFLSGEQKKAIVDLLFKTNRKVTVKQLKEDYFKKIECFDSVEISGVEDRFNASLGTYHDLLKIIKDKDFLDNEENEDILEDIVLTLTLFEDREMIEERLKTYAHLFDDKVMKQLKRRRYTGWGRLSRKLINGIRDKQSGKTILDFLKSDGFANRNFMQLIHDDSLTFKEDIQKAQVSGQGDSLHEHIANLAGSPAIKKGILQTVKVVDELVKVMGRHKPENIVIEMARENQTTQKGQKNSRERMKRIEEGIKELGSQILKEHPVENTQLQNEKLYLYYLQNGRDMYVDQELDINRLSDYDVDHIVPQSFLKDDSIDNKVLTRSDKARGKSDNVPSEEVVKKMKNYWRQLLNAKLITQRKFDNLTKAERGGLSELDKAGFIKRQLVETRQITKHVAQILDSRMNTKYDENDKLIREVKVITLKSKLVSDFRKDFQFYKVREINNYHHAHDAYLNAVVGTALIKKYPKLESEFVYGDYKVYDVRKMIAKSEQEIGKATAKYFFYSNIMNFFKTEITLANGEIRKRPLIETNGETGEIVWDKGRDFATVRKVLSMPQVNIVKKTEVQTGGFSKESILPKRNSDKLIARKKDWDPKKYGGFDSPTVAYSVLVVAKVEKGKSKKLKSVKELLGITIMERSSFEKNPIDFLEAKGYKEVKKDLIIKLPKYSLFELENGRKRMLASAGELQKGNELALPSKYVNFLYLASHYEKLKGSPEDNEQKQLFVEQHKHYLDEIIEQISEFSKRVILADANLDKVLSAYNKHRDKPIREQAENIIHLFTLTNLGAPAAFKYFDTTIDRKRYTSTKEVLDATLIHQSITGLYETRIDLSQLGGDGGPAPGGSGGVPWILKKPLELTIKLDLEEQQGTLLNNSILSKKGKEELKQLFEKYSALWQSWENQVGHRRIRPHKIATGTVKPTPQKQYHINPKAKPDIQIVINDLLKQGVLIQKESTMNTPVYPVPKPNGRWRMVLDYRAVNKVTPLIAVQNQHSYGILGSLFKGRYKTTIDLSNGFWAHPIVPEDYWITAFTWQGKQYCWTVLPQGFLNSPGLFNGDVVDLLQGIPNVEVYVDDVYISHDSEKEHLEYLDILFNRLKEAGYIISLKKSNIANSIVDFLGFQITNEGRGLTDTFKEKLENITAPTTLKQLQSILGLLNFARNFIPDFTELIAPLYALIPKSPKNYVPWQIEHSTTLETLITKLNGAEYLQGRKGDKTLIMKVNASYTTGYIRYYNEGEKKPISYVSIVFSKTELKFTELEKLLTTVHKGLLKALDLSMGQNIHVYSPIVSMQNIQKTPQTAKKALASRWLSWLSYLEDPRIRFFYDPQMPALKDLPAVDTGKDNKKHPSNFQHIFYTDGSAITSPTKEGHLNAGMGIVYFINKDGNLQKQQEWSISLGNHTAQFAEIAAFEFALKKCLPLGGNILVVTDSNYVAKAYNEELDVWASNGFVNNRKKPLKHISKWKSVADLKRLRPDVVVTHEPGHQKLDSSPHAYGNNLADQLATQASFKVHAGKRTADGSEFEKRTADGSEFESPKKKAKVE

SEQ ID NO: 1108 - protein, 2084 aa, synthetic construct
  source 1..2084: note = Description of Artificial Sequence: Synthetic polypeptide
MPAAKRVKLDGGDKKYSIGLDIGTNSVGWAVITDEYKVPSKKFKVLGNTDRHSIKKNLIGALLFDSGETAEATRLKRTARRRYTRRKNRICYLQEIFSNEMAKVDDSFFHRLEESFLVEEDKKHERHPIFGNIVDEVAYHEKYPTIYHLRKKLVDSTDKADLRLIYLALAHMIKFRGHFLIEGDLNPDNSDVDKLFIQLVQTYNQLFEENPINASGVDAKAILSARLSKSRRLENLIAQLPGEKKNGLFGNLIALSLGLTPNFKSNFDLAEDAKLQLSKDTYDDDLDNLLAQIGDQYADLFLAAKNLSDAILLSDILRVNTEITKAPLSASMIKRYDEHHQDLTLLKALVRQQLPEKYKEIFFDQSKNGYAGYIDGGASQEEFYKFIKPILEKMDGTEELLVKLNREDLLRKQRTFDNGSIPHQIHLGELHAILRRQEDFYPFLKDNREKIEKILTFRIPYYVGPLARGNSRFAWMTRKSEETITPWNFEEVVDKGASAQSFIERMTNFDKNLPNEKVLPKHSLLYEYFTVYNELTKVKYVTEGMRKPAFLSGEQKKAIVDLLFKTNRKVTVKQLKEDYFKKIECFDSVEISGVEDRFNASLGTYHDLLKIIKDKDFLDNEENEDILEDIVLTLTLFEDREMIEERLKTYAHLFDDKVMKQLKRRRYTGWGRLSRKLINGIRDKQSGKTILDFLKSDGFANRNFMQLIHDDSLTFKEDIQKAQVSGQGDSLHEHIANLAGSPAIKKGILQTVKVVDELVKVMGRHKPENIVIEMARENQTTQKGQKNSRERMKRIEEGIKELGSQILKEHPVENTQLQNEKLYLYYLQNGRDMYVDQELDINRLSDYDVDHIVPQSFLKDDSIDNKVLTRSDKARGKSDNVPSEEVVKKMKNYWRQLLNAKLITQRKFDNLTKAERGGLSELDKAGFIKRQLVETRQITKHVAQILDSRMNTKYDENDKLIREVKVITLKSKLVSDFRKDFQFYKVREINNYHHAHDAYLNAVVGTALIKKYPKLESEFVYGDYKVYDVRKMIAKSEQEIGKATAKYFFYSNIMNFFKTEITLANGEIRKRPLIETNGETGEIVWDKGRDFATVRKVLSMPQVNIVKKTEVQTGGFSKESILPKRNSDKLIARKKDWDPKKYGGFDSPTVAYSVLVVAKVEKGKSKKLKSVKELLGITIMERSSFEKNPIDFLEAKGYKEVKKDLIIKLPKYSLFELENGRKRMLASAGELQKGNELALPSKYVNFLYLASHYEKLKGSPEDNEQKQLFVEQHKHYLDEIIEQISEFSKRVILADANLDKVLSAYNKHRDKPIREQAENIIHLFTLTNLGAPAAFKYFDTTIDRKRYTSTKEVLDATLIHQSITGLYETRIDLSQLGGDGGGGGEAAAKGGVPWILKKPLELTIKLDLEEQQGTLLNNSILSKKGKEELKQLFEKYSALWQSWENQVGHRRIRPHKIATGTVKPTPQKQYHINPKAKPDIQIVINDLLKQGVLIQKESTMNTPVYPVPKPNGRWRMVLDYRAVNKVTPLIAVQNQHSYGILGSLFKGRYKTTIDLSNGFWAHPIVPEDYWITAFTWQGKQYCWTVLPQGFLNSPGLFNGDVVDLLQGIPNVEVYVDDVYISHDSEKEHLEYLDILFNRLKEAGYIISLKKSNIANSIVDFLGFQITNEGRGLTDTFKEKLENITAPTTLKQLQSILGLLNFARNFIPDFTELIAPLYALIPKSPKNYVPWQIEHSTTLETLITKLNGAEYLQGRKGDKTLIMKVNASYTTGYIRYYNEGEKKPISYVSIVFSKTELKFTELEKLLTTVHKGLLKALDLSMGQNIHVYSPIVSMQNIQKTPQTAKKALASRWLSWLSYLEDPRIRFFYDPQMPALKDLPAVDTGKDNKKHPSNFQHIFYTDGSAITSPTKEGHLNAGMGIVYFINKDGNLQKQQEWSISLGNHTAQFAEIAAFEFALKKCLPLGGNILVVTDSNYVAKAYNEELDVWASNGFVNNRKKPLKHISKWKSVADLKRLRPDVVVTHEPGHQKLDSSPHAYGNNLADQLATQASFKVHAGKRTADGSEFEKRTADGSEFESPKKKAKVE

SEQ ID NO: 1109 - protein, 2085 aa, synthetic construct
  source 1..2085: note = Description of Artificial Sequence: Synthetic polypeptide
MPAAKRVKLDGGDKKYSIGLDIGTNSVGWAVITDEYKVPSKKFKVLGNTDRHSIKKNLIGALLFDSGETAEATRLKRTARRRYTRRKNRICYLQEIFSNEMAKVDDSFFHRLEESFLVEEDKKHERHPIFGNIVDEVAYHEKYPTIYHLRKKLVDSTDKADLRLIYLALAHMIKFRGHFLIEGDLNPDNSDVDKLFIQLVQTYNQLFEENPINASGVDAKAILSARLSKSRRLENLIAQLPGEKKNGLFGNLIALSLGLTPNFKSNFDLAEDAKLQLSKDTYDDDLDNLLAQIGDQYADLFLAAKNLSDAILLSDILRVNTEITKAPLSASMIKRYDEHHQDLTLLKALVRQQLPEKYKEIFFDQSKNGYAGYIDGGASQEEFYKFIKPILEKMDGTEELLVKLNREDLLRKQRTFDNGSIPHQIHLGELHAILRRQEDFYPFLKDNREKIEKILTFRIPYYVGPLARGNSRFAWMTRKSEETITPWNFEEVVDKGASAQSFIERMTNFDKNLPNEKVLPKHSLLYEYFTVYNELTKVKYVTEGMRKPAFLSGEQKKAIVDLLFKTNRKVTVKQLKEDYFKKIECFDSVEISGVEDRFNASLGTYHDLLKIIKDKDFLDNEENEDILEDIVLTLTLFEDREMIEERLKTYAHLFDDKVMKQLKRRRYTGWGRLSRKLINGIRDKQSGKTILDFLKSDGFANRNFMQLIHDDSLTFKEDIQKAQVSGQGDSLHEHIANLAGSPAIKKGILQTVKVVDELVKVMGRHKPENIVIEMARENQTTQKGQKNSRERMKRIEEGIKELGSQILKEHPVENTQLQNEKLYLYYLQNGRDMYVDQELDINRLSDYDVDHIVPQSFLKDDSIDNKVLTRSDKARGKSDNVPSEEVVKKMKNYWRQLLNAKLITQRKFDNLTKAERGGLSELDKAGFIKRQLVETRQITKHVAQILDSRMNTKYDENDKLIREVKVITLKSKLVSDFRKDFQFYKVREINNYHHAHDAYLNAVVGTALIKKYPKLESEFVYGDYKVYDVRKMIAKSEQEIGKATAKYFFYSNIMNFFKTEITLANGEIRKRPLIETNGETGEIVWDKGRDFATVRKVLSMPQVNIVKKTEVQTGGFSKESILPKRNSDKLIARKKDWDPKKYGGFDSPTVAYSVLVVAKVEKGKSKKLKSVKELLGITIMERSSFEKNPIDFLEAKGYKEVKKDLIIKLPKYSLFELENGRKRMLASAGELQKGNELALPSKYVNFLYLASHYEKLKGSPEDNEQKQLFVEQHKHYLDEIIEQISEFSKRVILADANLDKVLSAYNKHRDKPIREQAENIIHLFTLTNLGAPAAFKYFDTTIDRKRYTSTKEVLDATLIHQSITGLYETRIDLSQLGGDGGGGGGSSPAPGGVPWILKKPLELTIKLDLEEQQGTLLNNSILSKKGKEELKQLFEKYSALWQSWENQVGHRRIRPHKIATGTVKPTPQKQYHINPKAKPDIQIVINDLLKQGVLIQKESTMNTPVYPVPKPNGRWRMVLDYRAVNKVTPLIAVQNQHSYGILGSLFKGRYKTTIDLSNGFWAHPIVPEDYWITAFTWQGKQYCWTVLPQGFLNSPGLFNGDVVDLLQGIPNVEVYVDDVYISHDSEKEHLEYLDILFNRLKEAGYIISLKKSNIANSIVDFLGFQITNEGRGLTDTFKEKLENITAPTTLKQLQSILGLLNFARNFIPDFTELIAPLYALIPKSPKNYVPWQIEHSTTLETLITKLNGAEYLQGRKGDKTLIMKVNASYTTGYIRYYNEGEKKPISYVSIVFSKTELKFTELEKLLTTVHKGLLKALDLSMGQNIHVYSPIVSMQNIQKTPQTAKKALASRWLSWLSYLEDPRIRFFYDPQMPALKDLPAVDTGKDNKKHPSNFQHIFYTDGSAITSPTKEGHLNAGMGIVYFINKDGNLQKQQEWSISLGNHTAQFAEIAAFEFALKKCLPLGGNILVVTDSNYVAKAYNEELDVWASNGFVNNRKKPLKHISKWKSVADLKRLRPDVVVTHEPGHQKLDSSPHAYGNNLADQLATQASFKVHAGKRTADGSEFEKRTADGSEFESPKKKAKVE

SEQ ID NO: 1110 - protein, 2085 aa, synthetic construct
  source 1..2085: note = Description of Artificial Sequence: Synthetic polypeptide
MPAAKRVKLDGGDKKYSIGLDIGTNSVGWAVITDEYKVPSKKFKVLGNTDRHSIKKNLIGALLFDSGETAEATRLKRTARRRYTRRKNRICYLQEIFSNEMAKVDDSFFHRLEESFLVEEDKKHERHPIFGNIVDEVAYHEKYPTIYHLRKKLVDSTDKADLRLIYLALAHMIKFRGHFLIEGDLNPDNSDVDKLFIQLVQTYNQLFEENPINASGVDAKAILSARLSKSRRLENLIAQLPGEKKNGLFGNLIALSLGLTPNFKSNFDLAEDAKLQLSKDTYDDDLDNLLAQIGDQYADLFLAAKNLSDAILLSDILRVNTEITKAPLSASMIKRYDEHHQDLTLLKALVRQQLPEKYKEIFFDQSKNGYAGYIDGGASQEEFYKFIKPILEKMDGTEELLVKLNREDLLRKQRTFDNGSIPHQIHLGELHAILRRQEDFYPFLKDNREKIEKILTFRIPYYVGPLARGNSRFAWMTRKSEETITPWNFEEVVDKGASAQSFIERMTNFDKNLPNEKVLPKHSLLYEYFTVYNELTKVKYVTEGMRKPAFLSGEQKKAIVDLLFKTNRKVTVKQLKEDYFKKIECFDSVEISGVEDRFNASLGTYHDLLKIIKDKDFLDNEENEDILEDIVLTLTLFEDREMIEERLKTYAHLFDDKVMKQLKRRRYTGWGRLSRKLINGIRDKQSGKTILDFLKSDGFANRNFMQLIHDDSLTFKEDIQKAQVSGQGDSLHEHIANLAGSPAIKKGILQTVKVVDELVKVMGRHKPENIVIEMARENQTTQKGQKNSRERMKRIEEGIKELGSQILKEHPVENTQLQNEKLYLYYLQNGRDMYVDQELDINRLSDYDVDHIVPQSFLKDDSIDNKVLTRSDKARGKSDNVPSEEVVKKMKNYWRQLLNAKLITQRKFDNLTKAERGGLSELDKAGFIKRQLVETRQITKHVAQILDSRMNTKYDENDKLIREVKVITLKSKLVSDFRKDFQFYKVREINNYHHAHDAYLNAVVGTALIKKYPKLESEFVYGDYKVYDVRKMIAKSEQEIGKATAKYFFYSNIMNFFKTEITLANGEIRKRPLIETNGETGEIVWDKGRDFATVRKVLSMPQVNIVKKTEVQTGGFSKESILPKRNSDKLIARKKDWDPKKYGGFDSPTVAYSVLVVAKVEKGKSKKLKSVKELLGITIMERSSFEKNPIDFLEAKGYKEVKKDLIIKLPKYSLFELENGRKRMLASAGELQKGNELALPSKYVNFLYLASHYEKLKGSPEDNEQKQLFVEQHKHYLDEIIEQISEFSKRVILADANLDKVLSAYNKHRDKPIREQAENIIHLFTLTNLGAPAAFKYFDTTIDRKRYTSTKEVLDATLIHQSITGLYETRIDLSQLGGDGGPAPGGSGSSGGVPWILKKPLELTIKLDLEEQQGTLLNNSILSKKGKEELKQLFEKYSALWQSWENQVGHRRIRPHKIATGTVKPTPQKQYHINPKAKPDIQIVINDLLKQGVLIQKESTMNTPVYPVPKPNGRWRMVLDYRAVNKVTPLIAVQNQHSYGILGSLFKGRYKTTIDLSNGFWAHPIVPEDYWITAFTWQGKQYCWTVLPQGFLNSPGLFNGDVVDLLQGIPNVEVYVDDVYISHDSEKEHLEYLDILFNRLKEAGYIISLKKSNIANSIVDFLGFQITNEGRGLTDTFKEKLENITAPTTLKQLQSILGKLNFARNFIPDFTELIAPLYALIPKSPKNYVPWQIEHSTTLETLITKLNGAEYLQGRKGDKTLIMKVNASYTTGYIRYYNEGEKKPISYVSIVFSKTELKFTELEKLLTTVHKGLLKALDLSMGQNIHVYSPIVSMQNIQKTPQTAKKALASRWLSWLSYLEDPRIRFFYDPQMPALKDLPAVDTGKDNKKHPSNFQHIFYTDGSAITSPTKEGHLNAGMGIVYFINKDGNLQKQQEWSISLGNHTAQFAEIAAFEFALKKCLPLGGNILVVTDSNYVAKAYNEELDVWASNGFVNNRKKPLKHISKWKSVADLKRLRPDVVVTHEPGHQKLDSSPHAYGNNLADQLATQASFKVHAGKRTADGSEFEKRTADGSEFESPKKKAKVE

SEQ ID NO: 1111 - protein, 2087 aa, synthetic construct
  source 1..2087: note = Description of Artificial Sequence: Synthetic polypeptide
MPAAKRVKLDGGDKKYSIGLDIGTNSVGWAVITDEYKVPSKKFKVLGNTDRHSIKKNLIGALLFDSGETAEATRLKRTARRRYTRRKNRICYLQEIFSNEMAKVDDSFFHRLEESFLVEEDKKHERHPIFGNIVDEVAYHEKYPTIYHLRKKLVDSTDKADLRLIYLALAHMIKFRGHFLIEGDLNPDNSDVDKLFIQLVQTYNQLFEENPINASGVDAKAILSARLSKSRRLENLIAQLPGEKKNGLFGNLIALSLGLTPNFKSNFDLAEDAKLQLSKDTYDDDLDNLLAQIGDQYADLFLAAKNLSDAILLSDILRVNTEITKAPLSASMIKRYDEHHQDLTLLKALVRQQLPEKYKEIFFDQSKNGYAGYIDGGASQEEFYKFIKPILEKMDGTEELLVKLNREDLLRKQRTFDNGSIPHQIHLGELHAILRRQEDFYPFLKDNREKIEKILTFRIPYYVGPLARGNSRFAWMTRKSEETITPWNFEEVVDKGASAQSFIERMTNFDKNLPNEKVLPKHSLLYEYFTVYNELTKVKYVTEGMRKPAFLSGEQKKAIVDLLFKTNRKVTVKQLKEDYFKKIECFDSVEISGVEDRFNASLGTYHDLLKIIKDKDFLDNEENEDILEDIVLTLTLFEDREMIEERLKTYAHLFDDKVMKQLKRRRYTGWGRLSRKLINGIRDKQSGKTILDFLKSDGFANRNFMQLIHDDSLTFKEDIQKAQVSGQGDSLHEHIANLAGSPAIKKGILQTVKVVDELVKVMGRHKPENIVIEMARENQTTQKGQKNSRERMKRIEEGIKELGSQILKEHPVENTQLQNEKLYLYYLQNGRDMYVDQELDINRLSDYDVDHIVPQSFLKDDSIDNKVLTRSDKARGKSDNVPSEEVVKKMKNYWRQLLNAKLITQRKFDNLTKAERGGLSELDKAGFIKRQLVETRQITKHVAQILDSRMNTKYDENDKLIREVKVITLKSKLVSDFRKDFQFYKVREINNYHHAHDAYLNAVVGTALIKKYPKLESEFVYGDYKVYDVRKMIAKSEQEIGKATAKYFFYSNIMNFFKTEITLANGEIRKRPLIETNGETGEIVWDKGRDFATVRKVLSMPQVNIVKKTEVQTGGFSKESILPKRNSDKLIARKKDWDPKKYGGFDSPTVAYSVLVVAKVEKGKSKKLKSVKELLGITIMERSSFEKNPIDFLEAKGYKEVKKDLIIKLPKYSLFELENGRKRMLASAGELQKGNELALPSKYVNFLYLASHYEKLKGSPEDNEQKQLFVEQHKHYLDEIIEQISEFSKRVILADANLDKVLSAYNKHRDKPIREQAENIIHLFTLTNLGAPAAFKYFDTTIDRKRYTSTKEVLDATLIHQSITGLYETRIDLSQLGGDGGGSSEAAAKGGGGGVPWILKKPLELTIKLDLEEQQGTLLNNSILSKKGKEELKQLFEKYSALWQSWENQVGHRRIRPHKIATGTVKPTPQKQYHINPKAKPDIQIVINDLLKQGVLIQKESTMNTPVYPVPKPNGRWRMVLDYRAVNKVTPLIAVQNQHSYGILGSLFKGRYKTTIDLSNGFWAHPIVPEDYWITAFTWQGKQYCWTVLPQGFLNSPGLFNGDVVDLLQGIPNVEVYVDDVYISHDSEKEHLEYLDILFNRLKEAGYIISLKKSNIANSIVDFLGFQITNEGRGLTDTFKEKLENITAPTTLKQLQSILGKLNFARNFIPDFTELIAPLYALIPKSPKNYVPWQIEHSTTLETLITKLNGAEYLQGRKGDKTLIMKVNASYTTGYIRYYNEGEKKPISYVSIVFSKTELKFTELEKLLTTVHKGLLKALDLSMGQNIHVYSPIVSMQNIQKTPQTAKKALASRWLSWLSYLEDPRIRFFYDPQMPALKDLPAVDTGKDNKKHPSNFQHIFYTDGSAITSPTKEGHLNAGMGIVYFINKDGNLQKQQEWSISLGNHTAQFAEIAAFEFALKKCLPLGGNILVVTDSNYVAKAYNEELDVWASNGFVNNRKKPLKHISKWKSVADLKRLRPDVVVTHEPGHQKLDSSPHAYGNNLADQLATQASFKVHAGKRTADGSEFEKRTADGSEFESPKKKAKVE

SEQ ID NO: 1112 - protein, 2091 aa, synthetic construct
  source 1..2091: note = Description of Artificial Sequence: Synthetic polypeptide
MPAAKRVKLDGGDKKYSIGLDIGTNSVGWAVITDEYKVPSKKFKVLGNTDRHSIKKNLIGALLFDSGETAEATRLKRTARRRYTRRKNRICYLQEIFSNEMAKVDDSFFHRLEESFLVEEDKKHERHPIFGNIVDEVAYHEKYPTIYHLRKKLVDSTDKADLRLIYLALAHMIKFRGHFLIEGDLNPDNSDVDKLFIQLVQTYNQLFEENPINASGVDAKAILSARLSKSRRLENLIAQLPGEKKNGLFGNLIALSLGLTPNFKSNFDLAEDAKLQLSKDTYDDDLDNLLAQIGDQYADLFLAAKNLSDAILLSDILRVNTEITKAPLSASMIKRYDEHHQDLTLLKALVRQQLPEKYKEIFFDQSKNGYAGYIDGGASQEEFYKFIKPILEKMDGTEELLVKLNREDLLRKQRTFDNGSIPHQIHLGELHAILRRQEDFYPFLKDNREKIEKILTFRIPYYVGPLARGNSRFAWMTRKSEETITPWNFEEVVDKGASAQSFIERMTNFDKNLPNEKVLPKHSLLYEYFTVYNELTKVKYVTEGMRKPAFLSGEQKKAIVDLLFKTNRKVTVKQLKEDYFKKIECFDSVEISGVEDRFNASLGTYHDLLKIIKDKDFLDNEENEDILEDIVLTLTLFEDREMIEERLKTYAHLFDDKVMKQLKRRRYTGWGRLSRKLINGIRDKQSGKTILDFLKSDGFANRNFMQLIHDDSLTFKEDIQKAQVSGQGDSLHEHIANLAGSPAIKKGILQTVKVVDELVKVMGRHKPENIVIEMARENQTTQKGQKNSRERMKRIEEGIKELGSQILKEHPVENTQLQNEKLYLYYLQNGRDMYVDQELDINRLSDYDVDHIVPQSFLKDDSIDNKVLTRSDKARGKSDNVPSEEVVKKMKNYWRQLLNAKLITQRKFDNLTKAERGGLSELDKAGFIKRQLVETRQITKHVAQILDSRMNTKYDENDKLIREVKVITLKSKLVSDFRKDFQFYKVREINNYHHAHDAYLNAVVGTALIKKYPKLESEFVYGDYKVYDVRKMIAKSEQEIGKATAKYFFYSNIMNFFKTEITLANGEIRKRPLIETNGETGEIVWDKGRDFATVRKVLSMPQVNIVKKTEVQTGGFSKESILPKRNSDKLIARKKDWDPKKYGGFDSPTVAYSVLVVAKVEKGKSKKLKSVKELLGITIMERSSFEKNPIDFLEAKGYKEVKKDLIIKLPKYSLFELENGRKRMLASAGELQKGNELALPSKYVNFLYLASHYEKLKGSPEDNEQKQLFVEQHKHYLDEIIEQISEFSKRVILADANLDKVLSAYNKHRDKPIREQAENIIHLFTLTNLGAPAAFKYFDTTIDRKRYTSTKEVLDATLIHQSITGLYETRIDLSQLGGDGGGSSGSSGSSGSSGSSGGVPWILKKPLELTIKLDLEEQQGTLLNNSILSKKGKEELKQLFEKYSALWQSWENQVGHRRIRPHKIATGTVKPTPQKQYHINPKAKPDIQIVINDLLKQGVLIQKESTMNTPVYPVPKPNGRWRMVLDYRAVNKVTPLIAVQNQHSYGILGSLFKGRYKTTIDLSNGFWAHPIVPEDYWITAFTWQGKQYCWTVLPQGFLNSPGLFNGDVVDLLQGIPNVEVYVDDVYISHDSEKEHLEYLDILFNRLKEAGYIISLKKSNIANSIVDFLGFQITNEGRGLTDTFKEKLENITAPTTLKQLQSILGKLNFARNFIPDFTELIAPLYALIPKSPKNYVPWQIEHSTTLETLITKLNGAEYLQGRKGDKTLIMKVNASYTTGYIRYYNEGEKKPISYVSIVFSKTELKFTELEKLLTTVHKGLLKALDLSMGQNIHVYSPIVSMQNIQKTPQTAKKALASRWLSWLSYLEDPRIRFFYDPQMPALKDLPAVDTGKDNKKHPSNFQHIFYTDGSAITSPTKEGHLNAGMGIVYFINKDGNLQKQQEWSISLGNHTAQFAEIAAFEFALKKCLPLGGNILVVTDSNYVAKAYNEELDVWASNGFVNNRKKPLKHISKWKSVADLKRLRPDVVVTHEPGHQKLDSSPHAYGNNLADQLATQASFKVHAGKRTADGSEFEKRTADGSEFESPKKKAKVE

SEQ ID NO: 1113 - protein, 2087 aa, synthetic construct
  source 1..2087: note = Description of Artificial Sequence: Synthetic polypeptide
MPAAKRVKLDGGDKKYSIGLDIGTNSVGWAVITDEYKVPSKKFKVLGNTDRHSIKKNLIGALLFDSGETAEATRLKRTARRRYTRRKNRICYLQEIFSNEMAKVDDSFFHRLEESFLVEEDKKHERHPIFGNIVDEVAYHEKYPTIYHLRKKLVDSTDKADLRLIYLALAHMIKFRGHFLIEGDLNPDNSDVDKLFIQLVQTYNQLFEENPINASGVDAKAILSARLSKSRRLENLIAQLPGEKKNGLFGNLIALSLGLTPNFKSNFDLAEDAKLQLSKDTYDDDLDNLLAQIGDQYADLFLAAKNLSDAILLSDILRVNTEITKAPLSASMIKRYDEHHQDLTLLKALVRQQLPEKYKEIFFDQSKNGYAGYIDGGASQEEFYKFIKPILEKMDGTEELLVKLNREDLLRKQRTFDNGSIPHQIHLGELHAILRRQEDFYPFLKDNREKIEKILTFRIPYYVGPLARGNSRFAWMTRKSEETITPWNFEEVVDKGASAQSFIERMTNFDKNLPNEKVLPKHSLLYEYFTVYNELTKVKYVTEGMRKPAFLSGEQKKAIVDLLFKTNRKVTVKQLKEDYFKKIECFDSVEISGVEDRFNASLGTYHDLLKIIKDKDFLDNEENEDILEDIVLTLTLFEDREMIEERLKTYAHLFDDKVMKQLKRRRYTGWGRLSRKLINGIRDKQSGKTILDFLKSDGFANRNFMQLIHDDSLTFKEDIQKAQVSGQGDSLHEHIANLAGSPAIKKGILQTVKVVDELVKVMGRHKPENIVIEMARENQTTQKGQKNSRERMKRIEEGIKELGSQILKEHPVENTQLQNEKLYLYYLQNGRDMYVDQELDINRLSDYDVDHIVPQSFLKDDSIDNKVLTRSDKARGKSDNVPSEEVVKKMKNYWRQLLNAKLITQRKFDNLTKAERGGLSELDKAGFIKRQLVETRQITKHVAQILDSRMNTKYDENDKLIREVKVITLKSKLVSDFRKDFQFYKVREINNYHHAHDAYLNAVVGTALIKKYPKLESEFVYGDYKVYDVRKMIAKSEQEIGKATAKYFFYSNIMNFFKTEITLANGEIRKRPLIETNGETGEIVWDKGRDFATVRKVLSMPQVNIVKKTEVQTGGFSKESILPKRNSDKLIARKKDWDPKKYGGFDSPTVAYSVLVVAKVEKGKSKKLKSVKELLGITIMERSSFEKNPIDFLEAKGYKEVKKDLIIKLPKYSLFELENGRKRMLASAGELQKGNELALPSKYVNFLYLASHYEKLKGSPEDNEQKQLFVEQHKHYLDEIIEQISEFSKRVILADANLDKVLSAYNKHRDKPIREQAENIIHLFTLTNLGAPAAFKYFDTTIDRKRYTSTKEVLDATLIHQSITGLYETRIDLSQLGGDGGGGSEAAAKGGGGGVPWILKKPLELTIKLDLEEQQGTLLNNSILSKKGKEELKQLFEKYSALWQSWENQVGHRRIRPHKIATGTVKPTPQKQYHINPKAKPDIQIVINDLLKQGVLIQKESTMNTPVYPVPKPNGRWRMVLDYRAVNKVTPLIAVQNQHSYGILGSLFKGRYKTTIDLSNGFWAHPIVPEDYWITAFTWQGKQYCWTVLPQGFLNSPGLFNGDVVDLLQGIPNVEVYVDDVYISHDSEKEHLEYLDILFNRLKEAGYIISLKKSNIANSIVDFLGFQITNEGRGLTDTFKEKLENITAPTTLKQLQSILGKLNFARNFIPDFTELIAPLYALIPKSPKNYVPWQIEHSTTLETLITKLNGAEYLQGRKGDKTLIMKVNASYTTGYIRYYNEGEKKPISYVSIVFSKTELKFTELEKLLTTVHKGLLKALDLSMGQNIHVYSPIVSMQNIQKTPQTAKKALASRWLSWLSYLEDPRIRFFYDPQMPALKDLPAVDTGKDNKKHPSNFQHIFYTDGSAITSPTKEGHLNAGMGIVYFINKDGNLQKQQEWSISLGNHTAQFAEIAAFEFALKKCLPLGGNILVVTDSNYVAKAYNEELDVWASNGFVNNRKKPLKHISKWKSVADLKRLRPDVVVTHEPGHQKLDSSPHAYGNNLADQLATQASFKVHAGKRTADGSEFEKRTADGSEFESPKKKAKVE

SEQ ID NO: 1114 - protein, 2087 aa, synthetic construct
  source 1..2087: note = Description of Artificial Sequence: Synthetic polypeptide
MPAAKRVKLDGGDKKYSIGLDIGTNSVGWAVITDEYKVPSKKFKVLGNTDRHSIKKNLIGALLFDSGETAEATRLKRTARRRYTRRKNRICYLQEIFSNEMAKVDDSFFHRLEESFLVEEDKKHERHPIFGNIVDEVAYHEKYPTIYHLRKKLVDSTDKADLRLIYLALAHMIKFRGHFLIEGDLNPDNSDVDKLFIQLVQTYNQLFEENPINASGVDAKAILSARLSKSRRLENLIAQLPGEKKNGLFGNLIALSLGLTPNFKSNFDLAEDAKLQLSKDTYDDDLDNLLAQIGDQYADLFLAAKNLSDAILLSDILRVNTEITKAPLSASMIKRYDEHHQDLTLLKALVRQQLPEKYKEIFFDQSKNGYAGYIDGGASQEEFYKFIKPILEKMDGTEELLVKLNREDLLRKQRTFDNGSIPHQIHLGELHAILRRQEDFYPFLKDNREKIEKILTFRIPYYVGPLARGNSRFAWMTRKSEETITPWNFEEVVDKGASAQSFIERMTNFDKNLPNEKVLPKHSLLYEYFTVYNELTKVKYVTEGMRKPAFLSGEQKKAIVDLLFKTNRKVTVKQLKEDYFKKIECFDSVEISGVEDRFNASLGTYHDLLKIIKDKDFLDNEENEDILEDIVLTLTLFEDREMIEERLKTYAHLFDDKVMKQLKRRRYTGWGRLSRKLINGIRDKQSGKTILDFLKSDGFANRNFMQLIHDDSLTFKEDIQKAQVSGQGDSLHEHIANLAGSPAIKKGILQTVKVVDELVKVMGRHKPENIVIEMARENQTTQKGQKNSRERMKRIEEGIKELGSQILKEHPVENTQLQNEKLYLYYLQNGRDMYVDQELDINRLSDYDVDHIVPQSFLKDDSIDNKVLTRSDKARGKSDNVPSEEVVKKMKNYWRQLLNAKLITQRKFDNLTKAERGGLSELDKAGFIKRQLVETRQITKHVAQILDSRMNTKYDENDKLIREVKVITLKSKLVSDFRKDFQFYKVREINNYHHAHDAYLNAVVGTALIKKYPKLESEFVYGDYKVYDVRKMIAKSEQEIGKATAKYFFYSNIMNFFKTEITLANGEIRKRPLIETNGETGEIVWDKGRDFATVRKVLSMPQVNIVKKTEVQTGGFSKESILPKRNSDKLIARKKDWDPKKYGGFDSPTVAYSVLVVAKVEKGKSKKLKSVKELLGITIMERSSFEKNPIDFLEAKGYKEVKKDLIIKLPKYSLFELENGRKRMLASAGELQKGNELALPSKYVNFLYLASHYEKLKGSPEDNEQKQLFVEQHKHYLDEIIEQISEFSKRVILADANLDKVLSAYNKHRDKPIREQAENIIHLFTLTNLGAPAAFKYFDTTIDRKRYTSTKEVLDATLIHQSITGLYETRIDLSQLGGDGGGGGEAAAKGGSGGVPWILKKPLELTIKLDLEEQQGTLLNNSILSKKGKEELKQLFEKYSALWQSWENQVGHRRIRPHKIATGTVKPTPQKQYHINPKAKPDIQIVINDLLKQGVLIQKESTMNTPVYPVPKPNGRWRMVLDYRAVNKVTPLIAVQNQHSYGILGSLFKGRYKTTIDLSNGFWAHPIVPEDYWITAFTWQGKQYCWTVLPQGFLNSPGLFNGDVVDLLQGIPNVEVYVDDVYISHDSEKEHLEYLDILFNRLKEAGYIISLKKSNIANSIVDFLGFQITNEGRGLTDTFKEKLENITAPTTLKQLQSILGKLNFARNFIPDFTELIAPLYALIPKSPKNYVPWQIEHSTTLETLITKLNGAEYLQGRKGDKTLIMKVNASYTTGYIRYYNEGEKKPISYVSIVFSKTELKFTELEKLLTTVHKGLLKALDLSMGQNIHVYSPIVSMQNIQKTPQTAKKALASRWLSWLSYLEDPRIRFFYDPQMPALKDLPAVDTGKDNKKHPSNFQHIFYTDGSAITSPTKEGHLNAGMGIVYFINKDGNLQKQQEWSISLGNHTAQFAEIAAFEFALKKCLPLGGNILVVTDSNYVAKAYNEELDVWASNGFVNNRKKPLKHISKWKSVADLKRLRPDVVVTHEPGHQKLDSSPHAYGNNLADQLATQASFKVHAGKRTADGSEFEKRTADGSEFESPKKKAKVE

SEQ ID NO: 1115 - protein, 2208 aa, synthetic construct
  source 1..2208: note = Description of Artificial Sequence: Synthetic polypeptide
MPAAKRVKLDGGDKKYSIGLDIGTNSVGWAVITDEYKVPSKKFKVLGNTDRHSIKKNLIGALLFDSGETAEATRLKRTARRRYTRRKNRICYLQEIFSNEMAKVDDSFFHRLEESFLVEEDKKHERHPIFGNIVDEVAYHEKYPTIYHLRKKLVDSTDKADLRLIYLALAHMIKFRGHFLIEGDLNPDNSDVDKLFIQLVQTYNQLFEENPINASGVDAKAILSARLSKSRRLENLIAQLPGEKKNGLFGNLIALSLGLTPNFKSNFDLAEDAKLQLSKDTYDDDLDNLLAQIGDQYADLFLAAKNLSDAILLSDILRVNTEITKAPLSASMIKRYDEHHQDLTLLKALVRQQLPEKYKEIFFDQSKNGYAGYIDGGASQEEFYKFIKPILEKMDGTEELLVKLNREDLLRKQRTFDNGSIPHQIHLGELHAILRRQEDFYPFLKDNREKIEKILTFRIPYYVGPLARGNSRFAWMTRKSEETITPWNFEEVVDKGASAQSFIERMTNFDKNLPNEKVLPKHSLLYEYFTVYNELTKVKYVTEGMRKPAFLSGEQKKAIVDLLFKTNRKVTVKQLKEDYFKKIECFDSVEISGVEDRFNASLGTYHDLLKIIKDKDFLDNEENEDILEDIVLTLTLFEDREMIEERLKTYAHLFDDKVMKQLKRRRYTGWGRLSRKLINGIRDKQSGKTILDFLKSDGFANRNFMQLIHDDSLTFKEDIQKAQVSGQGDSLHEHIANLAGSPAIKKGILQTVKVVDELVKVMGRHKPENIVIEMARENQTTQKGQKNSRERMKRIEEGIKELGSQILKEHPVENTQLQNEKLYLYYLQNGRDMYVDQELDINRLSDYDVDHIVPQSFLKDDSIDNKVLTRSDKARGKSDNVPSEEVVKKMKNYWRQLLNAKLITQRKFDNLTKAERGGLSELDKAGFIKRQLVETRQITKHVAQILDSRMNTKYDENDKLIREVKVITLKSKLVSDFRKDFQFYKVREINNYHHAHDAYLNAVVGTALIKKYPKLESEFVYGDYKVYDVRKMIAKSEQEIGKATAKYFFYSNIMNFFKTEITLANGEIRKRPLIETNGETGEIVWDKGRDFATVRKVLSMPQVNIVKKTEVQTGGFSKESILPKRNSDKLIARKKDWDPKKYGGFDSPTVAYSVLVVAKVEKGKSKKLKSVKELLGITIMERSSFEKNPIDFLEAKGYKEVKKDLIIKLPKYSLFELENGRKRMLASAGELQKGNELALPSKYVNFLYLASHYEKLKGSPEDNEQKQLFVEQHKHYLDEIIEQISEFSKRVILADANLDKVLSAYNKHRDKPIREQAENIIHLFTLTNLGAPAAFKYFDTTIDRKRYTSTKEVLDATLIHQSITGLYETRIDLSQLGGDGGAEAAAKEAAAKEAAAKEAAAKALEAEAAAKEAAAKEAAAKEAAAKAGGMDLLKPLTVERKGVKIKGYWNSQADITCVPKDLLQGEEPVRQQNVTTIHGTQEGDVYYVNLKIDGRRINTEVIGTTLDYAIITPGDVPWILKKPLELTIKLDLEEQQGTLLNNSILSKKGKEELKQLFEKYSALWQSWENQVGHRRIRPHKIATGTVKPTPQKQYHINPKAKPDIQIVINDLLKQGVLIQKESTMNTPVYPVPKPNGRWRMVLDYRAVNKVTPLIAVQNQHSYGILGSLFKGRYKTTIDLSNGFWAHPIVPEDYWITAFTWQGKQYCWTVLPQGFLNSPGLFNGDVVDLLQGIPNVEVYVDDVYISHDSEKEHLEYLDILFNRLKEAGYIISLKKSNIANSIVDFLGFQITNEGRGLTDTFKEKLENITAPTTLKQLQSILGLLNFARNFIPDFTELIAPLYALIPKSPKNYVPWQIEHSTTLETLITKLNGAEYLQGRKGDKTLIMKVNASYTTGYIRYYNEGEKKPISYVSIVFSKTELKFTELEKLLTTVHKGLLKALDLSMGQNIHVYSPIVSMQNIQKTPQTAKKALASRWLSWLSYLEDPRIRFFYDPQMPALKDLPAVDTGKDNKKHPSNFQHIFYTDGSAITSPTKEGHLNAGMGIVYFINKDGNLQKQQEWSISLGNHTAQFAEIAAFEFALKKCLPLGGNILVVTDSNYVAKAYNEELDVWASNGFVNNRKKPLKHISKWKSVADLKRLRPDVVVTHEPGHQKLDSSPHAYGNNLADQLATQASFKVHAGKRTADGSEFEKRTADGSEFESPKKKAKVE

SEQ ID NO: 1116 - protein, 2182 aa, synthetic construct
  source 1..2182: note = Description of Artificial Sequence: Synthetic polypeptide
MPAAKRVKLDGGDKKYSIGLDIGTNSVGWAVITDEYKVPSKKFKVLGNTDRHSIKKNLIGALLFDSGETAEATRLKRTARRRYTRRKNRICYLQEIFSNEMAKVDDSFFHRLEESFLVEEDKKHERHPIFGNIVDEVAYHEKYPTIYHLRKKLVDSTDKADLRLIYLALAHMIKFRGHFLIEGDLNPDNSDVDKLFIQLVQTYNQLFEENPINASGVDAKAILSARLSKSRRLENLIAQLPGEKKNGLFGNLIALSLGLTPNFKSNFDLAEDAKLQLSKDTYDDDLDNLLAQIGDQYADLFLAAKNLSDAILLSDILRVNTEITKAPLSASMIKRYDEHHQDLTLLKALVRQQLPEKYKEIFFDQSKNGYAGYIDGGASQEEFYKFIKPILEKMDGTEELLVKLNREDLLRKQRTFDNGSIPHQIHLGELHAILRRQEDFYPFLKDNREKIEKILTFRIPYYVGPLARGNSRFAWMTRKSEETITPWNFEEVVDKGASAQSFIERMTNFDKNLPNEKVLPKHSLLYEYFTVYNELTKVKYVTEGMRKPAFLSGEQKKAIVDLLFKTNRKVTVKQLKEDYFKKIECFDSVEISGVEDRFNASLGTYHDLLKIIKDKDFLDNEENEDILEDIVLTLTLFEDREMIEERLKTYAHLFDDKVMKQLKRRRYTGWGRLSRKLINGIRDKQSGKTILDFLKSDGFANRNFMQLIHDDSLTFKEDIQKAQVSGQGDSLHEHIANLAGSPAIKKGILQTVKVVDELVKVMGRHKPENIVIEMARENQTTQKGQKNSRERMKRIEEGIKELGSQILKEHPVENTQLQNEKLYLYYLQNGRDMYVDQELDINRLSDYDVDHIVPQSFLKDDSIDNKVLTRSDKARGKSDNVPSEEVVKKMKNYWRQLLNAKLITQRKFDNLTKAERGGLSELDKAGFIKRQLVETRQITKHVAQILDSRMNTKYDENDKLIREVKVITLKSKLVSDFRKDFQFYKVREINNYHHAHDAYLNAVVGTALIKKYPKLESEFVYGDYKVYDVRKMIAKSEQEIGKATAKYFFYSNIMNFFKTEITLANGEIRKRPLIETNGETGEIVWDKGRDFATVRKVLSMPQVNIVKKTEVQTGGFSKESILPKRNSDKLIARKKDWDPKKYGGFDSPTVAYSVLVVAKVEKGKSKKLKSVKELLGITIMERSSFEKNPIDFLEAKGYKEVKKDLIIKLPKYSLFELENGRKRMLASAGELQKGNELALPSKYVNFLYLASHYEKLKGSPEDNEQKQLFVEQHKHYLDEIIEQISEFSKRVILADANLDKVLSAYNKHRDKPIREQAENIIHLFTLTNLGAPAAFKYFDTTIDRKRYTSTKEVLDATLIHQSITGLYETRIDLSQLGGDGGEAAAKEAAAKEAAAKEAAAKGGMDLLKPLTVERKGVKIKGYWNSQADITCVPKDLLQGEEPVRQQNVTTIHGTQEGDVYYVNLKIDGRRINTEVIGTTLDYAIITPGDVPWILKKPLELTIKLDLEEQQGTLLNNSILSKKGKEELKQLFEKYSALWQSWENQVGHRRIRPHKIATGTVKPTPQKQYHINPKAKPDIQIVINDLLKQGVLIQKESTMNTPVYPVPKPNGRWRMVLDYRAVNKVTPLIAVQNQHSYGILGSLFKGRYKTTIDLSNGFWAHPIVPEDYWITAFTWQGKQYCWTVLPQGFLNSPGLFNGDVVDLLQGIPNVEVYVDDVYISHDSEKEHLEYLDILFNRLKEAGYIISLKKSNIANSIVDFLGFQITNEGRGLTDTFKEKLENITAPTTLKQLQSILGLLNFARNFIPDFTELIAPLYALIPKSPKNYVPWQIEHSTTLETLITKLNGAEYLQGRKGDKTLIMKVNASYTTGYIRYYNEGEKKPISYVSIVFSKTELKFTELEKLLTTVHKGLLKALDLSMGQNIHVYSPIVSMQNIQKTPQTAKKALASRWLSWLSYLEDPRIRFFYDPQMPALKDLPAVDTGKDNKKHPSNFQHIFYTDGSAITSPTKEGHLNAGMGIVYFINKDGNLQKQQEWSISLGNHTAQFAEIAAFEFALKKCLPLGGNILVVTDSNYVAKAYNEELDVWASNGFVNNRKKPLKHISKWKSVADLKRLRPDVVVTHEPGHQKLDSSPHAYGNNLADQLATQASFKVHAGKRTADGSEFEKRTADGSEFESPKKKAKVE

SEQ ID NO: 1117 - protein, 2171 aa, synthetic construct
  source 1..2171: note = Description of Artificial Sequence: Synthetic polypeptide
MPAAKRVKLDGGDKKYSIGLDIGTNSVGWAVITDEYKVPSKKFKVLGNTDRHSIKKNLIGALLFDSGETAEATRLKRTARRRYTRRKNRICYLQEIFSNEMAKVDDSFFHRLEESFLVEEDKKHERHPIFGNIVDEVAYHEKYPTIYHLRKKLVDSTDKADLRLIYLALAHMIKFRGHFLIEGDLNPDNSDVDKLFIQLVQTYNQLFEENPINASGVDAKAILSARLSKSRRLENLIAQLPGEKKNGLFGNLIALSLGLTPNFKSNFDLAEDAKLQLSKDTYDDDLDNLLAQIGDQYADLFLAAKNLSDAILLSDILRVNTEITKAPLSASMIKRYDEHHQDLTLLKALVRQQLPEKYKEIFFDQSKNGYAGYIDGGASQEEFYKFIKPILEKMDGTEELLVKLNREDLLRKQRTFDNGSIPHQIHLGELHAILRRQEDFYPFLKDNREKIEKILTFRIPYYVGPLARGNSRFAWMTRKSEETITPWNFEEVVDKGASAQSFIERMTNFDKNLPNEKVLPKHSLLYEYFTVYNELTKVKYVTEGMRKPAFLSGEQKKAIVDLLFKTNRKVTVKQLKEDYFKKIECFDSVEISGVEDRFNASLGTYHDLLKIIKDKDFLDNEENEDILEDIVLTLTLFEDREMIEERLKTYAHLFDDKVMKQLKRRRYTGWGRLSRKLINGIRDKQSGKTILDFLKSDGFANRNFMQLIHDDSLTFKEDIQKAQVSGQGDSLHEHIANLAGSPAIKKGILQTVKVVDELVKVMGRHKPENIVIEMARENQTTQKGQKNSRERMKRIEEGIKELGSQILKEHPVENTQLQNEKLYLYYLQNGRDMYVDQELDINRLSDYDVDHIVPQSFLKDDSIDNKVLTRSDKARGKSDNVPSEEVVKKMKNYWRQLLNAKLITQRKFDNLTKAERGGLSELDKAGFIKRQLVETRQITKHVAQILDSRMNTKYDENDKLIREVKVITLKSKLVSDFRKDFQFYKVREINNYHHAHDAYLNAVVGTALIKKYPKLESEFVYGDYKVYDVRKMIAKSEQEIGKATAKYFFYSNIMNFFKTEITLANGEIRKRPLIETNGETGEIVWDKGRDFATVRKVLSMPQVNIVKKTEVQTGGFSKESILPKRNSDKLIARKKDWDPKKYGGFDSPTVAYSVLVVAKVEKGKSKKLKSVKELLGITIMERSSFEKNPIDFLEAKGYKEVKKDLIIKLPKYSLFELENGRKRMLASAGELQKGNELALPSKYVNFLYLASHYEKLKGSPEDNEQKQLFVEQHKHYLDEIIEQISEFSKRVILADANLDKVLSAYNKHRDKPIREQAENIIHLFTLTNLGAPAAFKYFDTTIDRKRYTSTKEVLDATLIHQSITGLYETRIDLSQLGGDGGGSSPAPGGGGGMDLLKPLTVERKGVKIKGYWNSQADITCVPKDLLQGEEPVRQQNVTTIHGTQEGDVYYVNLKIDGRRINTEVIGTTLDYAIITPGDVPWILKKPLELTIKLDLEEQQGTLLNNSILSKKGKEELKQLFEKYSALWQSWENQVGHRRIRPHKIATGTVKPTPQKQYHINPKAKPDIQIVINDLLKQGVLIQKESTMNTPVYPVPKPNGRWRMVLDYRAVNKVTPLIAVQNQHSYGILGSLFKGRYKTTIDLSNGFWAHPIVPEDYWITAFTWQGKQYCWTVLPQGFLNSPGLFNGDVVDLLQGIPNVEVYVDDVYISHDSEKEHLEYLDILFNRLKEAGYIISLKKSNIANSIVDFLGFQITNEGRGLTDTFKEKLENITAPTTLKQLQSILGLLNFARNFIPDFTELIAPLYALIPKSPKNYVPWQIEHSTTLETLITKLNGAEYLQGRKGDKTLIMKVNASYTTGYIRYYNEGEKKPISYVSIVFSKTELKFTELEKLLTTVHKGLLKALDLSMGQNIHVYSPIVSMQNIQKTPQTAKKALASRWLSWLSYLEDPRIRFFYDPQMPALKDLPAVDTGKDNKKHPSNFQHIFYTDGSAITSPTKEGHLNAGMGIVYFINKDGNLQKQQEWSISLGNHTAQFAEIAAFEFALKKCLPLGGNILVVTDSNYVAKAYNEELDVWASNGFVNNRKKPLKHISKWKSVADLKRLRPDVVVTHEPGHQKLDSSPHAYGNNLADQLATQASFKVHAGKRTADGSEFEKRTADGSEFESPKKKAKVE

SEQ ID NO: 1118 - protein, 2173 aa, synthetic construct
  source 1..2173: note = Description of Artificial Sequence: Synthetic polypeptide
MPAAKRVKLDGGDKKYSIGLDIGTNSVGWAVITDEYKVPSKKFKVLGNTDRHSIKKNLIGALLFDSGETAEATRLKRTARRRYTRRKNRICYLQEIFSNEMAKVDDSFFHRLEESFLVEEDKKHERHPIFGNIVDEVAYHEKYPTIYHLRKKLVDSTDKADLRLIYLALAHMIKFRGHFLIEGDLNPDNSDVDKLFIQLVQTYNQLFEENPINASGVDAKAILSARLSKSRRLENLIAQLPGEKKNGLFGNLIALSLGLTPNFKSNFDLAEDAKLQLSKDTYDDDLDNLLAQIGDQYADLFLAAKNLSDAILLSDILRVNTEITKAPLSASMIKRYDEHHQDLTLLKALVRQQLPEKYKEIFFDQSKNGYAGYIDGGASQEEFYKFIKPILEKMDGTEELLVKLNREDLLRKQRTFDNGSIPHQIHLGELHAILRRQEDFYPFLKDNREKIEKILTFRIPYYVGPLARGNSRFAWMTRKSEETITPWNFEEVVDKGASAQSFIERMTNFDKNLPNEKVLPKHSLLYEYFTVYNELTKVKYVTEGMRKPAFLSGEQKKAIVDLLFKTNRKVTVKQLKEDYFKKIECFDSVEISGVEDRFNASLGTYHDLLKIIKDKDFLDNEENEDILEDIVLTLTLFEDREMIEERLKTYAHLFDDKVMKQLKRRRYTGWGRLSRKLINGIRDKQSGKTILDFLKSDGFANRNFMQLIHDDSLTFKEDIQKAQVSGQGDSLHEHIANLAGSPAIKKGILQTVKVVDELVKVMGRHKPENIVIEMARENQTTQKGQKNSRERMKRIEEGIKELGSQILKEHPVENTQLQNEKLYLYYLQNGRDMYVDQELDINRLSDYDVDHIVPQSFLKDDSIDNKVLTRSDKARGKSDNVPSEEVVKKMKNYWRQLLNAKLITQRKFDNLTKAERGGLSELDKAGFIKRQLVETRQITKHVAQILDSRMNTKYDENDKLIREVKVITLKSKLVSDFRKDFQFYKVREINNYHHAHDAYLNAVVGTALIKKYPKLESEFVYGDYKVYDVRKMIAKSEQEIGKATAKYFFYSNIMNFFKTEITLANGEIRKRPLIETNGETGEIVWDKGRDFATVRKVLSMPQVNIVKKTEVQTGGFSKESILPKRNSDKLIARKKDWDPKKYGGFDSPTVAYSVLVVAKVEKGKSKKLKSVKELLGITIMERSSFEKNPIDFLEAKGYKEVKKDLIIKLPKYSLFELENGRKRMLASAGELQKGNELALPSKYVNFLYLASHYEKLKGSPEDNEQKQLFVEQHKHYLDEIIEQISEFSKRVILADANLDKVLSAYNKHRDKPIREQAENIIHLFTLTNLGAPAAFKYFDTTIDRKRYTSTKEVLDATLIHQSITGLYETRIDLSQLGGDGGPAPEAAAKGGGGGMDLLKPLTVERKGVKIKGYWNSQADITCVPKDLLQGEEPVRQQNVTTIHGTQEGDVYYVNLKIDGRRINTEVIGTTLDYAIITPGDVPWILKKPLELTIKLDLEEQQGTLLNNSILSKKGKEELKQLFEKYSALWQSWENQVGHRRIRPHKIATGTVKPTPQKQYHINPKAKPDIQIVINDLLKQGVLIQKESTMNTPVYPVPKPNGRWRMVLDYRAVNKVTPLIAVQNQHSYGILGSLFKGRYKTTIDLSNGFWAHPIVPEDYWITAFTWQGKQYCWTVLPQGFLNSPGLFNGDVVDLLQGIPNVEVYVDDVYISHDSEKEHLEYLDILFNRLKEAGYIISLKKSNIANSIVDFLGFQITNEGRGLTDTFKEKLENITAPTTLKQLQSILGLLNFARNFIPDFTELIAPLYALIPKSPKNYVPWQIEHSTTLETLITKLNGAEYLQGRKGDKTLIMKVNASYTTGYIRYYNEGEKKPISYVSIVFSKTELKFTELEKLLTTVHKGLLKALDLSMGQNIHVYSPIVSMQNIQKTPQTAKKALASRWLSWLSYLEDPRIRFFYDPQMPALKDLPAVDTGKDNKKHPSNFQHIFYTDGSAITSPTKEGHLNAGMGIVYFINKDGNLQKQQEWSISLGNHTAQFAEIAAFEFALKKCLPLGGNILVVTDSNYVAKAYNEELDVWASNGFVNNRKKPLKHISKWKSVADLKRLRPDVVVTHEPGHQKLDSSPHAYGNNLADQLATQASFKVHAGKRTADGSEFEKRTADGSEFESPKKKAKVE

SEQ ID NO: 1119 - protein, 2182 aa, synthetic construct
  source 1..2182: note = Description of Artificial Sequence: Synthetic polypeptide
MPAAKRVKLDGGDKKYSIGLDIGTNSVGWAVITDEYKVPSKKFKVLGNTDRHSIKKNLIGALLFDSGETAEATRLKRTARRRYTRRKNRICYLQEIFSNEMAKVDDSFFHRLEESFLVEEDKKHERHPIFGNIVDEVAYHEKYPTIYHLRKKLVDSTDKADLRLIYLALAHMIKFRGHFLIEGDLNPDNSDVDKLFIQLVQTYNQLFEENPINASGVDAKAILSARLSKSRRLENLIAQLPGEKKNGLFGNLIALSLGLTPNFKSNFDLAEDAKLQLSKDTYDDDLDNLLAQIGDQYADLFLAAKNLSDAILLSDILRVNTEITKAPLSASMIKRYDEHHQDLTLLKALVRQQLPEKYKEIFFDQSKNGYAGYIDGGASQEEFYKFIKPILEKMDGTEELLVKLNREDLLRKQRTFDNGSIPHQIHLGELHAILRRQEDFYPFLKDNREKIEKILTFRIPYYVGPLARGNSRFAWMTRKSEETITPWNFEEVVDKGASAQSFIERMTNFDKNLPNEKVLPKHSLLYEYFTVYNELTKVKYVTEGMRKPAFLSGEQKKAIVDLLFKTNRKVTVKQLKEDYFKKIECFDSVEISGVEDRFNASLGTYHDLLKIIKDKDFLDNEENEDILEDIVLTLTLFEDREMIEERLKTYAHLFDDKVMKQLKRRRYTGWGRLSRKLINGIRDKQSGKTILDFLKSDGFANRNFMQLIHDDSLTFKEDIQKAQVSGQGDSLHEHIANLAGSPAIKKGILQTVKVVDELVKVMGRHKPENIVIEMARENQTTQKGQKNSRERMKRIEEGIKELGSQILKEHPVENTQLQNEKLYLYYLQNGRDMYVDQELDINRLSDYDVDHIVPQSFLKDDSIDNKVLTRSDKARGKSDNVPSEEVVKKMKNYWRQLLNAKLITQRKFDNLTKAERGGLSELDKAGFIKRQLVETRQITKHVAQILDSRMNTKYDENDKLIREVKVITLKSKLVSDFRKDFQFYKVREINNYHHAHDAYLNAVVGTALIKKYPKLESEFVYGDYKVYDVRKMIAKSEQEIGKATAKYFFYSNIMNFFKTEITLANGEIRKRPLIETNGETGEIVWDKGRDFATVRKVLSMPQVNIVKKTEVQTGGFSKESILPKRNSDKLIARKKDWDPKKYGGFDSPTVAYSVLVVAKVEKGKSKKLKSVKELLGITIMERSSFEKNPIDFLEAKGYKEVKKDLIIKLPKYSLFELENGRKRMLASAGELQKGNELALPSKYVNFLYLASHYEKLKGSPEDNEQKQLFVEQHKHYLDEIIEQISEFSKRVILADANLDKVLSAYNKHRDKPIREQAENIIHLFTLTNLGAPAAFKYFDTTIDRKRYTSTKEVLDATLIHQSITGLYETRIDLSQLGGDGGGGGGSGGGGSGGGGSGGGGSGGMDLLKPLTVERKGVKIKGYWNSQADITCVPKDLLQGEEPVRQQNVTTIHGTQEGDVYYVNLKIDGRRINTEVIGTTLDYAIITPGDVPWILKKPLELTIKLDLEEQQGTLLNNSILSKKGKEELKQLFEKYSALWQSWENQVGHRRIRPHKIATGTVKPTPQKQYHINPKAKPDIQIVINDLLKQGVLIQKESTMNTPVYPVPKPNGRWRMVLDYRAVNKVTPLIAVQNQHSYGILGSLFKGRYKTTIDLSNGFWAHPIVPEDYWITAFTWQGKQYCWTVLPQGFLNSPGLFNGDVVDLLQGIPNVEVYVDDVYISHDSEKEHLEYLDILFNRLKEAGYIISLKKSNIANSIVDFLGFQITNEGRGLTDTFKEKLENITAPTTLKQLQSILGLLNFARNFIPDFTELIAPLYALIPKSPKNYVPWQIEHSTTLETLITKLNGAEYLQGRKGDKTLIMKVNASYTTGYIRYYNEGEKKPISYVSIVFSKTELKFTELEKLLTTVHKGLLKALDLSMGQNIHVYSPIVSMQNIQKTPQTAKKALASRWLSWLSYLEDPRIRFFYDPQMPALKDLPAVDTGKDNKKHPSNFQHIFYTDGSAITSPTKEGHLNAGMGIVYFINKDGNLQKQQEWSISLGNHTAQFAEIAAFEFALKKCLPLGGNILVVTDSNYVAKAYNEELDVWASNGFVNNRKKPLKHISKWKSVADLKRLRPDVVVTHEPGHQKLDSSPHAYGNNLADQLATQASFKVHAGKRTADGSEFEKRTADGSEFESPKKKAKVE

SEQ ID NO: 1120 - protein, 2171 aa, synthetic construct
  source 1..2171: note = Description of Artificial Sequence: Synthetic polypeptide
MPAAKRVKLDGGDKKYSIGLDIGTNSVGWAVITDEYKVPSKKFKVLGNTDRHSIKKNLIGALLFDSGETAEATRLKRTARRRYTRRKNRICYLQEIFSNEMAKVDDSFFHRLEESFLVEEDKKHERHPIFGNIVDEVAYHEKYPTIYHLRKKLVDSTDKADLRLIYLALAHMIKFRGHFLIEGDLNPDNSDVDKLFIQLVQTYNQLFEENPINASGVDAKAILSARLSKSRRLENLIAQLPGEKKNGLFGNLIALSLGLTPNFKSNFDLAEDAKLQLSKDTYDDDLDNLLAQIGDQYADLFLAAKNLSDAILLSDILRVNTEITKAPLSASMIKRYDEHHQDLTLLKALVRQQLPEKYKEIFFDQSKNGYAGYIDGGASQEEFYKFIKPILEKMDGTEELLVKLNREDLLRKQRTFDNGSIPHQIHLGELHAILRRQEDFYPFLKDNREKIEKILTFRIPYYVGPLARGNSRFAWMTRKSEETITPWNFEEVVDKGASAQSFIERMTNFDKNLPNEKVLPKHSLLYEYFTVYNELTKVKYVTEGMRKPAFLSGEQKKAIVDLLFKTNRKVTVKQLKEDYFKKIECFDSVEISGVEDRFNASLGTYHDLLKIIKDKDFLDNEENEDILEDIVLTLTLFEDREMIEERLKTYAHLFDDKVMKQLKRRRYTGWGRLSRKLINGIRDKQSGKTILDFLKSDGFANRNFMQLIHDDSLTFKEDIQKAQVSGQGDSLHEHIANLAGSPAIKKGILQTVKVVDELVKVMGRHKPENIVIEMARENQTTQKGQKNSRERMKRIEEGIKELGSQILKEHPVENTQLQNEKLYLYYLQNGRDMYVDQELDINRLSDYDVDHIVPQSFLKDDSIDNKVLTRSDKARGKSDNVPSEEVVKKMKNYWRQLLNAKLITQRKFDNLTKAERGGLSELDKAGFIKRQLVETRQITKHVAQILDSRMNTKYDENDKLIREVKVITLKSKLVSDFRKDFQFYKVREINNYHHAHDAYLNAVVGTALIKKYPKLESEFVYGDYKVYDVRKMIAKSEQEIGKATAKYFFYSNIMNFFKTEITLANGEIRKRPLIETNGETGEIVWDKGRDFATVRKVLSMPQVNIVKKTEVQTGGFSKESILPKRNSDKLIARKKDWDPKKYGGFDSPTVAYSVLVVAKVEKGKSKKLKSVKELLGITIMERSSFEKNPIDFLEAKGYKEVKKDLIIKLPKYSLFELENGRKRMLASAGELQKGNELALPSKYVNFLYLASHYEKLKGSPEDNEQKQLFVEQHKHYLDEIIEQISEFSKRVILADANLDKVLSAYNKHRDKPIREQAENIIHLFTLTNLGAPAAFKYFDTTIDRKRYTSTKEVLDATLIHQSITGLYETRIDLSQLGGDGGPAPGGSGSSGGMDLLKPLTVERKGVKIKGYWNSQADITCVPKDLLQGEEPVRQQNVTTIHGTQEGDVYYVNLKIDGRRINTEVIGTTLDYAIITPGDVPWILKKPLELTIKLDLEEQQGTLLNNSILSKKGKEELKQLFEKYSALWQSWENQVGHRRIRPHKIATGTVKPTPQKQYHINPKAKPDIQIVINDLLKQGVLIQKESTMNTPVYPVPKPNGRWRMVLDYRAVNKVTPLIAVQNQHSYGILGSLFKGRYKTTIDLSNGFWAHPIVPEDYWITAFTWQGKQYCWTVLPQGFLNSPGLFNGDVVDLLQGIPNVEVYVDDVYISHDSEKEHLEYLDILFNRLKEAGYIISLKKSNIANSIVDFLGFQITNEGRGLTDTFKEKLENITAPTTLKQLQSILGLLNFARNFIPDFTELIAPLYALIPKSPKNYVPWQIEHSTTLETLITKLNGAEYLQGRKGDKTLIMKVNASYTTGYIRYYNEGEKKPISYVSIVFSKTELKFTELEKLLTTVHKGLLKALDLSMGQNIHVYSPIVSMQNIQKTPQTAKKALASRWLSWLSYLEDPRIRFFYDPQMPALKDLPAVDTGKDNKKHPSNFQHIFYTDGSAITSPTKEGHLNAGMGIVYFINKDGNLQKQQEWSISLGNHTAQFAEIAAFEFALKKCLPLGGNILVVTDSNYVAKAYNEELDVWASNGFVNNRKKPLKHISKWKSVADLKRLRPDVVVTHEPGHQKLDSSPHAYGNNLADQLATQASFKVHAGKRTADGSEFEKRTADGSEFESPKKKAKVE

SEQ ID NO: 1121 - protein, 2173 aa, synthetic construct
  source 1..2173: note = Description of Artificial Sequence: Synthetic polypeptide
MPAAKRVKLDGGDKKYSIGLDIGTNSVGWAVITDEYKVPSKKFKVLGNTDRHSIKKNLIGALLFDSGETAEATRLKRTARRRYTRRKNRICYLQEIFSNEMAKVDDSFFHRLEESFLVEEDKKHERHPIFGNIVDEVAYHEKYPTIYHLRKKLVDSTDKADLRLIYLALAHMIKFRGHFLIEGDLNPDNSDVDKLFIQLVQTYNQLFEENPINASGVDAKAILSARLSKSRRLENLIAQLPGEKKNGLFGNLIALSLGLTPNFKSNFDLAEDAKLQLSKDTYDDDLDNLLAQIGDQYADLFLAAKNLSDAILLSDILRVNTEITKAPLSASMIKRYDEHHQDLTLLKALVRQQLPEKYKEIFFDQSKNGYAGYIDGGASQEEFYKFIKPILEKMDGTEELLVKLNREDLLRKQRTFDNGSIPHQIHLGELHAILRRQEDFYPFLKDNREKIEKILTFRIPYYVGPLARGNSRFAWMTRKSEETITPWNFEEVVDKGASAQSFIERMTNFDKNLPNEKVLPKHSLLYEYFTVYNELTKVKYVTEGMRKPAFLSGEQKKAIVDLLFKTNRKVTVKQLKEDYFKKIECFDSVEISGVEDRFNASLGTYHDLLKIIKDKDFLDNEENEDILEDIVLTLTLFEDREMIEERLKTYAHLFDDKVMKQLKRRRYTGWGRLSRKLINGIRDKQSGKTILDFLKSDGFANRNFMQLIHDDSLTFKEDIQKAQVSGQGDSLHEHIANLAGSPAIKKGILQTVKVVDELVKVMGRHKPENIVIEMARENQTTQKGQKNSRERMKRIEEGIKELGSQILKEHPVENTQLQNEKLYLYYLQNGRDMYVDQELDINRLSDYDVDHIVPQSFLKDDSIDNKVLTRSDKARGKSDNVPSEEVVKKMKNYWRQLLNAKLITQRKFDNLTKAERGGLSELDKAGFIKRQLVETRQITKHVAQILDSRMNTKYDENDKLIREVKVITLKSKLVSDFRKDFQFYKVREINNYHHAHDAYLNAVVGTALIKKYPKLESEFVYGDYKVYDVRKMIAKSEQEIGKATAKYFFYSNIMNFFKTEITLANGEIRKRPLIETNGETGEIVWDKGRDFATVRKVLSMPQVNIVKKTEVQTGGFSKESILPKRNSDKLIARKKDWDPKKYGGFDSPTVAYSVLVVAKVEKGKSKKLKSVKELLGITIMERSSFEKNPIDFLEAKGYKEVKKDLIIKLPKYSLFELENGRKRMLASAGELQKGNELALPSKYVNFLYLASHYEKLKGSPEDNEQKQLFVEQHKHYLDEIIEQISEFSKRVILADANLDKVLSAYNKHRDKPIREQAENIIHLFTLTNLGAPAAFKYFDTTIDRKRYTSTKEVLDATLIHQSITGLYETRIDLSQLGGDGGEAAAKPAPGSSGGMDLLKPLTVERKGVKIKGYWNSQADITCVPKDLLQGEEPVRQQNVTTIHGTQEGDVYYVNLKIDGRRINTEVIGTTLDYAIITPGDVPWILKKPLELTIKLDLEEQQGTLLNNSILSKKGKEELKQLFEKYSALWQSWENQVGHRRIRPHKIATGTVKPTPQKQYHINPKAKPDIQIVINDLLKQGVLIQKESTMNTPVYPVPKPNGRWRMVLDYRAVNKVTPLIAVQNQHSYGILGSLFKGRYKTTIDLSNGFWAHPIVPEDYWITAFTWQGKQYCWTVLPQGFLNSPGLFNGDVVDLLQGIPNVEVYVDDVYISHDSEKEHLEYLDILFNRLKEAGYIISLKKSNIANSIVDFLGFQITNEGRGLTDTFKEKLENITAPTTLKQLQSILGLLNFARNFIPDFTELIAPLYALIPKSPKNYVPWQIEHSTTLETLITKLNGAEYLQGRKGDKTLIMKVNASYTTGYIRYYNEGEKKPISYVSIVFSKTELKFTELEKLLTTVHKGLLKALDLSMGQNIHVYSPIVSMQNIQKTPQTAKKALASRWLSWLSYLEDPRIRFFYDPQMPALKDLPAVDTGKDNKKHPSNFQHIFYTDGSAITSPTKEGHLNAGMGIVYFINKDGNLQKQQEWSISLGNHTAQFAEIAAFEFALKKCLPLGGNILVVTDSNYVAKAYNEELDVWASNGFVNNRKKPLKHISKWKSVADLKRLRPDVVVTHEPGHQKLDSSPHAYGNNLADQLATQASFKVHAGKRTADGSEFEKRTADGSEFESPKKKAKVE

SEQ ID NO: 1122 - protein, 2172 aa, synthetic construct
  source 1..2172: note = Description of Artificial Sequence: Synthetic polypeptide
MPAAKRVKLDGGDKKYSIGLDIGTNSVGWAVITDEYKVPSKKFKVLGNTDRHSIKKNLIGALLFDSGETAEATRLKRTARRRYTRRKNRICYLQEIFSNEMAKVDDSFFHRLEESFLVEEDKKHERHPIFGNIVDEVAYHEKYPTIYHLRKKLVDSTDKADLRLIYLALAHMIKFRGHFLIEGDLNPDNSDVDKLFIQLVQTYNQLFEENPINASGVDAKAILSARLSKSRRLENLIAQLPGEKKNGLFGNLIALSLGLTPNFKSNFDLAEDAKLQLSKDTYDDDLDNLLAQIGDQYADLFLAAKNLSDAILLSDILRVNTEITKAPLSASMIKRYDEHHQDLTLLKALVRQQLPEKYKEIFFDQSKNGYAGYIDGGASQEEFYKFIKPILEKMDGTEELLVKLNREDLLRKQRTFDNGSIPHQIHLGELHAILRRQEDFYPFLKDNREKIEKILTFRIPYYVGPLARGNSRFAWMTRKSEETITPWNFEEVVDKGASAQSFIERMTNFDKNLPNEKVLPKHSLLYEYFTVYNELTKVKYVTEGMRKPAFLSGEQKKAIVDLLFKTNRKVTVKQLKEDYFKKIECFDSVEISGVEDRFNASLGTYHDLLKIIKDKDFLDNEENEDILEDIVLTLTLFEDREMIEERLKTYAHLFDDKVMKQLKRRRYTGWGRLSRKLINGIRDKQSGKTILDFLKSDGFANRNFMQLIHDDSLTFKEDIQKAQVSGQGDSLHEHIANLAGSPAIKKGILQTVKVVDELVKVMGRHKPENIVIEMARENQTTQKGQKNSRERMKRIEEGIKELGSQILKEHPVENTQLQNEKLYLYYLQNGRDMYVDQELDINRLSDYDVDHIVPQSFLKDDSIDNKVLTRSDKARGKSDNVPSEEVVKKMKNYWRQLLNAKLITQRKFDNLTKAERGGLSELDKAGFIKRQLVETRQITKHVAQILDSRMNTKYDENDKLIREVKVITLKSKLVSDFRKDFQFYKVREINNYHHAHDAYLNAVVGTALIKKYPKLESEFVYGDYKVYDVRKMIAKSEQEIGKATAKYFFYSNIMNFFKTEITLANGEIRKRPLIETNGETGEIVWDKGRDFATVRKVLSMPQVNIVKKTEVQTGGFSKESILPKRNSDKLIARKKDWDPKKYGGFDSPTVAYSVLVVAKVEKGKSKKLKSVKELLGITIMERSSFEKNPIDFLEAKGYKEVKKDLIIKLPKYSLFELENGRKRMLASAGELQKGNELALPSKYVNFLYLASHYEKLKGSPEDNEQKQLFVEQHKHYLDEIIEQISEFSKRVILADANLDKVLSAYNKHRDKPIREQAENIIHLFTLTNLGAPAAFKYFDTTIDRKRYTSTKEVLDATLIHQSITGLYETRIDLSQLGGDGGGGGGSGGGGSGGMDLLKPLTVERKGVKIKGYWNSQADITCVPKDLLQGEEPVRQQNVTTIHGTQEGDVYYVNLKIDGRRINTEVIGTTLDYAIITPGDVPWILKKPLELTIKLDLEEQQGTLLNNSILSKKGKEELKQLFEKYSALWQSWENQVGHRRIRPHKIATGTVKPTPQKQYHINPKAKPDIQIVINDLLKQGVLIQKESTMNTPVYPVPKPNGRWRMVLDYRAVNKVTPLIAVQNQHSYGILGSLFKGRYKTTIDLSNGFWAHPIVPEDYWITAFTWQGKQYCWTVLPQGFLNSPGLFNGDVVDLLQGIPNVEVYVDDVYISHDSEKEHLEYLDILFNRLKEAGYIISLKKSNIANSIVDFLGFQITNEGRGLTDTFKEKLENITAPTTLKQLQSILGLLNFARNFIPDFTELIAPLYALIPKSPKNYVPWQIEHSTTLETLITKLNGAEYLQGRKGDKTLIMKVNASYTTGYIRYYNEGEKKPISYVSIVFSKTELKFTELEKLLTTVHKGLLKALDLSMGQNIHVYSPIVSMQNIQKTPQTAKKALASRWLSWLSYLEDPRIRFFYDPQMPALKDLPAVDTGKDNKKHPSNFQHIFYTDGSAITSPTKEGHLNAGMGIVYFINKDGNLQKQQEWSISLGNHTAQFAEIAAFEFALKKCLPLGGNILVVTDSNYVAKAYNEELDVWASNGFVNNRKKPLKHISKWKSVADLKRLRPDVVVTHEPGHQKLDSSPHAYGNNLADQLATQASFKVHAGKRTADGSEFEKRTADGSEFESPKKKAKVE

SEQ ID NO: 1123 - protein, 2173 aa, synthetic construct
  source 1..2173: note = Description of Artificial Sequence: Synthetic polypeptide
MPAAKRVKLDGGDKKYSIGLDIGTNSVGWAVITDEYKVPSKKFKVLGNTDRHSIKKNLIGALLFDSGETAEATRLKRTARRRYTRRKNRICYLQEIFSNEMAKVDDSFFHRLEESFLVEEDKKHERHPIFGNIVDEVAYHEKYPTIYHLRKKLVDSTDKADLRLIYLALAHMIKFRGHFLIEGDLNPDNSDVDKLFIQLVQTYNQLFEENPINASGVDAKAILSARLSKSRRLENLIAQLPGEKKNGLFGNLIALSLGLTPNFKSNFDLAEDAKLQLSKDTYDDDLDNLLAQIGDQYADLFLAAKNLSDAILLSDILRVNTEITKAPLSASMIKRYDEHHQDLTLLKALVRQQLPEKYKEIFFDQSKNGYAGYIDGGASQEEFYKFIKPILEKMDGTEELLVKLNREDLLRKQRTFDNGSIPHQIHLGELHAILRRQEDFYPFLKDNREKIEKILTFRIPYYVGPLARGNSRFAWMTRKSEETITPWNFEEVVDKGASAQSFIERMTNFDKNLPNEKVLPKHSLLYEYFTVYNELTKVKYVTEGMRKPAFLSGEQKKAIVDLLFKTNRKVTVKQLKEDYFKKIECFDSVEISGVEDRFNASLGTYHDLLKIIKDKDFLDNEENEDILEDIVLTLTLFEDREMIEERLKTYAHLFDDKVMKQLKRRRYTGWGRLSRKLINGIRDKQSGKTILDFLKSDGFANRNFMQLIHDDSLTFKEDIQKAQVSGQGDSLHEHIANLAGSPAIKKGILQTVKVVDELVKVMGRHKPENIVIEMARENQTTQKGQKNSRERMKRIEEGIKELGSQILKEHPVENTQLQNEKLYLYYLQNGRDMYVDQELDINRLSDYDVDHIVPQSFLKDDSIDNKVLTRSDKARGKSDNVPSEEVVKKMKNYWRQLLNAKLITQRKFDNLTKAERGGLSELDKAGFIKRQLVETRQITKHVAQILDSRMNTKYDENDKLIREVKVITLKSKLVSDFRKDFQFYKVREINNYHHAHDAYLNAVVGTALIKKYPKLESEFVYGDYKVYDVRKMIAKSEQEIGKATAKYFFYSNIMNFFKTEITLANGEIRKRPLIETNGETGEIVWDKGRDFATVRKVLSMPQVNIVKKTEVQTGGFSKESILPKRNSDKLIARKKDWDPKKYGGFDSPTVAYSVLVVAKVEKGKSKKLKSVKELLGITIMERSSFEKNPIDFLEAKGYKEVKKDLIIKLPKYSLFELENGRKRMLASAGELQKGNELALPSKYVNFLYLASHYEKLKGSPEDNEQKQLFVEQHKHYLDEIIEQISEFSKRVILADANLDKVLSAYNKHRDKPIREQAENIIHLFTLTNLGAPAAFKYFDTTIDRKRYTSTKEVLDATLIHQSITGLYETRIDLSQLGGDGGGGSEAAAKPAPGGMDLLKPLTVERKGVKIKGYWNSQADITCVPKDLLQGEEPVRQQNVTTIHGTQEGDVYYVNLKIDGRRINTEVIGTTLDYAIITPGDVPWILKKPLELTIKLDLEEQQGTLLNNSILSKKGKEELKQLFEKYSALWQSWENQVGHRRIRPHKIATGTVKPTPQKQYHINPKAKPDIQIVINDLLKQGVLIQKESTMNTPVYPVPKPNGRWRMVLDYRAVNKVTPLIAVQNQHSYGILGSLFKGRYKTTIDLSNGFWAHPIVPEDYWITAFTWQGKQYCWTVLPQGFLNSPGLFNGDVVDLLQGIPNVEVYVDDVYISHDSEKEHLEYLDILFNRLKEAGYIISLKKSNIANSIVDFLGFQITNEGRGLTDTFKEKLENITAPTTLKQLQSILGLLNFARNFIPDFTELIAPLYALIPKSPKNYVPWQIEHSTTLETLITKLNGAEYLQGRKGDKTLIMKVNASYTTGYIRYYNEGEKKPISYVSIVFSKTELKFTELEKLLTTVHKGLLKALDLSMGQNIHVYSPIVSMQNIQKTPQTAKKALASRWLSWLSYLEDPRIRFFYDPQMPALKDLPAVDTGKDNKKHPSNFQHIFYTDGSAITSPTKEGHLNAGMGIVYFINKDGNLQKQQEWSISLGNHTAQFAEIAAFEFALKKCLPLGGNILVVTDSNYVAKAYNEELDVWASNGFVNNRKKPLKHISKWKSVADLKRLRPDVVVTHEPGHQKLDSSPHAYGNNLADQLATQASFKVHAGKRTADGSEFEKRTADGSEFESPKKKAKVE

SEQ ID NO: 1124 - protein, 2171 aa, synthetic construct
  source 1..2171: note = Description of Artificial Sequence: Synthetic polypeptide
MPAAKRVKLDGGDKKYSIGLDIGTNSVGWAVITDEYKVPSKKFKVLGNTDRHSIKKNLIGALLFDSGETAEATRLKRTARRRYTRRKNRICYLQEIFSNEMAKVDDSFFHRLEESFLVEEDKKHERHPIFGNIVDEVAYHEKYPTIYHLRKKLVDSTDKADLRLIYLALAHMIKFRGHFLIEGDLNPDNSDVDKLFIQLVQTYNQLFEENPINASGVDAKAILSARLSKSRRLENLIAQLPGEKKNGLFGNLIALSLGLTPNFKSNFDLAEDAKLQLSKDTYDDDLDNLLAQIGDQYADLFLAAKNLSDAILLSDILRVNTEITKAPLSASMIKRYDEHHQDLTLLKALVRQQLPEKYKEIFFDQSKNGYAGYIDGGASQEEFYKFIKPILEKMDGTEELLVKLNREDLLRKQRTFDNGSIPHQIHLGELHAILRRQEDFYPFLKDNREKIEKILTFRIPYYVGPLARGNSRFAWMTRKSEETITPWNFEEVVDKGASAQSFIERMTNFDKNLPNEKVLPKHSLLYEYFTVYNELTKVKYVTEGMRKPAFLSGEQKKAIVDLLFKTNRKVTVKQLKEDYFKKIECFDSVEISGVEDRFNASLGTYHDLLKIIKDKDFLDNEENEDILEDIVLTLTLFEDREMIEERLKTYAHLFDDKVMKQLKRRRYTGWGRLSRKLINGIRDKQSGKTILDFLKSDGFANRNFMQLIHDDSLTFKEDIQKAQVSGQGDSLHEHIANLAGSPAIKKGILQTVKVVDELVKVMGRHKPENIVIEMARENQTTQKGQKNSRERMKRIEEGIKELGSQILKEHPVENTQLQNEKLYLYYLQNGRDMYVDQELDINRLSDYDVDHIVPQSFLKDDSIDNKVLTRSDKARGKSDNVPSEEVVKKMKNYWRQLLNAKLITQRKFDNLTKAERGGLSELDKAGFIKRQLVETRQITKHVAQILDSRMNTKYDENDKLIREVKVITLKSKLVSDFRKDFQFYKVREINNYHHAHDAYLNAVVGTALIKKYPKLESEFVYGDYKVYDVRKMIAKSEQEIGKATAKYFFYSNIMNFFKTEITLANGEIRKRPLIETNGETGEIVWDKGRDFATVRKVLSMPQVNIVKKTEVQTGGFSKESILPKRNSDKLIARKKDWDPKKYGGFDSPTVAYSVLVVAKVEKGKSKKLKSVKELLGITIMERSSFEKNPIDFLEAKGYKEVKKDLIIKLPKYSLFELENGRKRMLASAGELQKGNELALPSKYVNFLYLASHYEKLKGSPEDNEQKQLFVEQHKHYLDEIIEQISEFSKRVILADANLDKVLSAYNKHRDKPIREQAENIIHLFTLTNLGAPAAFKYFDTTIDRKRYTSTKEVLDATLIHQSITGLYETRIDLSQLGGDGGGGGGSSPAPGGMDLLKPLTVERKGVKIKGYWNSQADITCVPKDLLQGEEPVRQQNVTTIHGTQEGDVYYVNLKIDGRRINTEVIGTTLDYAIITPGDVPWILKKPLELTIKLDLEEQQGTLLNNSILSKKGKEELKQLFEKYSALWQSWENQVGHRRIRPHKIATGTVKPTPQKQYHINPKAKPDIQIVINDLLKQGVLIQKESTMNTPVYPVPKPNGRWRMVLDYRAVNKVTPLIAVQNQHSYGILGSLFKGRYKTTIDLSNGFWAHPIVPEDYWITAFTWQGKQYCWTVLPQGFLNSPGLFNGDVVDLLQGIPNVEVYVDDVYISHDSEKEHLEYLDILFNRLKEAGYIISLKKSNIANSIVDFLGFQITNEGRGLTDTFKEKLENITAPTTLKQLQSILGLLNFARNFIPDFTELIAPLYALIPKSPKNYVPWQIEHSTTLETLITKLNGAEYLQGRKGDKTLIMKVNASYTTGYIRYYNEGEKKPISYVSIVFSKTELKFTELEKLLTTVHKGLLKALDLSMGQNIHVYSPIVSMQNIQKTPQTAKKALASRWLSWLSYLEDPRIRFFYDPQMPALKDLPAVDTGKDNKKHPSNFQHIFYTDGSAITSPTKEGHLNAGMGIVYFINKDGNLQKQQEWSISLGNHTAQFAEIAAFEFALKKCLPLGGNILVVTDSNYVAKAYNEELDVWASNGFVNNRKKPLKHISKWKSVADLKRLRPDVVVTHEPGHQKLDSSPHAYGNNLADQLATQASFKVHAGKRTADGSEFEKRTADGSEFESPKKKAKVE

SEQ ID NO: 1125 - protein, 2177 aa, synthetic construct
  source 1..2177: note = Description of Artificial Sequence: Synthetic polypeptide
MPAAKRVKLDGGDKKYSIGLDIGTNSVGWAVITDEYKVPSKKFKVLGNTDRHSIKKNLIGALLFDSGETAEATRLKRTARRRYTRRKNRICYLQEIFSNEMAKVDDSFFHRLEESFLVEEDKKHERHPIFGNIVDEVAYHEKYPTIYHLRKKLVDSTDKADLRLIYLALAHMIKFRGHFLIEGDLNPDNSDVDKLFIQLVQTYNQLFEENPINASGVDAKAILSARLSKSRRLENLIAQLPGEKKNGLFGNLIALSLGLTPNFKSNFDLAEDAKLQLSKDTYDDDLDNLLAQIGDQYADLFLAAKNLSDAILLSDILRVNTEITKAPLSASMIKRYDEHHQDLTLLKALVRQQLPEKYKEIFFDQSKNGYAGYIDGGASQEEFYKFIKPILEKMDGTEELLVKLNREDLLRKQRTFDNGSIPHQIHLGELHAILRRQEDFYPFLKDNREKIEKILTFRIPYYVGPLARGNSRFAWMTRKSEETITPWNFEEVVDKGASAQSFIERMTNFDKNLPNEKVLPKHSLLYEYFTVYNELTKVKYVTEGMRKPAFLSGEQKKAIVDLLFKTNRKVTVKQLKEDYFKKIECFDSVEISGVEDRFNASLGTYHDLLKIIKDKDFLDNEENEDILEDIVLTLTLFEDREMIEERLKTYAHLFDDKVMKQLKRRRYTGWGRLSRKLINGIRDKQSGKTILDFLKSDGFANRNFMQLIHDDSLTFKEDIQKAQVSGQGDSLHEHIANLAGSPAIKKGILQTVKVVDELVKVMGRHKPENIVIEMARENQTTQKGQKNSRERMKRIEEGIKELGSQILKEHPVENTQLQNEKLYLYYLQNGRDMYVDQELDINRLSDYDVDHIVPQSFLKDDSIDNKVLTRSDKARGKSDNVPSEEVVKKMKNYWRQLLNAKLITQRKFDNLTKAERGGLSELDKAGFIKRQLVETRQITKHVAQILDSRMNTKYDENDKLIREVKVITLKSKLVSDFRKDFQFYKVREINNYHHAHDAYLNAVVGTALIKKYPKLESEFVYGDYKVYDVRKMIAKSEQEIGKATAKYFFYSNIMNFFKTEITLANGEIRKRPLIETNGETGEIVWDKGRDFATVRKVLSMPQVNIVKKTEVQTGGFSKESILPKRNSDKLIARKKDWDPKKYGGFDSPTVAYSVLVVAKVEKGKSKKLKSVKELLGITIMERSSFEKNPIDFLEAKGYKEVKKDLIIKLPKYSLFELENGRKRMLASAGELQKGNELALPSKYVNFLYLASHYEKLKGSPEDNEQKQLFVEQHKHYLDEIIEQISEFSKRVILADANLDKVLSAYNKHRDKPIREQAENIIHLFTLTNLGAPAAFKYFDTTIDRKRYTSTKEVLDATLIHQSITGLYETRIDLSQLGGDGGGGGGSGGGGSGGGGSGGMDLLKPLTVERKGVKIKGYWNSQADITCVPKDLLQGEEPVRQQNVTTIHGTQEGDVYYVNLKIDGRRINTEVIGTTLDYAIITPGDVPWILKKPLELTIKLDLEEQQGTLLNNSILSKKGKEELKQLFEKYSALWQSWENQVGHRRIRPHKIATGTVKPTPQKQYHINPKAKPDIQIVINDLLKQGVLIQKESTMNTPVYPVPKPNGRWRMVLDYRAVNKVTPLIAVQNQHSYGILGSLFKGRYKTTIDLSNGFWAHPIVPEDYWITAFTWQGKQYCWTVLPQGFLNSPGLFNGDVVDLLQGIPNVEVYVDDVYISHDSEKEHLEYLDILFNRLKEAGYIISLKKSNIANSIVDFLGFQITNEGRGLTDTFKEKLENITAPTTLKQLQSILGLLNFARNFIPDFTELIAPLYALIPKSPKNYVPWQIEHSTTLETLITKLNGAEYLQGRKGDKTLIMKVNASYTTGYIRYYNEGEKKPISYVSIVFSKTELKFTELEKLLTTVHKGLLKALDLSMGQNIHVYSPIVSMQNIQKTPQTAKKALASRWLSWLSYLEDPRIRFFYDPQMPALKDLPAVDTGKDNKKHPSNFQHIFYTDGSAITSPTKEGHLNAGMGIVYFINKDGNLQKQQEWSISLGNHTAQFAEIAAFEFALKKCLPLGGNILVVTDSNYVAKAYNEELDVWASNGFVNNRKKPLKHISKWKSVADLKRLRPDVVVTHEPGHQKLDSSPHAYGNNLADQLATQASFKVHAGKRTADGSEFEKRTADGSEFESPKKKAKVE

SEQ ID NO: 1126 - protein, 2177 aa, synthetic construct
  source 1..2177: note = Description of Artificial Sequence: Synthetic polypeptide
MPAAKRVKLDGGDKKYSIGLDIGTNSVGWAVITDEYKVPSKKFKVLGNTDRHSIKKNLIGALLFDSGETAEATRLKRTARRRYTRRKNRICYLQEIFSNEMAKVDDSFFHRLEESFLVEEDKKHERHPIFGNIVDEVAYHEKYPTIYHLRKKLVDSTDKADLRLIYLALAHMIKFRGHFLIEGDLNPDNSDVDKLFIQLVQTYNQLFEENPINASGVDAKAILSARLSKSRRLENLIAQLPGEKKNGLFGNLIALSLGLTPNFKSNFDLAEDAKLQLSKDTYDDDLDNLLAQIGDQYADLFLAAKNLSDAILLSDILRVNTEITKAPLSASMIKRYDEHHQDLTLLKALVRQQLPEKYKEIFFDQSKNGYAGYIDGGASQEEFYKFIKPILEKMDGTEELLVKLNREDLLRKQRTFDNGSIPHQIHLGELHAILRRQEDFYPFLKDNREKIEKILTFRIPYYVGPLARGNSRFAWMTRKSEETITPWNFEEVVDKGASAQSFIERMTNFDKNLPNEKVLPKHSLLYEYFTVYNELTKVKYVTEGMRKPAFLSGEQKKAIVDLLFKTNRKVTVKQLKEDYFKKIECFDSVEISGVEDRFNASLGTYHDLLKIIKDKDFLDNEENEDILEDIVLTLTLFEDREMIEERLKTYAHLFDDKVMKQLKRRRYTGWGRLSRKLINGIRDKQSGKTILDFLKSDGFANRNFMQLIHDDSLTFKEDIQKAQVSGQGDSLHEHIANLAGSPAIKKGILQTVKVVDELVKVMGRHKPENIVIEMARENQTTQKGQKNSRERMKRIEEGIKELGSQILKEHPVENTQLQNEKLYLYYLQNGRDMYVDQELDINRLSDYDVDHIVPQSFLKDDSIDNKVLTRSDKARGKSDNVPSEEVVKKMKNYWRQLLNAKLITQRKFDNLTKAERGGLSELDKAGFIKRQLVETRQITKHVAQILDSRMNTKYDENDKLIREVKVITLKSKLVSDFRKDFQFYKVREINNYHHAHDAYLNAVVGTALIKKYPKLESEFVYGDYKVYDVRKMIAKSEQEIGKATAKYFFYSNIMNFFKTEITLANGEIRKRPLIETNGETGEIVWDKGRDFATVRKVLSMPQVNIVKKTEVQTGGFSKESILPKRNSDKLIARKKDWDPKKYGGFDSPTVAYSVLVVAKVEKGKSKKLKSVKELLGITIMERSSFEKNPIDFLEAKGYKEVKKDLIIKLPKYSLFELENGRKRMLASAGELQKGNELALPSKYVNFLYLASHYEKLKGSPEDNEQKQLFVEQHKHYLDEIIEQISEFSKRVILADANLDKVLSAYNKHRDKPIREQAENIIHLFTLTNLGAPAAFKYFDTTIDRKRYTSTKEVLDATLIHQSITGLYETRIDLSQLGGDGGEAAAKEAAAKEAAAKGGMDLLKPLTVERKGVKIKGYWNSQADITCVPKDLLQGEEPVRQQNVTTIHGTQEGDVYYVNLKIDGRRINTEVIGTTLDYAIITPGDVPWILKKPLELTIKLDLEEQQGTLLNNSILSKKGKEELKQLFEKYSALWQSWENQVGHRRIRPHKIATGTVKPTPQKQYHINPKAKPDIQIVINDLLKQGVLIQKESTMNTPVYPVPKPNGRWRMVLDYRAVNKVTPLIAVQNQHSYGILGSLFKGRYKTTIDLSNGFWAHPIVPEDYWITAFTWQGKQYCWTVLPQGFLNSPGLFNGDVVDLLQGIPNVEVYVDDVYISHDSEKEHLEYLDILFNRLKEAGYIISLKKSNIANSIVDFLGFQITNEGRGLTDTFKEKLENITAPTTLKQLQSILGLLNFARNFIPDFTELIAPLYALIPKSPKNYVPWQIEHSTTLETLITKLNGAEYLQGRKGDKTLIMKVNASYTTGYIRYYNEGEKKPISYVSIVFSKTELKFTELEKLLTTVHKGLLKALDLSMGQNIHVYSPIVSMQNIQKTPQTAKKALASRWLSWLSYLEDPRIRFFYDPQMPALKDLPAVDTGKDNKKHPSNFQHIFYTDGSAITSPTKEGHLNAGMGIVYFINKDGNLQKQQEWSISLGNHTAQFAEIAAFEFALKKCLPLGGNILVVTDSNYVAKAYNEELDVWASNGFVNNRKKPLKHISKWKSVADLKRLRPDVVVTHEPGHQKLDSSPHAYGNNLADQLATQASFKVHAGKRTADGSEFEKRTADGSEFESPKKKAKVE

SEQ ID NO: 1127 - protein, 2173 aa, synthetic construct
  source 1..2173: note = Description of Artificial Sequence: Synthetic polypeptide
MPAAKRVKLDGGDKKYSIGLDIGTNSVGWAVITDEYKVPSKKFKVLGNTDRHSIKKNLIGALLFDSGETAEATRLKRTARRRYTRRKNRICYLQEIFSNEMAKVDDSFFHRLEESFLVEEDKKHERHPIFGNIVDEVAYHEKYPTIYHLRKKLVDSTDKADLRLIYLALAHMIKFRGHFLIEGDLNPDNSDVDKLFIQLVQTYNQLFEENPINASGVDAKAILSARLSKSRRLENLIAQLPGEKKNGLFGNLIALSLGLTPNFKSNFDLAEDAKLQLSKDTYDDDLDNLLAQIGDQYADLFLAAKNLSDAILLSDILRVNTEITKAPLSASMIKRYDEHHQDLTLLKALVRQQLPEKYKEIFFDQSKNGYAGYIDGGASQEEFYKFIKPILEKMDGTEELLVKLNREDLLRKQRTFDNGSIPHQIHLGELHAILRRQEDFYPFLKDNREKIEKILTFRIPYYVGPLARGNSRFAWMTRKSEETITPWNFEEVVDKGASAQSFIERMTNFDKNLPNEKVLPKHSLLYEYFTVYNELTKVKYVTEGMRKPAFLSGEQKKAIVDLLFKTNRKVTVKQLKEDYFKKIECFDSVEISGVEDRFNASLGTYHDLLKIIKDKDFLDNEENEDILEDIVLTLTLFEDREMIEERLKTYAHLFDDKVMKQLKRRRYTGWGRLSRKLINGIRDKQSGKTILDFLKSDGFANRNFMQLIHDDSLTFKEDIQKAQVSGQGDSLHEHIANLAGSPAIKKGILQTVKVVDELVKVMGRHKPENIVIEMARENQTTQKGQKNSRERMKRIEEGIKELGSQILKEHPVENTQLQNEKLYLYYLQNGRDMYVDQELDINRLSDYDVDHIVPQSFLKDDSIDNKVLTRSDKARGKSDNVPSEEVVKKMKNYWRQLLNAKLITQRKFDNLTKAERGGLSELDKAGFIKRQLVETRQITKHVAQILDSRMNTKYDENDKLIREVKVITLKSKLVSDFRKDFQFYKVREINNYHHAHDAYLNAVVGTALIKKYPKLESEFVYGDYKVYDVRKMIAKSEQEIGKATAKYFFYSNIMNFFKTEITLANGEIRKRPLIETNGETGEIVWDKGRDFATVRKVLSMPQVNIVKKTEVQTGGFSKESILPKRNSDKLIARKKDWDPKKYGGFDSPTVAYSVLVVAKVEKGKSKKLKSVKELLGITIMERSSFEKNPIDFLEAKGYKEVKKDLIIKLPKYSLFELENGRKRMLASAGELQKGNELALPSKYVNFLYLASHYEKLKGSPEDNEQKQLFVEQHKHYLDEIIEQISEFSKRVILADANLDKVLSAYNKHRDKPIREQAENIIHLFTLTNLGAPAAFKYFDTTIDRKRYTSTKEVLDATLIHQSITGLYETRIDLSQLGGDGGEAAAKGSSGGSGGMDLLKPLTVERKGVKIKGYWNSQADITCVPKDLLQGEEPVRQQNVTTIHGTQEGDVYYVNLKIDGRRINTEVIGTTLDYAIITPGDVPWILKKPLELTIKLDLEEQQGTLLNNSILSKKGKEELKQLFEKYSALWQSWENQVGHRRIRPHKIATGTVKPTPQKQYHINPKAKPDIQIVINDLLKQGVLIQKESTMNTPVYPVPKPNGRWRMVLDYRAVNKVTPLIAVQNQHSYGILGSLFKGRYKTTIDLSNGFWAHPIVPEDYWITAFTWQGKQYCWTVLPQGFLNSPGLFNGDVVDLLQGIPNVEVYVDDVYISHDSEKEHLEYLDILFNRLKEAGYIISLKKSNIANSIVDFLGFQITNEGRGLTDTFKEKLENITAPTTLKQLQSILGLLNFARNFIPDFTELIAPLYALIPKSPKNYVPWQIEHSTTLETLITKLNGAEYLQGRKGDKTLIMKVNASYTTGYIRYYNEGEKKPISYVSIVFSKTELKFTELEKLLTTVHKGLLKALDLSMGQNIHVYSPIVSMQNIQKTPQTAKKALASRWLSWLSYLEDPRIRFFYDPQMPALKDLPAVDTGKDNKKHPSNFQHIFYTDGSAITSPTKEGHLNAGMGIVYFINKDGNLQKQQEWSISLGNHTAQFAEIAAFEFALKKCLPLGGNILVVTDSNYVAKAYNEELDVWASNGFVNNRKKPLKHISKWKSVADLKRLRPDVVVTHEPGHQKLDSSPHAYGNNLADQLATQASFKVHAGKRTADGSEFEKRTADGSEFESPKKKAKVE

SEQ ID NO: 1128 - protein, 2171 aa, synthetic construct
  source 1..2171: note = Description of Artificial Sequence: Synthetic polypeptide
MPAAKRVKLDGGDKKYSIGLDIGTNSVGWAVITDEYKVPSKKFKVLGNTDRHSIKKNLIGALLFDSGETAEATRLKRTARRRYTRRKNRICYLQEIFSNEMAKVDDSFFHRLEESFLVEEDKKHERHPIFGNIVDEVAYHEKYPTIYHLRKKLVDSTDKADLRLIYLALAHMIKFRGHFLIEGDLNPDNSDVDKLFIQLVQTYNQLFEENPINASGVDAKAILSARLSKSRRLENLIAQLPGEKKNGLFGNLIALSLGLTPNFKSNFDLAEDAKLQLSKDTYDDDLDNLLAQIGDQYADLFLAAKNLSDAILLSDILRVNTEITKAPLSASMIKRYDEHHQDLTLLKALVRQQLPEKYKEIFFDQSKNGYAGYIDGGASQEEFYKFIKPILEKMDGTEELLVKLNREDLLRKQRTFDNGSIPHQIHLGELHAILRRQEDFYPFLKDNREKIEKILTFRIPYYVGPLARGNSRFAWMTRKSEETITPWNFEEVVDKGASAQSFIERMTNFDKNLPNEKVLPKHSLLYEYFTVYNELTKVKYVTEGMRKPAFLSGEQKKAIVDLLFKTNRKVTVKQLKEDYFKKIECFDSVEISGVEDRFNASLGTYHDLLKIIKDKDFLDNEENEDILEDIVLTLTLFEDREMIEERLKTYAHLFDDKVMKQLKRRRYTGWGRLSRKLINGIRDKQSGKTILDFLKSDGFANRNFMQLIHDDSLTFKEDIQKAQVSGQGDSLHEHIANLAGSPAIKKGILQTVKVVDELVKVMGRHKPENIVIEMARENQTTQKGQKNSRERMKRIEEGIKELGSQILKEHPVENTQLQNEKLYLYYLQNGRDMYVDQELDINRLSDYDVDHIVPQSFLKDDSIDNKVLTRSDKARGKSDNVPSEEVVKKMKNYWRQLLNAKLITQRKFDNLTKAERGGLSELDKAGFIKRQLVETRQITKHVAQILDSRMNTKYDENDKLIREVKVITLKSKLVSDFRKDFQFYKVREINNYHHAHDAYLNAVVGTALIKKYPKLESEFVYGDYKVYDVRKMIAKSEQEIGKATAKYFFYSNIMNFFKTEITLANGEIRKRPLIETNGETGEIVWDKGRDFATVRKVLSMPQVNIVKKTEVQTGGFSKESILPKRNSDKLIARKKDWDPKKYGGFDSPTVAYSVLVVAKVEKGKSKKLKSVKELLGITIMERSSFEKNPIDFLEAKGYKEVKKDLIIKLPKYSLFELENGRKRMLASAGELQKGNELALPSKYVNFLYLASHYEKLKGSPEDNEQKQLFVEQHKHYLDEIIEQISEFSKRVILADANLDKVLSAYNKHRDKPIREQAENIIHLFTLTNLGAPAAFKYFDTTIDRKRYTSTKEVLDATLIHQSITGLYETRIDLSQLGGDGGGGSGGGPAPGGMDLLKPLTVERKGVKIKGYWNSQADITCVPKDLLQGEEPVRQQNVTTIHGTQEGDVYYVNLKIDGRRINTEVIGTTLDYAIITPGDVPWILKKPLELTIKLDLEEQQGTLLNNSILSKKGKEELKQLFEKYSALWQSWENQVGHRRIRPHKIATGTVKPTPQKQYHINPKAKPDIQIVINDLLKQGVLIQKESTMNTPVYPVPKPNGRWRMVLDYRAVNKVTPLIAVQNQHSYGILGSLFKGRYKTTIDLSNGFWAHPIVPEDYWITAFTWQGKQYCWTVLPQGFLNSPGLFNGDVVDLLQGIPNVEVYVDDVYISHDSEKEHLEYLDILFNRLKEAGYIISLKKSNIANSIVDFLGFQITNEGRGLTDTFKEKLENITAPTTLKQLQSILGLLNFARNFIPDFTELIAPLYALIPKSPKNYVPWQIEHSTTLETLITKLNGAEYLQGRKGDKTLIMKVNASYTTGYIRYYNEGEKKPISYVSIVFSKTELKFTELEKLLTTVHKGLLKALDLSMGQNIHVYSPIVSMQNIQKTPQTAKKALASRWLSWLSYLEDPRIRFFYDPQMPALKDLPAVDTGKDNKKHPSNFQHIFYTDGSAITSPTKEGHLNAGMGIVYFINKDGNLQKQQEWSISLGNHTAQFAEIAAFEFALKKCLPLGGNILVVTDSNYVAKAYNEELDVWASNGFVNNRKKPLKHISKWKSVADLKRLRPDVVVTHEPGHQKLDSSPHAYGNNLADQLATQASFKVHAGKRTADGSEFEKRTADGSEFESPKKKAKVE

SEQ ID NO: 1129 - protein, 2208 aa, synthetic construct
  source 1..2208: note = Description of Artificial Sequence: Synthetic polypeptide
MPAAKRVKLDGGDKKYSIGLDIGTNSVGWAVITDEYKVPSKKFKVLGNTDRHSIKKNLIGALLFDSGETAEATRLKRTARRRYTRRKNRICYLQEIFSNEMAKVDDSFFHRLEESFLVEEDKKHERHPIFGNIVDEVAYHEKYPTIYHLRKKLVDSTDKADLRLIYLALAHMIKFRGHFLIEGDLNPDNSDVDKLFIQLVQTYNQLFEENPINASGVDAKAILSARLSKSRRLENLIAQLPGEKKNGLFGNLIALSLGLTPNFKSNFDLAEDAKLQLSKDTYDDDLDNLLAQIGDQYADLFLAAKNLSDAILLSDILRVNTEITKAPLSASMIKRYDEHHQDLTLLKALVRQQLPEKYKEIFFDQSKNGYAGYIDGGASQEEFYKFIKPILEKMDGTEELLVKLNREDLLRKQRTFDNGSIPHQIHLGELHAILRRQEDFYPFLKDNREKIEKILTFRIPYYVGPLARGNSRFAWMTRKSEETITPWNFEEVVDKGASAQSFIERMTNFDKNLPNEKVLPKHSLLYEYFTVYNELTKVKYVTEGMRKPAFLSGEQKKAIVDLLFKTNRKVTVKQLKEDYFKKIECFDSVEISGVEDRFNASLGTYHDLLKIIKDKDFLDNEENEDILEDIVLTLTLFEDREMIEERLKTYAHLFDDKVMKQLKRRRYTGWGRLSRKLINGIRDKQSGKTILDFLKSDGFANRNFMQLIHDDSLTFKEDIQKAQVSGQGDSLHEHIANLAGSPAIKKGILQTVKVVDELVKVMGRHKPENIVIEMARENQTTQKGQKNSRERMKRIEEGIKELGSQILKEHPVENTQLQNEKLYLYYLQNGRDMYVDQELDINRLSDYDVDHIVPQSFLKDDSIDNKVLTRSDKARGKSDNVPSEEVVKKMKNYWRQLLNAKLITQRKFDNLTKAERGGLSELDKAGFIKRQLVETRQITKHVAQILDSRMNTKYDENDKLIREVKVITLKSKLVSDFRKDFQFYKVREINNYHHAHDAYLNAVVGTALIKKYPKLESEFVYGDYKVYDVRKMIAKSEQEIGKATAKYFFYSNIMNFFKTEITLANGEIRKRPLIETNGETGEIVWDKGRDFATVRKVLSMPQVNIVKKTEVQTGGFSKESILPKRNSDKLIARKKDWDPKKYGGFDSPTVAYSVLVVAKVEKGKSKKLKSVKELLGITIMERSSFEKNPIDFLEAKGYKEVKKDLIIKLPKYSLFELENGRKRMLASAGELQKGNELALPSKYVNFLYLASHYEKLKGSPEDNEQKQLFVEQHKHYLDEIIEQISEFSKRVILADANLDKVLSAYNKHRDKPIREQAENIIHLFTLTNLGAPAAFKYFDTTIDRKRYTSTKEVLDATLIHQSITGLYETRIDLSQLGGDGGAEAAAKEAAAKEAAAKEAAAKALEAEAAAKEAAAKEAAAKEAAAKAGGMDLLKPLTVERKGVKIKGYWNSQADITCVPKDLLQGEEPVRQQNVTTIHGTQEGDVYYVNLKIDGRRINTEVIGTTLDYAIITPGDVPWILKKPLELTIKLDLEEQQGTLLNNSILSKKGKEELKQLFEKYSALWQSWENQVGHRRIRPHKIATGTVKPTPQKQYHINPKAKPDIQIVINDLLKQGVLIQKESTMNTPVYPVPKPNGRWRMVLDYRAVNKVTPLIAVQNQHSYGILGSLFKGRYKTTIDLSNGFWAHPIVPEDYWITAFTWQGKQYCWTVLPQGFLNSPGLFNGDVVDLLQGIPNVEVYVDDVYISHDSEKEHLEYLDILFNRLKEAGYIISLKKSNIANSIVDFLGFQITNEGRGLTDTFKEKLENITAPTTLKQLQSILGKLNFARNFIPDFTELIAPLYALIPKSPKNYVPWQIEHSTTLETLITKLNGAEYLQGRKGDKTLIMKVNASYTTGYIRYYNEGEKKPISYVSIVFSKTELKFTELEKLLTTVHKGLLKALDLSMGQNIHVYSPIVSMQNIQKTPQTAKKALASRWLSWLSYLEDPRIRFFYDPQMPALKDLPAVDTGKDNKKHPSNFQHIFYTDGSAITSPTKEGHLNAGMGIVYFINKDGNLQKQQEWSISLGNHTAQFAEIAAFEFALKKCLPLGGNILVVTDSNYVAKAYNEELDVWASNGFVNNRKKPLKHISKWKSVADLKRLRPDVVVTHEPGHQKLDSSPHAYGNNLADQLATQASFKVHAGKRTADGSEFEKRTADGSEFESPKKKAKVE

SEQ ID NO: 1130 - protein, 2171 aa, synthetic construct
  source 1..2171: note = Description of Artificial Sequence: Synthetic polypeptide
MPAAKRVKLDGGDKKYSIGLDIGTNSVGWAVITDEYKVPSKKFKVLGNTDRHSIKKNLIGALLFDSGETAEATRLKRTARRRYTRRKNRICYLQEIFSNEMAKVDDSFFHRLEESFLVEEDKKHERHPIFGNIVDEVAYHEKYPTIYHLRKKLVDSTDKADLRLIYLALAHMIKFRGHFLIEGDLNPDNSDVDKLFIQLVQTYNQLFEENPINASGVDAKAILSARLSKSRRLENLIAQLPGEKKNGLFGNLIALSLGLTPNFKSNFDLAEDAKLQLSKDTYDDDLDNLLAQIGDQYADLFLAAKNLSDAILLSDILRVNTEITKAPLSASMIKRYDEHHQDLTLLKALVRQQLPEKYKEIFFDQSKNGYAGYIDGGASQEEFYKFIKPILEKMDGTEELLVKLNREDLLRKQRTFDNGSIPHQIHLGELHAILRRQEDFYPFLKDNREKIEKILTFRIPYYVGPLARGNSRFAWMTRKSEETITPWNFEEVVDKGASAQSFIERMTNFDKNLPNEKVLPKHSLLYEYFTVYNELTKVKYVTEGMRKPAFLSGEQKKAIVDLLFKTNRKVTVKQLKEDYFKKIECFDSVEISGVEDRFNASLGTYHDLLKIIKDKDFLDNEENEDILEDIVLTLTLFEDREMIEERLKTYAHLFDDKVMKQLKRRRYTGWGRLSRKLINGIRDKQSGKTILDFLKSDGFANRNFMQLIHDDSLTFKEDIQKAQVSGQGDSLHEHIANLAGSPAIKKGILQTVKVVDELVKVMGRHKPENIVIEMARENQTTQKGQKNSRERMKRIEEGIKELGSQILKEHPVENTQLQNEKLYLYYLQNGRDMYVDQELDINRLSDYDVDHIVPQSFLKDDSIDNKVLTRSDKARGKSDNVPSEEVVKKMKNYWRQLLNAKLITQRKFDNLTKAERGGLSELDKAGFIKRQLVETRQITKHVAQILDSRMNTKYDENDKLIREVKVITLKSKLVSDFRKDFQFYKVREINNYHHAHDAYLNAVVGTALIKKYPKLESEFVYGDYKVYDVRKMIAKSEQEIGKATAKYFFYSNIMNFFKTEITLANGEIRKRPLIETNGETGEIVWDKGRDFATVRKVLSMPQVNIVKKTEVQTGGFSKESILPKRNSDKLIARKKDWDPKKYGGFDSPTVAYSVLVVAKVEKGKSKKLKSVKELLGITIMERSSFEKNPIDFLEAKGYKEVKKDLIIKLPKYSLFELENGRKRMLASAGELQKGNELALPSKYVNFLYLASHYEKLKGSPEDNEQKQLFVEQHKHYLDEIIEQISEFSKRVILADANLDKVLSAYNKHRDKPIREQAENIIHLFTLTNLGAPAAFKYFDTTIDRKRYTSTKEVLDATLIHQSITGLYETRIDLSQLGGDGGGSSPAPGGSGGMDLLKPLTVERKGVKIKGYWNSQADITCVPKDLLQGEEPVRQQNVTTIHGTQEGDVYYVNLKIDGRRINTEVIGTTLDYAIITPGDVPWILKKPLELTIKLDLEEQQGTLLNNSILSKKGKEELKQLFEKYSALWQSWENQVGHRRIRPHKIATGTVKPTPQKQYHINPKAKPDIQIVINDLLKQGVLIQKESTMNTPVYPVPKPNGRWRMVLDYRAVNKVTPLIAVQNQHSYGILGSLFKGRYKTTIDLSNGFWAHPIVPEDYWITAFTWQGKQYCWTVLPQGFLNSPGLFNGDVVDLLQGIPNVEVYVDDVYISHDSEKEHLEYLDILFNRLKEAGYIISLKKSNIANSIVDFLGFQITNEGRGLTDTFKEKLENITAPTTLKQLQSILGKLNFARNFIPDFTELIAPLYALIPKSPKNYVPWQIEHSTTLETLITKLNGAEYLQGRKGDKTLIMKVNASYTTGYIRYYNEGEKKPISYVSIVFSKTELKFTELEKLLTTVHKGLLKALDLSMGQNIHVYSPIVSMQNIQKTPQTAKKALASRWLSWLSYLEDPRIRFFYDPQMPALKDLPAVDTGKDNKKHPSNFQHIFYTDGSAITSPTKEGHLNAGMGIVYFINKDGNLQKQQEWSISLGNHTAQFAEIAAFEFALKKCLPLGGNILVVTDSNYVAKAYNEELDVWASNGFVNNRKKPLKHISKWKSVADLKRLRPDVVVTHEPGHQKLDSSPHAYGNNLADQLATQASFKVHAGKRTADGSEFEKRTADGSEFESPKKKAKVE

SEQ ID NO: 1131 - protein, 2182 aa, synthetic construct
  source 1..2182: note = Description of Artificial Sequence: Synthetic polypeptide
MPAAKRVKLDGGDKKYSIGLDIGTNSVGWAVITDEYKVPSKKFKVLGNTDRHSIKKNLIGALLFDSGETAEATRLKRTARRRYTRRKNRICYLQEIFSNEMAKVDDSFFHRLEESFLVEEDKKHERHPIFGNIVDEVAYHEKYPTIYHLRKKLVDSTDKADLRLIYLALAHMIKFRGHFLIEGDLNPDNSDVDKLFIQLVQTYNQLFEENPINASGVDAKAILSARLSKSRRLENLIAQLPGEKKNGLFGNLIALSLGLTPNFKSNFDLAEDAKLQLSKDTYDDDLDNLLAQIGDQYADLFLAAKNLSDAILLSDILRVNTEITKAPLSASMIKRYDEHHQDLTLLKALVRQQLPEKYKEIFFDQSKNGYAGYIDGGASQEEFYKFIKPILEKMDGTEELLVKLNREDLLRKQRTFDNGSIPHQIHLGELHAILRRQEDFYPFLKDNREKIEKILTFRIPYYVGPLARGNSRFAWMTRKSEETITPWNFEEVVDKGASAQSFIERMTNFDKNLPNEKVLPKHSLLYEYFTVYNELTKVKYVTEGMRKPAFLSGEQKKAIVDLLFKTNRKVTVKQLKEDYFKKIECFDSVEISGVEDRFNASLGTYHDLLKIIKDKDFLDNEENEDILEDIVLTLTLFEDREMIEERLKTYAHLFDDKVMKQLKRRRYTGWGRLSRKLINGIRDKQSGKTILDFLKSDGFANRNFMQLIHDDSLTFKEDIQKAQVSGQGDSLHEHIANLAGSPAIKKGILQTVKVVDELVKVMGRHKPENIVIEMARENQTTQKGQKNSRERMKRIEEGIKELGSQILKEHPVENTQLQNEKLYLYYLQNGRDMYVDQELDINRLSDYDVDHIVPQSFLKDDSIDNKVLTRSDKARGKSDNVPSEEVVKKMKNYWRQLLNAKLITQRKFDNLTKAERGGLSELDKAGFIKRQLVETRQITKHVAQILDSRMNTKYDENDKLIREVKVITLKSKLVSDFRKDFQFYKVREINNYHHAHDAYLNAVVGTALIKKYPKLESEFVYGDYKVYDVRKMIAKSEQEIGKATAKYFFYSNIMNFFKTEITLANGEIRKRPLIETNGETGEIVWDKGRDFATVRKVLSMPQVNIVKKTEVQTGGFSKESILPKRNSDKLIARKKDWDPKKYGGFDSPTVAYSVLVVAKVEKGKSKKLKSVKELLGITIMERSSFEKNPIDFLEAKGYKEVKKDLIIKLPKYSLFELENGRKRMLASAGELQKGNELALPSKYVNFLYLASHYEKLKGSPEDNEQKQLFVEQHKHYLDEIIEQISEFSKRVILADANLDKVLSAYNKHRDKPIREQAENIIHLFTLTNLGAPAAFKYFDTTIDRKRYTSTKEVLDATLIHQSITGLYETRIDLSQLGGDGGGGGGSGGGGSGGGGSGGGGSGGMDLLKPLTVERKGVKIKGYWNSQADITCVPKDLLQGEEPVRQQNVTTIHGTQEGDVYYVNLKIDGRRINTEVIGTTLDYAIITPGDVPWILKKPLELTIKLDLEEQQGTLLNNSILSKKGKEELKQLFEKYSALWQSWENQVGHRRIRPHKIATGTVKPTPQKQYHINPKAKPDIQIVINDLLKQGVLIQKESTMNTPVYPVPKPNGRWRMVLDYRAVNKVTPLIAVQNQHSYGILGSLFKGRYKTTIDLSNGFWAHPIVPEDYWITAFTWQGKQYCWTVLPQGFLNSPGLFNGDVVDLLQGIPNVEVYVDDVYISHDSEKEHLEYLDILFNRLKEAGYIISLKKSNIANSIVDFLGFQITNEGRGLTDTFKEKLENITAPTTLKQLQSILGKLNFARNFIPDFTELIAPLYALIPKSPKNYVPWQIEHSTTLETLITKLNGAEYLQGRKGDKTLIMKVNASYTTGYIRYYNEGEKKPISYVSIVFSKTELKFTELEKLLTTVHKGLLKALDLSMGQNIHVYSPIVSMQNIQKTPQTAKKALASRWLSWLSYLEDPRIRFFYDPQMPALKDLPAVDTGKDNKKHPSNFQHIFYTDGSAITSPTKEGHLNAGMGIVYFINKDGNLQKQQEWSISLGNHTAQFAEIAAFEFALKKCLPLGGNILVVTDSNYVAKAYNEELDVWASNGFVNNRKKPLKHISKWKSVADLKRLRPDVVVTHEPGHQKLDSSPHAYGNNLADQLATQASFKVHAGKRTADGSEFEKRTADGSEFESPKKKAKVE

SEQ ID NO: 1132 - protein, 2167 aa, synthetic construct
  source 1..2167: note = Description of Artificial Sequence: Synthetic polypeptide
MPAAKRVKLDGGDKKYSIGLDIGTNSVGWAVITDEYKVPSKKFKVLGNTDRHSIKKNLIGALLFDSGETAEATRLKRTARRRYTRRKNRICYLQEIFSNEMAKVDDSFFHRLEESFLVEEDKKHERHPIFGNIVDEVAYHEKYPTIYHLRKKLVDSTDKADLRLIYLALAHMIKFRGHFLIEGDLNPDNSDVDKLFIQLVQTYNQLFEENPINASGVDAKAILSARLSKSRRLENLIAQLPGEKKNGLFGNLIALSLGLTPNFKSNFDLAEDAKLQLSKDTYDDDLDNLLAQIGDQYADLFLAAKNLSDAILLSDILRVNTEITKAPLSASMIKRYDEHHQDLTLLKALVRQQLPEKYKEIFFDQSKNGYAGYIDGGASQEEFYKFIKPILEKMDGTEELLVKLNREDLLRKQRTFDNGSIPHQIHLGELHAILRRQEDFYPFLKDNREKIEKILTFRIPYYVGPLARGNSRFAWMTRKSEETITPWNFEEVVDKGASAQSFIERMTNFDKNLPNEKVLPKHSLLYEYFTVYNELTKVKYVTEGMRKPAFLSGEQKKAIVDLLFKTNRKVTVKQLKEDYFKKIECFDSVEISGVEDRFNASLGTYHDLLKIIKDKDFLDNEENEDILEDIVLTLTLFEDREMIEERLKTYAHLFDDKVMKQLKRRRYTGWGRLSRKLINGIRDKQSGKTILDFLKSDGFANRNFMQLIHDDSLTFKEDIQKAQVSGQGDSLHEHIANLAGSPAIKKGILQTVKVVDELVKVMGRHKPENIVIEMARENQTTQKGQKNSRERMKRIEEGIKELGSQILKEHPVENTQLQNEKLYLYYLQNGRDMYVDQELDINRLSDYDVDHIVPQSFLKDDSIDNKVLTRSDKARGKSDNVPSEEVVKKMKNYWRQLLNAKLITQRKFDNLTKAERGGLSELDKAGFIKRQLVETRQITKHVAQILDSRMNTKYDENDKLIREVKVITLKSKLVSDFRKDFQFYKVREINNYHHAHDAYLNAVVGTALIKKYPKLESEFVYGDYKVYDVRKMIAKSEQEIGKATAKYFFYSNIMNFFKTEITLANGEIRKRPLIETNGETGEIVWDKGRDFATVRKVLSMPQVNIVKKTEVQTGGFSKESILPKRNSDKLIARKKDWDPKKYGGFDSPTVAYSVLVVAKVEKGKSKKLKSVKELLGITIMERSSFEKNPIDFLEAKGYKEVKKDLIIKLPKYSLFELENGRKRMLASAGELQKGNELALPSKYVNFLYLASHYEKLKGSPEDNEQKQLFVEQHKHYLDEIIEQISEFSKRVILADANLDKVLSAYNKHRDKPIREQAENIIHLFTLTNLGAPAAFKYFDTTIDRKRYTSTKEVLDATLIHQSITGLYETRIDLSQLGGDGGEAAAKGGMDLLKPLTVERKGVKIKGYWNSQADITCVPKDLLQGEEPVRQQNVTTIHGTQEGDVYYVNLKIDGRRINTEVIGTTLDYAIITPGDVPWILKKPLELTIKLDLEEQQGTLLNNSILSKKGKEELKQLFEKYSALWQSWENQVGHRRIRPHKIATGTVKPTPQKQYHINPKAKPDIQIVINDLLKQGVLIQKESTMNTPVYPVPKPNGRWRMVLDYRAVNKVTPLIAVQNQHSYGILGSLFKGRYKTTIDLSNGFWAHPIVPEDYWITAFTWQGKQYCWTVLPQGFLNSPGLFNGDVVDLLQGIPNVEVYVDDVYISHDSEKEHLEYLDILFNRLKEAGYIISLKKSNIANSIVDFLGFQITNEGRGLTDTFKEKLENITAPTTLKQLQSILGKLNFARNFIPDFTELIAPLYALIPKSPKNYVPWQIEHSTTLETLITKLNGAEYLQGRKGDKTLIMKVNASYTTGYIRYYNEGEKKPISYVSIVFSKTELKFTELEKLLTTVHKGLLKALDLSMGQNIHVYSPIVSMQNIQKTPQTAKKALASRWLSWLSYLEDPRIRFFYDPQMPALKDLPAVDTGKDNKKHPSNFQHIFYTDGSAITSPTKEGHLNAGMGIVYFINKDGNLQKQQEWSISLGNHTAQFAEIAAFEFALKKCLPLGGNILVVTDSNYVAKAYNEELDVWASNGFVNNRKKPLKHISKWKSVADLKRLRPDVVVTHEPGHQKLDSSPHAYGNNLADQLATQASFKVHAGKRTADGSEFEKRTADGSEFESPKKKAKVE

SEQ ID NO: 1133 - protein, 2174 aa, synthetic construct
  source 1..2174: note = Description of Artificial Sequence: Synthetic polypeptide
MPAAKRVKLDGGDKKYSIGLDIGTNSVGWAVITDEYKVPSKKFKVLGNTDRHSIKKNLIGALLFDSGETAEATRLKRTARRRYTRRKNRICYLQEIFSNEMAKVDDSFFHRLEESFLVEEDKKHERHPIFGNIVDEVAYHEKYPTIYHLRKKLVDSTDKADLRLIYLALAHMIKFRGHFLIEGDLNPDNSDVDKLFIQLVQTYNQLFEENPINASGVDAKAILSARLSKSRRLENLIAQLPGEKKNGLFGNLIALSLGLTPNFKSNFDLAEDAKLQLSKDTYDDDLDNLLAQIGDQYADLFLAAKNLSDAILLSDILRVNTEITKAPLSASMIKRYDEHHQDLTLLKALVRQQLPEKYKEIFFDQSKNGYAGYIDGGASQEEFYKFIKPILEKMDGTEELLVKLNREDLLRKQRTFDNGSIPHQIHLGELHAILRRQEDFYPFLKDNREKIEKILTFRIPYYVGPLARGNSRFAWMTRKSEETITPWNFEEVVDKGASAQSFIERMTNFDKNLPNEKVLPKHSLLYEYFTVYNELTKVKYVTEGMRKPAFLSGEQKKAIVDLLFKTNRKVTVKQLKEDYFKKIECFDSVEISGVEDRFNASLGTYHDLLKIIKDKDFLDNEENEDILEDIVLTLTLFEDREMIEERLKTYAHLFDDKVMKQLKRRRYTGWGRLSRKLINGIRDKQSGKTILDFLKSDGFANRNFMQLIHDDSLTFKEDIQKAQVSGQGDSLHEHIANLAGSPAIKKGILQTVKVVDELVKVMGRHKPENIVIEMARENQTTQKGQKNSRERMKRIEEGIKELGSQILKEHPVENTQLQNEKLYLYYLQNGRDMYVDQELDINRLSDYDVDHIVPQSFLKDDSIDNKVLTRSDKARGKSDNVPSEEVVKKMKNYWRQLLNAKLITQRKFDNLTKAERGGLSELDKAGFIKRQLVETRQITKHVAQILDSRMNTKYDENDKLIREVKVITLKSKLVSDFRKDFQFYKVREINNYHHAHDAYLNAVVGTALIKKYPKLESEFVYGDYKVYDVRKMIAKSEQEIGKATAKYFFYSNIMNFFKTEITLANGEIRKRPLIETNGETGEIVWDKGRDFATVRKVLSMPQVNIVKKTEVQTGGFSKESILPKRNSDKLIARKKDWDPKKYGGFDSPTVAYSVLVVAKVEKGKSKKLKSVKELLGITIMERSSFEKNPIDFLEAKGYKEVKKDLIIKLPKYSLFELENGRKRMLASAGELQKGNELALPSKYVNFLYLASHYEKLKGSPEDNEQKQLFVEQHKHYLDEIIEQISEFSKRVILADANLDKVLSAYNKHRDKPIREQAENIIHLFTLTNLGAPAAFKYFDTTIDRKRYTSTKEVLDATLIHQSITGLYETRIDLSQLGGDGGGSAGSAAGSGEFGGMDLLKPLTVERKGVKIKGYWNSQADITCVPKDLLQGEEPVRQQNVTTIHGTQEGDVYYVNLKIDGRRINTEVIGTTLDYAIITPGDVPWILKKPLELTIKLDLEEQQGTLLNNSILSKKGKEELKQLFEKYSALWQSWENQVGHRRIRPHKIATGTVKPTPQKQYHINPKAKPDIQIVINDLLKQGVLIQKESTMNTPVYPVPKPNGRWRMVLDYRAVNKVTPLIAVQNQHSYGILGSLFKGRYKTTIDLSNGFWAHPIVPEDYWITAFTWQGKQYCWTVLPQGFLNSPGLFNGDVVDLLQGIPNVEVYVDDVYISHDSEKEHLEYLDILFNRLKEAGYIISLKKSNIANSIVDFLGFQITNEGRGLTDTFKEKLENITAPTTLKQLQSILGKLNFARNFIPDFTELIAPLYALIPKSPKNYVPWQIEHSTTLETLITKLNGAEYLQGRKGDKTLIMKVNASYTTGYIRYYNEGEKKPISYVSIVFSKTELKFTELEKLLTTVHKGLLKALDLSMGQNIHVYSPIVSMQNIQKTPQTAKKALASRWLSWLSYLEDPRIRFFYDPQMPALKDLPAVDTGKDNKKHPSNFQHIFYTDGSAITSPTKEGHLNAGMGIVYFINKDGNLQKQQEWSISLGNHTAQFAEIAAFEFALKKCLPLGGNILVVTDSNYVAKAYNEELDVWASNGFVNNRKKPLKHISKWKSVADLKRLRPDVVVTHEPGHQKLDSSPHAYGNNLADQLATQASFKVHAGKRTADGSEFEKRTADGSEFESPKKKAKVE

SEQ ID NO: 1134 - protein, 2109 aa, synthetic construct
  source 1..2109: note = Description of Artificial Sequence: Synthetic polypeptide
MPAAKRVKLDGGDKKYSIGLDIGTNSVGWAVITDEYKVPSKKFKVLGNTDRHSIKKNLIGALLFDSGETAEATRLKRTARRRYTRRKNRICYLQEIFSNEMAKVDDSFFHRLEESFLVEEDKKHERHPIFGNIVDEVAYHEKYPTIYHLRKKLVDSTDKADLRLIYLALAHMIKFRGHFLIEGDLNPDNSDVDKLFIQLVQTYNQLFEENPINASGVDAKAILSARLSKSRRLENLIAQLPGEKKNGLFGNLIALSLGLTPNFKSNFDLAEDAKLQLSKDTYDDDLDNLLAQIGDQYADLFLAAKNLSDAILLSDILRVNTEITKAPLSASMIKRYDEHHQDLTLLKALVRQQLPEKYKEIFFDQSKNGYAGYIDGGASQEEFYKFIKPILEKMDGTEELLVKLNREDLLRKQRTFDNGSIPHQIHLGELHAILRRQEDFYPFLKDNREKIEKILTFRIPYYVGPLARGNSRFAWMTRKSEETITPWNFEEVVDKGASAQSFIERMTNFDKNLPNEKVLPKHSLLYEYFTVYNELTKVKYVTEGMRKPAFLSGEQKKAIVDLLFKTNRKVTVKQLKEDYFKKIECFDSVEISGVEDRFNASLGTYHDLLKIIKDKDFLDNEENEDILEDIVLTLTLFEDREMIEERLKTYAHLFDDKVMKQLKRRRYTGWGRLSRKLINGIRDKQSGKTILDFLKSDGFANRNFMQLIHDDSLTFKEDIQKAQVSGQGDSLHEHIANLAGSPAIKKGILQTVKVVDELVKVMGRHKPENIVIEMARENQTTQKGQKNSRERMKRIEEGIKELGSQILKEHPVENTQLQNEKLYLYYLQNGRDMYVDQELDINRLSDYDVDHIVPQSFLKDDSIDNKVLTRSDKARGKSDNVPSEEVVKKMKNYWRQLLNAKLITQRKFDNLTKAERGGLSELDKAGFIKRQLVETRQITKHVAQILDSRMNTKYDENDKLIREVKVITLKSKLVSDFRKDFQFYKVREINNYHHAHDAYLNAVVGTALIKKYPKLESEFVYGDYKVYDVRKMIAKSEQEIGKATAKYFFYSNIMNFFKTEITLANGEIRKRPLIETNGETGEIVWDKGRDFATVRKVLSMPQVNIVKKTEVQTGGFSKESILPKRNSDKLIARKKDWDPKKYGGFDSPTVAYSVLVVAKVEKGKSKKLKSVKELLGITIMERSSFEKNPIDFLEAKGYKEVKKDLIIKLPKYSLFELENGRKRMLASAGELQKGNELALPSKYVNFLYLASHYEKLKGSPEDNEQKQLFVEQHKHYLDEIIEQISEFSKRVILADANLDKVLSAYNKHRDKPIREQAENIIHLFTLTNLGAPAAFKYFDTTIDRKRYTSTKEVLDATLIHQSITGLYETRIDLSQLGGDGGEAAAKEAAAKEAAAKEAAAKEAAAKGGTLQLEEEYRLFEPESTQKQEMDIWLKNFPQAWAETGGMGTAHCQAPVLIQLKATATPISIRQYPMPHEAYQGIKPHIRRMLDQGILKPCQSPWNTPLLPVKKPGTEDYRPVQDLREVNKRVEDIHPTVPNPYNLLSTLPPSHPWYTVLDLKDAFFCLRLHSESQLLFAFEWRDPEIGLSGQLTWTRLPQGFKNSPTLFDEALHSDLADFRVRYPALVLLQYVDDLLLAAATRTECLEGTKALLETLGNKGYRASAKKAQICLQEVTYLGYSLKDGQRWLTKARKEAILSIPVPKNSRQVREFLGTAGYCRLWIPGFAELAAPLYPLTRPGTLFQWGTEQQLAFEDIKKALLSSPALGLPDITKPFELFIDENSGFAKGVLVQKLGPWKRPVAYLSKKLDTVASGWPPCLRMVAAIAILVKDAGKLTLGQPLTILTSHPVEALVRQPPNKWLSNARMTHYQAMLLDAERVHFGPTVSLNPATLLPLPSGGNHHDCLQILAETHGTRPDLTDQPLPDADLTWYTDGSSFIRNGEREAGAAVTTESEVIWAAPLPPGTSAQRAELIALTQALKMAEGKKLTVYTDSRYAFATTHVHGEIYRRRGLLTSEGKEIKNKNEILALLEALFLPKRLSIIHCPGHQKGDSPQAKGNRLADDTAKKAATETHSSLTVLPAGKRTADGSEFEKRTADGSEFESPKKKAKVE

SEQ ID NO: 1135 - protein, 2095 aa, synthetic construct
  source 1..2095: note = Description of Artificial Sequence: Synthetic polypeptide
MPAAKRVKLDGGDKKYSIGLDIGTNSVGWAVITDEYKVPSKKFKVLGNTDRHSIKKNLIGALLFDSGETAEATRLKRTARRRYTRRKNRICYLQEIFSNEMAKVDDSFFHRLEESFLVEEDKKHERHPIFGNIVDEVAYHEKYPTIYHLRKKLVDSTDKADLRLIYLALAHMIKFRGHFLIEGDLNPDNSDVDKLFIQLVQTYNQLFEENPINASGVDAKAILSARLSKSRRLENLIAQLPGEKKNGLFGNLIALSLGLTPNFKSNFDLAEDAKLQLSKDTYDDDLDNLLAQIGDQYADLFLAAKNLSDAILLSDILRVNTEITKAPLSASMIKRYDEHHQDLTLLKALVRQQLPEKYKEIFFDQSKNGYAGYIDGGASQEEFYKFIKPILEKMDGTEELLVKLNREDLLRKQRTFDNGSIPHQIHLGELHAILRRQEDFYPFLKDNREKIEKILTFRIPYYVGPLARGNSRFAWMTRKSEETITPWNFEEVVDKGASAQSFIERMTNFDKNLPNEKVLPKHSLLYEYFTVYNELTKVKYVTEGMRKPAFLSGEQKKAIVDLLFKTNRKVTVKQLKEDYFKKIECFDSVEISGVEDRFNASLGTYHDLLKIIKDKDFLDNEENEDILEDIVLTLTLFEDREMIEERLKTYAHLFDDKVMKQLKRRRYTGWGRLSRKLINGIRDKQSGKTILDFLKSDGFANRNFMQLIHDDSLTFKEDIQKAQVSGQGDSLHEHIANLAGSPAIKKGILQTVKVVDELVKVMGRHKPENIVIEMARENQTTQKGQKNSRERMKRIEEGIKELGSQILKEHPVENTQLQNEKLYLYYLQNGRDMYVDQELDINRLSDYDVDHIVPQSFLKDDSIDNKVLTRSDKARGKSDNVPSEEVVKKMKNYWRQLLNAKLITQRKFDNLTKAERGGLSELDKAGFIKRQLVETRQITKHVAQILDSRMNTKYDENDKLIREVKVITLKSKLVSDFRKDFQFYKVREINNYHHAHDAYLNAVVGTALIKKYPKLESEFVYGDYKVYDVRKMIAKSEQEIGKATAKYFFYSNIMNFFKTEITLANGEIRKRPLIETNGETGEIVWDKGRDFATVRKVLSMPQVNIVKKTEVQTGGFSKESILPKRNSDKLIARKKDWDPKKYGGFDSPTVAYSVLVVAKVEKGKSKKLKSVKELLGITIMERSSFEKNPIDFLEAKGYKEVKKDLIIKLPKYSLFELENGRKRMLASAGELQKGNELALPSKYVNFLYLASHYEKLKGSPEDNEQKQLFVEQHKHYLDEIIEQISEFSKRVILADANLDKVLSAYNKHRDKPIREQAENIIHLFTLTNLGAPAAFKYFDTTIDRKRYTSTKEVLDATLIHQSITGLYETRIDLSQLGGDGGGGSEAAAKPAPGGTLQLEEEYRLFEPESTQKQEMDIWLKNFPQAWAETGGMGTAHCQAPVLIQLKATATPISIRQYPMPHEAYQGIKPHIRRMLDQGILKPCQSPWNTPLLPVKKPGTEDYRPVQDLREVNKRVEDIHPTVPNPYNLLSTLPPSHPWYTVLDLKDAFFCLRLHSESQLLFAFEWRDPEIGLSGQLTWTRLPQGFKNSPTLFDEALHSDLADFRVRYPALVLLQYVDDLLLAAATRTECLEGTKALLETLGNKGYRASAKKAQICLQEVTYLGYSLKDGQRWLTKARKEAILSIPVPKNSRQVREFLGTAGYCRLWIPGFAELAAPLYPLTRPGTLFQWGTEQQLAFEDIKKALLSSPALGLPDITKPFELFIDENSGFAKGVLVQKLGPWKRPVAYLSKKLDTVASGWPPCLRMVAAIAILVKDAGKLTLGQPLTILTSHPVEALVRQPPNKWLSNARMTHYQAMLLDAERVHFGPTVSLNPATLLPLPSGGNHHDCLQILAETHGTRPDLTDQPLPDADLTWYTDGSSFIRNGEREAGAAVTTESEVIWAAPLPPGTSAQRAELIALTQALKMAEGKKLTVYTDSRYAFATTHVHGEIYRRRGLLTSEGKEIKNKNEILALLEALFLPKRLSIIHCPGHQKGDSPQAKGNRLADDTAKKAATETHSSLTVLPAGKRTADGSEFEKRTADGSEFESPKKKAKVE

SEQ ID NO: 1136 - protein, 2093 aa, synthetic construct
  source 1..2093: note = Description of Artificial Sequence: Synthetic polypeptide
MPAAKRVKLDGGDKKYSIGLDIGTNSVGWAVITDEYKVPSKKFKVLGNTDRHSIKKNLIGALLFDSGETAEATRLKRTARRRYTRRKNRICYLQEIFSNEMAKVDDSFFHRLEESFLVEEDKKHERHPIFGNIVDEVAYHEKYPTIYHLRKKLVDSTDKADLRLIYLALAHMIKFRGHFLIEGDLNPDNSDVDKLFIQLVQTYNQLFEENPINASGVDAKAILSARLSKSRRLENLIAQLPGEKKNGLFGNLIALSLGLTPNFKSNFDLAEDAKLQLSKDTYDDDLDNLLAQIGDQYADLFLAAKNLSDAILLSDILRVNTEITKAPLSASMIKRYDEHHQDLTLLKALVRQQLPEKYKEIFFDQSKNGYAGYIDGGASQEEFYKFIKPILEKMDGTEELLVKLNREDLLRKQRTFDNGSIPHQIHLGELHAILRRQEDFYPFLKDNREKIEKILTFRIPYYVGPLARGNSRFAWMTRKSEETITPWNFEEVVDKGASAQSFIERMTNFDKNLPNEKVLPKHSLLYEYFTVYNELTKVKYVTEGMRKPAFLSGEQKKAIVDLLFKTNRKVTVKQLKEDYFKKIECFDSVEISGVEDRFNASLGTYHDLLKIIKDKDFLDNEENEDILEDIVLTLTLFEDREMIEERLKTYAHLFDDKVMKQLKRRRYTGWGRLSRKLINGIRDKQSGKTILDFLKSDGFANRNFMQLIHDDSLTFKEDIQKAQVSGQGDSLHEHIANLAGSPAIKKGILQTVKVVDELVKVMGRHKPENIVIEMARENQTTQKGQKNSRERMKRIEEGIKELGSQILKEHPVENTQLQNEKLYLYYLQNGRDMYVDQELDINRLSDYDVDHIVPQSFLKDDSIDNKVLTRSDKARGKSDNVPSEEVVKKMKNYWRQLLNAKLITQRKFDNLTKAERGGLSELDKAGFIKRQLVETRQITKHVAQILDSRMNTKYDENDKLIREVKVITLKSKLVSDFRKDFQFYKVREINNYHHAHDAYLNAVVGTALIKKYPKLESEFVYGDYKVYDVRKMIAKSEQEIGKATAKYFFYSNIMNFFKTEITLANGEIRKRPLIETNGETGEIVWDKGRDFATVRKVLSMPQVNIVKKTEVQTGGFSKESILPKRNSDKLIARKKDWDPKKYGGFDSPTVAYSVLVVAKVEKGKSKKLKSVKELLGITIMERSSFEKNPIDFLEAKGYKEVKKDLIIKLPKYSLFELENGRKRMLASAGELQKGNELALPSKYVNFLYLASHYEKLKGSPEDNEQKQLFVEQHKHYLDEIIEQISEFSKRVILADANLDKVLSAYNKHRDKPIREQAENIIHLFTLTNLGAPAAFKYFDTTIDRKRYTSTKEVLDATLIHQSITGLYETRIDLSQLGGDGGPAPGSSGGGGGTLQLEEEYRLFEPESTQKQEMDIWLKNFPQAWAETGGMGTAHCQAPVLIQLKATATPISIRQYPMPHEAYQGIKPHIRRMLDQGILKPCQSPWNTPLLPVKKPGTEDYRPVQDLREVNKRVEDIHPTVPNPYNLLSTLPPSHPWYTVLDLKDAFFCLRLHSESQLLFAFEWRDPEIGLSGQLTWTRLPQGFKNSPTLFDEALHSDLADFRVRYPALVLLQYVDDLLLAAATRTECLEGTKALLETLGNKGYRASAKKAQICLQEVTYLGYSLKDGQRWLTKARKEAILSIPVPKNSRQVREFLGTAGYCRLWIPGFAELAAPLYPLTRPGTLFQWGTEQQLAFEDIKKALLSSPALGLPDITKPFELFIDENSGFAKGVLVQKLGPWKRPVAYLSKKLDTVASGWPPCLRMVAAIAILVKDAGKLTLGQPLTILTSHPVEALVRQPPNKWLSNARMTHYQAMLLDAERVHFGPTVSLNPATLLPLPSGGNHHDCLQILAETHGTRPDLTDQPLPDADLTWYTDGSSFIRNGEREAGAAVTTESEVIWAAPLPPGTSAQRAELIALTQALKMAEGKKLTVYTDSRYAFATTHVHGEIYRRRGLLTSEGKEIKNKNEILALLEALFLPKRLSIIHCPGHQKGDSPQAKGNRLADDTAKKAATETHSSLTVLPAGKRTADGSEFEKRTADGSEFESPKKKAKVE

SEQ ID NO: 1137 - protein, 2107 aa, synthetic construct
  source 1..2107: note = Description of Artificial Sequence: Synthetic polypeptide
MPAAKRVKLDGGDKKYSIGLDIGTNSVGWAVITDEYKVPSKKFKVLGNTDRHSIKKNLIGALLFDSGETAEATRLKRTARRRYTRRKNRICYLQEIFSNEMAKVDDSFFHRLEESFLVEEDKKHERHPIFGNIVDEVAYHEKYPTIYHLRKKLVDSTDKADLRLIYLALAHMIKFRGHFLIEGDLNPDNSDVDKLFIQLVQTYNQLFEENPINASGVDAKAILSARLSKSRRLENLIAQLPGEKKNGLFGNLIALSLGLTPNFKSNFDLAEDAKLQLSKDTYDDDLDNLLAQIGDQYADLFLAAKNLSDAILLSDILRVNTEITKAPLSASMIKRYDEHHQDLTLLKALVRQQLPEKYKEIFFDQSKNGYAGYIDGGASQEEFYKFIKPILEKMDGTEELLVKLNREDLLRKQRTFDNGSIPHQIHLGELHAILRRQEDFYPFLKDNREKIEKILTFRIPYYVGPLARGNSRFAWMTRKSEETITPWNFEEVVDKGASAQSFIERMTNFDKNLPNEKVLPKHSLLYEYFTVYNELTKVKYVTEGMRKPAFLSGEQKKAIVDLLFKTNRKVTVKQLKEDYFKKIECFDSVEISGVEDRFNASLGTYHDLLKIIKDKDFLDNEENEDILEDIVLTLTLFEDREMIEERLKTYAHLFDDKVMKQLKRRRYTGWGRLSRKLINGIRDKQSGKTILDFLKSDGFANRNFMQLIHDDSLTFKEDIQKAQVSGQGDSLHEHIANLAGSPAIKKGILQTVKVVDELVKVMGRHKPENIVIEMARENQTTQKGQKNSRERMKRIEEGIKELGSQILKEHPVENTQLQNEKLYLYYLQNGRDMYVDQELDINRLSDYDVDHIVPQSFLKDDSIDNKVLTRSDKARGKSDNVPSEEVVKKMKNYWRQLLNAKLITQRKFDNLTKAERGGLSELDKAGFIKRQLVETRQITKHVAQILDSRMNTKYDENDKLIREVKVITLKSKLVSDFRKDFQFYKVREINNYHHAHDAYLNAVVGTALIKKYPKLESEFVYGDYKVYDVRKMIAKSEQEIGKATAKYFFYSNIMNFFKTEITLANGEIRKRPLIETNGETGEIVWDKGRDFATVRKVLSMPQVNIVKKTEVQTGGFSKESILPKRNSDKLIARKKDWDPKKYGGFDSPTVAYSVLVVAKVEKGKSKKLKSVKELLGITIMERSSFEKNPIDFLEAKGYKEVKKDLIIKLPKYSLFELENGRKRMLASAGELQKGNELALPSKYVNFLYLASHYEKLKGSPEDNEQKQLFVEQHKHYLDEIIEQISEFSKRVILADANLDKVLSAYNKHRDKPIREQAENIIHLFTLTNLGAPAAFKYFDTTIDRKRYTSTKEVLDATLIHQSITGLYETRIDLSQLGGDGGEAAAKEAAAKEAAAKEAAAKGGTAPLEEEYRLFLEAPIQNVTLLEQWKREIPKVWAEINPPGLASTQAPIHVQLLSTALPVRVRQYPITLEAKRSLRETIRKFRAAGILRPVHSPWNTPLLPVRKSGTSEYRMVQDLREVNKRVETIHPTVPNPYTLLSLLPPDRIWYSVLDLKDAFFCIPLAPESQLIFAFEWADAEEGESGQLTWTRLPQGFKNSPTLFNEALNRDLQGFRLDHPSVSLLQYVDDLLIAADTQAACLSATRDLLMTLAELGYRVSGKKAQLCQEEVTYLGFKIHKGSRSLSNSRTQAILQIPVPKTKRQVREFLGTIGYCRLWIPGFAELAQPLYAATRPGNDPLVWGEKEEEAFQSLKLALTQPPALALPSLDKPFQLFVEETSGAAKGVLTQALGPWKRPVAYLSKRLDPVAAGWPRCLRAIAAAALLTREASKLTFGQDIEITSSHNLESLLRSPPDKWLTNARITQYQVLLLDPPRVRFKQTAALNPATLLPETDDTLPIHHCLDTLDSLTSTRPDLTDQPLAQAEATLFTDGSSYIRDGKRYAGAAVVTLDSVIWAEPLPIGTSAQKAELIALTKALEWSKDKSVNIYTDSRYAFATLHVHGMIYRERGWLTAGGKAIKNAPEILALLTAVWLPKRVAVMHCKGHQKDDAPTSTGNRRADEVAREVAIRPLSTQATISAGKRTADGSEFEKRTADGSEFESPKKKAKVE

SEQ ID NO: 1138 - protein, 2100 aa, synthetic construct
  source 1..2100: note = Description of Artificial Sequence: Synthetic polypeptide
MPAAKRVKLDGGDKKYSIGLDIGTNSVGWAVITDEYKVPSKKFKVLGNTDRHSIKKNLIGALLFDSGETAEATRLKRTARRRYTRRKNRICYLQEIFSNEMAKVDDSFFHRLEESFLVEEDKKHERHPIFGNIVDEVAYHEKYPTIYHLRKKLVDSTDKADLRLIYLALAHMIKFRGHFLIEGDLNPDNSDVDKLFIQLVQTYNQLFEENPINASGVDAKAILSARLSKSRRLENLIAQLPGEKKNGLFGNLIALSLGLTPNFKSNFDLAEDAKLQLSKDTYDDDLDNLLAQIGDQYADLFLAAKNLSDAILLSDILRVNTEITKAPLSASMIKRYDEHHQDLTLLKALVRQQLPEKYKEIFFDQSKNGYAGYIDGGASQEEFYKFIKPILEKMDGTEELLVKLNREDLLRKQRTFDNGSIPHQIHLGELHAILRRQEDFYPFLKDNREKIEKILTFRIPYYVGPLARGNSRFAWMTRKSEETITPWNFEEVVDKGASAQSFIERMTNFDKNLPNEKVLPKHSLLYEYFTVYNELTKVKYVTEGMRKPAFLSGEQKKAIVDLLFKTNRKVTVKQLKEDYFKKIECFDSVEISGVEDRFNASLGTYHDLLKIIKDKDFLDNEENEDILEDIVLTLTLFEDREMIEERLKTYAHLFDDKVMKQLKRRRYTGWGRLSRKLINGIRDKQSGKTILDFLKSDGFANRNFMQLIHDDSLTFKEDIQKAQVSGQGDSLHEHIANLAGSPAIKKGILQTVKVVDELVKVMGRHKPENIVIEMARENQTTQKGQKNSRERMKRIEEGIKELGSQILKEHPVENTQLQNEKLYLYYLQNGRDMYVDQELDINRLSDYDVDHIVPQSFLKDDSIDNKVLTRSDKARGKSDNVPSEEVVKKMKNYWRQLLNAKLITQRKFDNLTKAERGGLSELDKAGFIKRQLVETRQITKHVAQILDSRMNTKYDENDKLIREVKVITLKSKLVSDFRKDFQFYKVREINNYHHAHDAYLNAVVGTALIKKYPKLESEFVYGDYKVYDVRKMIAKSEQEIGKATAKYFFYSNIMNFFKTEITLANGEIRKRPLIETNGETGEIVWDKGRDFATVRKVLSMPQVNIVKKTEVQTGGFSKESILPKRNSDKLIARKKDWDPKKYGGFDSPTVAYSVLVVAKVEKGKSKKLKSVKELLGITIMERSSFEKNPIDFLEAKGYKEVKKDLIIKLPKYSLFELENGRKRMLASAGELQKGNELALPSKYVNFLYLASHYEKLKGSPEDNEQKQLFVEQHKHYLDEIIEQISEFSKRVILADANLDKVLSAYNKHRDKPIREQAENIIHLFTLTNLGAPAAFKYFDTTIDRKRYTSTKEVLDATLIHQSITGLYETRIDLSQLGGDGGPAPAPAPAPAPAPGGTAPLEEEYRLFLEAPIQNVTLLEQWKREIPKVWAEINPPGLASTQAPIHVQLLSTALPVRVRQYPITLEAKRSLRETIRKFRAAGILRPVHSPWNTPLLPVRKSGTSEYRMVQDLREVNKRVETIHPTVPNPYTLLSLLPPDRIWYSVLDLKDAFFCIPLAPESQLIFAFEWADAEEGESGQLTWTRLPQGFKNSPTLFNEALNRDLQGFRLDHPSVSLLQYVDDLLIAADTQAACLSATRDLLMTLAELGYRVSGKKAQLCQEEVTYLGFKIHKGSRSLSNSRTQAILQIPVPKTKRQVREFLGTIGYCRLWIPGFAELAQPLYAATRPGNDPLVWGEKEEEAFQSLKLALTQPPALALPSLDKPFQLFVEETSGAAKGVLTQALGPWKRPVAYLSKRLDPVAAGWPRCLRAIAAAALLTREASKLTFGQDIEITSSHNLESLLRSPPDKWLTNARITQYQVLLLDPPRVRFKQTAALNPATLLPETDDTLPIHHCLDTLDSLTSTRPDLTDQPLAQAEATLFTDGSSYIRDGKRYAGAAVVTLDSVIWAEPLPIGTSAQKAELIALTKALEWSKDKSVNIYTDSRYAFATLHVHGMIYRERGWLTAGGKAIKNAPEILALLTAVWLPKRVAVMHCKGHQKDDAPTSTGNRRADEVAREVAIRPLSTQATISAGKRTADGSEFEKRTADGSEFESPKKKAKVE

SEQ ID NO: 1139 - protein, 2098 aa, synthetic construct
  source 1..2098: note = Description of Artificial Sequence: Synthetic polypeptide
MPAAKRVKLDGGDKKYSIGLDIGTNSVGWAVITDEYKVPSKKFKVLGNTDRHSIKKNLIGALLFDSGETAEATRLKRTARRRYTRRKNRICYLQEIFSNEMAKVDDSFFHRLEESFLVEEDKKHERHPIFGNIVDEVAYHEKYPTIYHLRKKLVDSTDKADLRLIYLALAHMIKFRGHFLIEGDLNPDNSDVDKLFIQLVQTYNQLFEENPINASGVDAKAILSARLSKSRRLENLIAQLPGEKKNGLFGNLIALSLGLTPNFKSNFDLAEDAKLQLSKDTYDDDLDNLLAQIGDQYADLFLAAKNLSDAILLSDILRVNTEITKAPLSASMIKRYDEHHQDLTLLKALVRQQLPEKYKEIFFDQSKNGYAGYIDGGASQEEFYKFIKPILEKMDGTEELLVKLNREDLLRKQRTFDNGSIPHQIHLGELHAILRRQEDFYPFLKDNREKIEKILTFRIPYYVGPLARGNSRFAWMTRKSEETITPWNFEEVVDKGASAQSFIERMTNFDKNLPNEKVLPKHSLLYEYFTVYNELTKVKYVTEGMRKPAFLSGEQKKAIVDLLFKTNRKVTVKQLKEDYFKKIECFDSVEISGVEDRFNASLGTYHDLLKIIKDKDFLDNEENEDILEDIVLTLTLFEDREMIEERLKTYAHLFDDKVMKQLKRRRYTGWGRLSRKLINGIRDKQSGKTILDFLKSDGFANRNFMQLIHDDSLTFKEDIQKAQVSGQGDSLHEHIANLAGSPAIKKGILQTVKVVDELVKVMGRHKPENIVIEMARENQTTQKGQKNSRERMKRIEEGIKELGSQILKEHPVENTQLQNEKLYLYYLQNGRDMYVDQELDINRLSDYDVDHIVPQSFLKDDSIDNKVLTRSDKARGKSDNVPSEEVVKKMKNYWRQLLNAKLITQRKFDNLTKAERGGLSELDKAGFIKRQLVETRQITKHVAQILDSRMNTKYDENDKLIREVKVITLKSKLVSDFRKDFQFYKVREINNYHHAHDAYLNAVVGTALIKKYPKLESEFVYGDYKVYDVRKMIAKSEQEIGKATAKYFFYSNIMNFFKTEITLANGEIRKRPLIETNGETGEIVWDKGRDFATVRKVLSMPQVNIVKKTEVQTGGFSKESILPKRNSDKLIARKKDWDPKKYGGFDSPTVAYSVLVVAKVEKGKSKKLKSVKELLGITIMERSSFEKNPIDFLEAKGYKEVKKDLIIKLPKYSLFELENGRKRMLASAGELQKGNELALPSKYVNFLYLASHYEKLKGSPEDNEQKQLFVEQHKHYLDEIIEQISEFSKRVILADANLDKVLSAYNKHRDKPIREQAENIIHLFTLTNLGAPAAFKYFDTTIDRKRYTSTKEVLDATLIHQSITGLYETRIDLSQLGGDGGEAAAKGGSPAPGGTAPLEEEYRLFLEAPIQNVTLLEQWKREIPKVWAEINPPGLASTQAPIHVQLLSTALPVRVRQYPITLEAKRSLRETIRKFRAAGILRPVHSPWNTPLLPVRKSGTSEYRMVQDLREVNKRVETIHPTVPNPYTLLSLLPPDRIWYSVLDLKDAFFCIPLAPESQLIFAFEWADAEEGESGQLTWTRLPQGFKNSPTLFNEALNRDLQGFRLDHPSVSLLQYVDDLLIAADTQAACLSATRDLLMTLAELGYRVSGKKAQLCQEEVTYLGFKIHKGSRSLSNSRTQAILQIPVPKTKRQVREFLGTIGYCRLWIPGFAELAQPLYAATRPGNDPLVWGEKEEEAFQSLKLALTQPPALALPSLDKPFQLFVEETSGAAKGVLTQALGPWKRPVAYLSKRLDPVAAGWPRCLRAIAAAALLTREASKLTFGQDIEITSSHNLESLLRSPPDKWLTNARITQYQVLLLDPPRVRFKQTAALNPATLLPETDDTLPIHHCLDTLDSLTSTRPDLTDQPLAQAEATLFTDGSSYIRDGKRYAGAAVVTLDSVIWAEPLPIGTSAQKAELIALTKALEWSKDKSVNIYTDSRYAFATLHVHGMIYRERGWLTAGGKAIKNAPEILALLTAVWLPKRVAVMHCKGHQKDDAPTSTGNRRADEVAREVAIRPLSTQATISAGKRTADGSEFEKRTADGSEFESPKKKAKVE

SEQ ID NO: 1140 - protein, 2096 aa, synthetic construct
  source 1..2096: note = Description of Artificial Sequence: Synthetic polypeptide
MPAAKRVKLDGGDKKYSIGLDIGTNSVGWAVITDEYKVPSKKFKVLGNTDRHSIKKNLIGALLFDSGETAEATRLKRTARRRYTRRKNRICYLQEIFSNEMAKVDDSFFHRLEESFLVEEDKKHERHPIFGNIVDEVAYHEKYPTIYHLRKKLVDSTDKADLRLIYLALAHMIKFRGHFLIEGDLNPDNSDVDKLFIQLVQTYNQLFEENPINASGVDAKAILSARLSKSRRLENLIAQLPGEKKNGLFGNLIALSLGLTPNFKSNFDLAEDAKLQLSKDTYDDDLDNLLAQIGDQYADLFLAAKNLSDAILLSDILRVNTEITKAPLSASMIKRYDEHHQDLTLLKALVRQQLPEKYKEIFFDQSKNGYAGYIDGGASQEEFYKFIKPILEKMDGTEELLVKLNREDLLRKQRTFDNGSIPHQIHLGELHAILRRQEDFYPFLKDNREKIEKILTFRIPYYVGPLARGNSRFAWMTRKSEETITPWNFEEVVDKGASAQSFIERMTNFDKNLPNEKVLPKHSLLYEYFTVYNELTKVKYVTEGMRKPAFLSGEQKKAIVDLLFKTNRKVTVKQLKEDYFKKIECFDSVEISGVEDRFNASLGTYHDLLKIIKDKDFLDNEENEDILEDIVLTLTLFEDREMIEERLKTYAHLFDDKVMKQLKRRRYTGWGRLSRKLINGIRDKQSGKTILDFLKSDGFANRNFMQLIHDDSLTFKEDIQKAQVSGQGDSLHEHIANLAGSPAIKKGILQTVKVVDELVKVMGRHKPENIVIEMARENQTTQKGQKNSRERMKRIEEGIKELGSQILKEHPVENTQLQNEKLYLYYLQNGRDMYVDQELDINRLSDYDVDHIVPQSFLKDDSIDNKVLTRSDKARGKSDNVPSEEVVKKMKNYWRQLLNAKLITQRKFDNLTKAERGGLSELDKAGFIKRQLVETRQITKHVAQILDSRMNTKYDENDKLIREVKVITLKSKLVSDFRKDFQFYKVREINNYHHAHDAYLNAVVGTALIKKYPKLESEFVYGDYKVYDVRKMIAKSEQEIGKATAKYFFYSNIMNFFKTEITLANGEIRKRPLIETNGETGEIVWDKGRDFATVRKVLSMPQVNIVKKTEVQTGGFSKESILPKRNSDKLIARKKDWDPKKYGGFDSPTVAYSVLVVAKVEKGKSKKLKSVKELLGITIMERSSFEKNPIDFLEAKGYKEVKKDLIIKLPKYSLFELENGRKRMLASAGELQKGNELALPSKYVNFLYLASHYEKLKGSPEDNEQKQLFVEQHKHYLDEIIEQISEFSKRVILADANLDKVLSAYNKHRDKPIREQAENIIHLFTLTNLGAPAAFKYFDTTIDRKRYTSTKEVLDATLIHQSITGLYETRIDLSQLGGDGGGGGPAPGSSGGTAPLEEEYRLFLEAPIQNVTLLEQWKREIPKVWAEINPPGLASTQAPIHVQLLSTALPVRVRQYPITLEAKRSLRETIRKFRAAGILRPVHSPWNTPLLPVRKSGTSEYRMVQDLREVNKRVETIHPTVPNPYTLLSLLPPDRIWYSVLDLKDAFFCIPLAPESQLIFAFEWADAEEGESGQLTWTRLPQGFKNSPTLFNEALNRDLQGFRLDHPSVSLLQYVDDLLIAADTQAACLSATRDLLMTLAELGYRVSGKKAQLCQEEVTYLGFKIHKGSRSLSNSRTQAILQIPVPKTKRQVREFLGTIGYCRLWIPGFAELAQPLYAATRPGNDPLVWGEKEEEAFQSLKLALTQPPALALPSLDKPFQLFVEETSGAAKGVLTQALGPWKRPVAYLSKRLDPVAAGWPRCLRAIAAAALLTREASKLTFGQDIEITSSHNLESLLRSPPDKWLTNARITQYQVLLLDPPRVRFKQTAALNPATLLPETDDTLPIHHCLDTLDSLTSTRPDLTDQPLAQAEATLFTDGSSYIRDGKRYAGAAVVTLDSVIWAEPLPIGTSAQKAELIALTKALEWSKDKSVNIYTDSRYAFATLHVHGMIYRERGWLTAGGKAIKNAPEILALLTAVWLPKRVAVMHCKGHQKDDAPTSTGNRRADEVAREVAIRPLSTQATISAGKRTADGSEFEKRTADGSEFESPKKKAKVE

SEQ ID NO: 1141 - protein, 2095 aa, synthetic construct
  source 1..2095: note = Description of Artificial Sequence: Synthetic polypeptide
MPAAKRVKLDGGDKKYSIGLDIGTNSVGWAVITDEYKVPSKKFKVLGNTDRHSIKKNLIGALLFDSGETAEATRLKRTARRRYTRRKNRICYLQEIFSNEMAKVDDSFFHRLEESFLVEEDKKHERHPIFGNIVDEVAYHEKYPTIYHLRKKLVDSTDKADLRLIYLALAHMIKFRGHFLIEGDLNPDNSDVDKLFIQLVQTYNQLFEENPINASGVDAKAILSARLSKSRRLENLIAQLPGEKKNGLFGNLIALSLGLTPNFKSNFDLAEDAKLQLSKDTYDDDLDNLLAQIGDQYADLFLAAKNLSDAILLSDILRVNTEITKAPLSASMIKRYDEHHQDLTLLKALVRQQLPEKYKEIFFDQSKNGYAGYIDGGASQEEFYKFIKPILEKMDGTEELLVKLNREDLLRKQRTFDNGSIPHQIHLGELHAILRRQEDFYPFLKDNREKIEKILTFRIPYYVGPLARGNSRFAWMTRKSEETITPWNFEEVVDKGASAQSFIERMTNFDKNLPNEKVLPKHSLLYEYFTVYNELTKVKYVTEGMRKPAFLSGEQKKAIVDLLFKTNRKVTVKQLKEDYFKKIECFDSVEISGVEDRFNASLGTYHDLLKIIKDKDFLDNEENEDILEDIVLTLTLFEDREMIEERLKTYAHLFDDKVMKQLKRRRYTGWGRLSRKLINGIRDKQSGKTILDFLKSDGFANRNFMQLIHDDSLTFKEDIQKAQVSGQGDSLHEHIANLAGSPAIKKGILQTVKVVDELVKVMGRHKPENIVIEMARENQTTQKGQKNSRERMKRIEEGIKELGSQILKEHPVENTQLQNEKLYLYYLQNGRDMYVDQELDINRLSDYDVDHIVPQSFLKDDSIDNKVLTRSDKARGKSDNVPSEEVVKKMKNYWRQLLNAKLITQRKFDNLTKAERGGLSELDKAGFIKRQLVETRQITKHVAQILDSRMNTKYDENDKLIREVKVITLKSKLVSDFRKDFQFYKVREINNYHHAHDAYLNAVVGTALIKKYPKLESEFVYGDYKVYDVRKMIAKSEQEIGKATAKYFFYSNIMNFFKTEITLANGEIRKRPLIETNGETGEIVWDKGRDFATVRKVLSMPQVNIVKKTEVQTGGFSKESILPKRNSDKLIARKKDWDPKKYGGFDSPTVAYSVLVVAKVEKGKSKKLKSVKELLGITIMERSSFEKNPIDFLEAKGYKEVKKDLIIKLPKYSLFELENGRKRMLASAGELQKGNELALPSKYVNFLYLASHYEKLKGSPEDNEQKQLFVEQHKHYLDEIIEQISEFSKRVILADANLDKVLSAYNKHRDKPIREQAENIIHLFTLTNLGAPAAFKYFDTTIDRKRYTSTKEVLDATLIHQSITGLYETRIDLSQLGGDGGEAAAKGGGGGTAPLEEEYRLFLEAPIQNVTLLEQWKREIPKVWAEINPPGLASTQAPIHVQLLSTALPVRVRQYPITLEAKRSLRETIRKFRAAGILRPVHSPWNTPLLPVRKSGTSEYRMVQDLREVNKRVETIHPTVPNPYTLLSLLPPDRIWYSVLDLKDAFFCIPLAPESQLIFAFEWADAEEGESGQLTWTRLPQGFKNSPTLFNEALNRDLQGFRLDHPSVSLLQYVDDLLIAADTQAACLSATRDLLMTLAELGYRVSGKKAQLCQEEVTYLGFKIHKGSRSLSNSRTQAILQIPVPKTKRQVREFLGTIGYCRLWIPGFAELAQPLYAATRPGNDPLVWGEKEEEAFQSLKLALTQPPALALPSLDKPFQLFVEETSGAAKGVLTQALGPWKRPVAYLSKRLDPVAAGWPRCLRAIAAAALLTREASKLTFGQDIEITSSHNLESLLRSPPDKWLTNARITQYQVLLLDPPRVRFKQTAALNPATLLPETDDTLPIHHCLDTLDSLTSTRPDLTDQPLAQAEATLFTDGSSYIRDGKRYAGAAVVTLDSVIWAEPLPIGTSAQKAELIALTKALEWSKDKSVNIYTDSRYAFATLHVHGMIYRERGWLTAGGKAIKNAPEILALLTAVWLPKRVAVMHCKGHQKDDAPTSTGNRRADEVAREVAIRPLSTQATISAGKRTADGSEFEKRTADGSEFESPKKKAKVE

SEQ ID NO: 1142 - protein, 2098 aa, synthetic construct
  source 1..2098: note = Description of Artificial Sequence: Synthetic polypeptide
MPAAKRVKLDGGDKKYSIGLDIGTNSVGWAVITDEYKVPSKKFKVLGNTDRHSIKKNLIGALLFDSGETAEATRLKRTARRRYTRRKNRICYLQEIFSNEMAKVDDSFFHRLEESFLVEEDKKHERHPIFGNIVDEVAYHEKYPTIYHLRKKLVDSTDKADLRLIYLALAHMIKFRGHFLIEGDLNPDNSDVDKLFIQLVQTYNQLFEENPINASGVDAKAILSARLSKSRRLENLIAQLPGEKKNGLFGNLIALSLGLTPNFKSNFDLAEDAKLQLSKDTYDDDLDNLLAQIGDQYADLFLAAKNLSDAILLSDILRVNTEITKAPLSASMIKRYDEHHQDLTLLKALVRQQLPEKYKEIFFDQSKNGYAGYIDGGASQEEFYKFIKPILEKMDGTEELLVKLNREDLLRKQRTFDNGSIPHQIHLGELHAILRRQEDFYPFLKDNREKIEKILTFRIPYYVGPLARGNSRFAWMTRKSEETITPWNFEEVVDKGASAQSFIERMTNFDKNLPNEKVLPKHSLLYEYFTVYNELTKVKYVTEGMRKPAFLSGEQKKAIVDLLFKTNRKVTVKQLKEDYFKKIECFDSVEISGVEDRFNASLGTYHDLLKIIKDKDFLDNEENEDILEDIVLTLTLFEDREMIEERLKTYAHLFDDKVMKQLKRRRYTGWGRLSRKLINGIRDKQSGKTILDFLKSDGFANRNFMQLIHDDSLTFKEDIQKAQVSGQGDSLHEHIANLAGSPAIKKGILQTVKVVDELVKVMGRHKPENIVIEMARENQTTQKGQKNSRERMKRIEEGIKELGSQILKEHPVENTQLQNEKLYLYYLQNGRDMYVDQELDINRLSDYDVDHIVPQSFLKDDSIDNKVLTRSDKARGKSDNVPSEEVVKKMKNYWRQLLNAKLITQRKFDNLTKAERGGLSELDKAGFIKRQLVETRQITKHVAQILDSRMNTKYDENDKLIREVKVITLKSKLVSDFRKDFQFYKVREINNYHHAHDAYLNAVVGTALIKKYPKLESEFVYGDYKVYDVRKMIAKSEQEIGKATAKYFFYSNIMNFFKTEITLANGEIRKRPLIETNGETGEIVWDKGRDFATVRKVLSMPQVNIVKKTEVQTGGFSKESILPKRNSDKLIARKKDWDPKKYGGFDSPTVAYSVLVVAKVEKGKSKKLKSVKELLGITIMERSSFEKNPIDFLEAKGYKEVKKDLIIKLPKYSLFELENGRKRMLASAGELQKGNELALPSKYVNFLYLASHYEKLKGSPEDNEQKQLFVEQHKHYLDEIIEQISEFSKRVILADANLDKVLSAYNKHRDKPIREQAENIIHLFTLTNLGAPAAFKYFDTTIDRKRYTSTKEVLDATLIHQSITGLYETRIDLSQLGGDGGGGGEAAAKGSSGGTAPLEEEYRLFLEAPIQNVTLLEQWKREIPKVWAEINPPGLASTQAPIHVQLLSTALPVRVRQYPITLEAKRSLRETIRKFRAAGILRPVHSPWNTPLLPVRKSGTSEYRMVQDLREVNKRVETIHPTVPNPYTLLSLLPPDRIWYSVLDLKDAFFCIPLAPESQLIFAFEWADAEEGESGQLTWTRLPQGFKNSPTLFNEALNRDLQGFRLDHPSVSLLQYVDDLLIAADTQAACLSATRDLLMTLAELGYRVSGKKAQLCQEEVTYLGFKIHKGSRSLSNSRTQAILQIPVPKTKRQVREFLGTIGYCRLWIPGFAELAQPLYAATRPGNDPLVWGEKEEEAFQSLKLALTQPPALALPSLDKPFQLFVEETSGAAKGVLTQALGPWKRPVAYLSKRLDPVAAGWPRCLRAIAAAALLTREASKLTFGQDIEITSSHNLESLLRSPPDKWLTNARITQYQVLLLDPPRVRFKQTAALNPATLLPETDDTLPIHHCLDTLDSLTSTRPDLTDQPLAQAEATLFTDGSSYIRDGKRYAGAAVVTLDSVIWAEPLPIGTSAQKAELIALTKALEWSKDKSVNIYTDSRYAFATLHVHGMIYRERGWLTAGGKAIKNAPEILALLTAVWLPKRVAVMHCKGHQKDDAPTSTGNRRADEVAREVAIRPLSTQATISAGKRTADGSEFEKRTADGSEFESPKKKAKVE

SEQ ID NO: 1143 - protein, 2102 aa, synthetic construct
  source 1..2102: note = Description of Artificial Sequence: Synthetic polypeptide
MPAAKRVKLDGGDKKYSIGLDIGTNSVGWAVITDEYKVPSKKFKVLGNTDRHSIKKNLIGALLFDSGETAEATRLKRTARRRYTRRKNRICYLQEIFSNEMAKVDDSFFHRLEESFLVEEDKKHERHPIFGNIVDEVAYHEKYPTIYHLRKKLVDSTDKADLRLIYLALAHMIKFRGHFLIEGDLNPDNSDVDKLFIQLVQTYNQLFEENPINASGVDAKAILSARLSKSRRLENLIAQLPGEKKNGLFGNLIALSLGLTPNFKSNFDLAEDAKLQLSKDTYDDDLDNLLAQIGDQYADLFLAAKNLSDAILLSDILRVNTEITKAPLSASMIKRYDEHHQDLTLLKALVRQQLPEKYKEIFFDQSKNGYAGYIDGGASQEEFYKFIKPILEKMDGTEELLVKLNREDLLRKQRTFDNGSIPHQIHLGELHAILRRQEDFYPFLKDNREKIEKILTFRIPYYVGPLARGNSRFAWMTRKSEETITPWNFEEVVDKGASAQSFIERMTNFDKNLPNEKVLPKHSLLYEYFTVYNELTKVKYVTEGMRKPAFLSGEQKKAIVDLLFKTNRKVTVKQLKEDYFKKIECFDSVEISGVEDRFNASLGTYHDLLKIIKDKDFLDNEENEDILEDIVLTLTLFEDREMIEERLKTYAHLFDDKVMKQLKRRRYTGWGRLSRKLINGIRDKQSGKTILDFLKSDGFANRNFMQLIHDDSLTFKEDIQKAQVSGQGDSLHEHIANLAGSPAIKKGILQTVKVVDELVKVMGRHKPENIVIEMARENQTTQKGQKNSRERMKRIEEGIKELGSQILKEHPVENTQLQNEKLYLYYLQNGRDMYVDQELDINRLSDYDVDHIVPQSFLKDDSIDNKVLTRSDKARGKSDNVPSEEVVKKMKNYWRQLLNAKLITQRKFDNLTKAERGGLSELDKAGFIKRQLVETRQITKHVAQILDSRMNTKYDENDKLIREVKVITLKSKLVSDFRKDFQFYKVREINNYHHAHDAYLNAVVGTALIKKYPKLESEFVYGDYKVYDVRKMIAKSEQEIGKATAKYFFYSNIMNFFKTEITLANGEIRKRPLIETNGETGEIVWDKGRDFATVRKVLSMPQVNIVKKTEVQTGGFSKESILPKRNSDKLIARKKDWDPKKYGGFDSPTVAYSVLVVAKVEKGKSKKLKSVKELLGITIMERSSFEKNPIDFLEAKGYKEVKKDLIIKLPKYSLFELENGRKRMLASAGELQKGNELALPSKYVNFLYLASHYEKLKGSPEDNEQKQLFVEQHKHYLDEIIEQISEFSKRVILADANLDKVLSAYNKHRDKPIREQAENIIHLFTLTNLGAPAAFKYFDTTIDRKRYTSTKEVLDATLIHQSITGLYETRIDLSQLGGDGGGSSGSSGSSGSSGSSGGTAPLEEEYRLFLEAPIQNVTLLEQWKREIPKVWAEINPPGLASTQAPIHVQLLSTALPVRVRQYPITLEAKRSLRETIRKFRAAGILRPVHSPWNTPLLPVRKSGTSEYRMVQDLREVNKRVETIHPTVPNPYTLLSLLPPDRIWYSVLDLKDAFFCIPLAPESQLIFAFEWADAEEGESGQLTWTRLPQGFKNSPTLFNEALNRDLQGFRLDHPSVSLLQYVDDLLIAADTQAACLSATRDLLMTLAELGYRVSGKKAQLCQEEVTYLGFKIHKGSRSLSNSRTQAILQIPVPKTKRQVREFLGTIGYCRLWIPGFAELAQPLYAATRPGNDPLVWGEKEEEAFQSLKLALTQPPALALPSLDKPFQLFVEETSGAAKGVLTQALGPWKRPVAYLSKRLDPVAAGWPRCLRAIAAAALLTREASKLTFGQDIEITSSHNLESLLRSPPDKWLTNARITQYQVLLLDPPRVRFKQTAALNPATLLPETDDTLPIHHCLDTLDSLTSTRPDLTDQPLAQAEATLFTDGSSYIRDGKRYAGAAVVTLDSVIWAEPLPIGTSAQKAELIALTKALEWSKDKSVNIYTDSRYAFATLHVHGMIYRERGWLTAGGKAIKNAPEILALLTAVWLPKRVAVMHCKGHQKDDAPTSTGNRRADEVAREVAIRPLSTQATISAGKRTADGSEFEKRTADGSEFESPKKKAKVE

SEQ ID NO: 1144 - protein, 2090 aa, synthetic construct
  source 1..2090: note = Description of Artificial Sequence: Synthetic polypeptide
MPAAKRVKLDGGDKKYSIGLDIGTNSVGWAVITDEYKVPSKKFKVLGNTDRHSIKKNLIGALLFDSGETAEATRLKRTARRRYTRRKNRICYLQEIFSNEMAKVDDSFFHRLEESFLVEEDKKHERHPIFGNIVDEVAYHEKYPTIYHLRKKLVDSTDKADLRLIYLALAHMIKFRGHFLIEGDLNPDNSDVDKLFIQLVQTYNQLFEENPINASGVDAKAILSARLSKSRRLENLIAQLPGEKKNGLFGNLIALSLGLTPNFKSNFDLAEDAKLQLSKDTYDDDLDNLLAQIGDQYADLFLAAKNLSDAILLSDILRVNTEITKAPLSASMIKRYDEHHQDLTLLKALVRQQLPEKYKEIFFDQSKNGYAGYIDGGASQEEFYKFIKPILEKMDGTEELLVKLNREDLLRKQRTFDNGSIPHQIHLGELHAILRRQEDFYPFLKDNREKIEKILTFRIPYYVGPLARGNSRFAWMTRKSEETITPWNFEEVVDKGASAQSFIERMTNFDKNLPNEKVLPKHSLLYEYFTVYNELTKVKYVTEGMRKPAFLSGEQKKAIVDLLFKTNRKVTVKQLKEDYFKKIECFDSVEISGVEDRFNASLGTYHDLLKIIKDKDFLDNEENEDILEDIVLTLTLFEDREMIEERLKTYAHLFDDKVMKQLKRRRYTGWGRLSRKLINGIRDKQSGKTILDFLKSDGFANRNFMQLIHDDSLTFKEDIQKAQVSGQGDSLHEHIANLAGSPAIKKGILQTVKVVDELVKVMGRHKPENIVIEMARENQTTQKGQKNSRERMKRIEEGIKELGSQILKEHPVENTQLQNEKLYLYYLQNGRDMYVDQELDINRLSDYDVDHIVPQSFLKDDSIDNKVLTRSDKARGKSDNVPSEEVVKKMKNYWRQLLNAKLITQRKFDNLTKAERGGLSELDKAGFIKRQLVETRQITKHVAQILDSRMNTKYDENDKLIREVKVITLKSKLVSDFRKDFQFYKVREINNYHHAHDAYLNAVVGTALIKKYPKLESEFVYGDYKVYDVRKMIAKSEQEIGKATAKYFFYSNIMNFFKTEITLANGEIRKRPLIETNGETGEIVWDKGRDFATVRKVLSMPQVNIVKKTEVQTGGFSKESILPKRNSDKLIARKKDWDPKKYGGFDSPTVAYSVLVVAKVEKGKSKKLKSVKELLGITIMERSSFEKNPIDFLEAKGYKEVKKDLIIKLPKYSLFELENGRKRMLASAGELQKGNELALPSKYVNFLYLASHYEKLKGSPEDNEQKQLFVEQHKHYLDEIIEQISEFSKRVILADANLDKVLSAYNKHRDKPIREQAENIIHLFTLTNLGAPAAFKYFDTTIDRKRYTSTKEVLDATLIHQSITGLYETRIDLSQLGGDGGGGSGGTAPLEEEYRLFLEAPIQNVTLLEQWKREIPKVWAEINPPGLASTQAPIHVQLLSTALPVRVRQYPITLEAKRSLRETIRKFRAAGILRPVHSPWNTPLLPVRKSGTSEYRMVQDLREVNKRVETIHPTVPNPYTLLSLLPPDRIWYSVLDLKDAFFCIPLAPESQLIFAFEWADAEEGESGQLTWTRLPQGFKNSPTLFNEALNRDLQGFRLDHPSVSLLQYVDDLLIAADTQAACLSATRDLLMTLAELGYRVSGKKAQLCQEEVTYLGFKIHKGSRSLSNSRTQAILQIPVPKTKRQVREFLGTIGYCRLWIPGFAELAQPLYAATRPGNDPLVWGEKEEEAFQSLKLALTQPPALALPSLDKPFQLFVEETSGAAKGVLTQALGPWKRPVAYLSKRLDPVAAGWPRCLRAIAAAALLTREASKLTFGQDIEITSSHNLESLLRSPPDKWLTNARITQYQVLLLDPPRVRFKQTAALNPATLLPETDDTLPIHHCLDTLDSLTSTRPDLTDQPLAQAEATLFTDGSSYIRDGKRYAGAAVVTLDSVIWAEPLPIGTSAQKAELIALTKALEWSKDKSVNIYTDSRYAFATLHVHGMIYRERGWLTAGGKAIKNAPEILALLTAVWLPKRVAVMHCKGHQKDDAPTSTGNRRADEVAREVAIRPLSTQATISAGKRTADGSEFEKRTADGSEFESPKKKAKVE

SEQ ID NO: 1145 - protein, 2098 aa, synthetic construct
  source 1..2098: note = Description of Artificial Sequence: Synthetic polypeptide
MPAAKRVKLDGGDKKYSIGLDIGTNSVGWAVITDEYKVPSKKFKVLGNTDRHSIKKNLIGALLFDSGETAEATRLKRTARRRYTRRKNRICYLQEIFSNEMAKVDDSFFHRLEESFLVEEDKKHERHPIFGNIVDEVAYHEKYPTIYHLRKKLVDSTDKADLRLIYLALAHMIKFRGHFLIEGDLNPDNSDVDKLFIQLVQTYNQLFEENPINASGVDAKAILSARLSKSRRLENLIAQLPGEKKNGLFGNLIALSLGLTPNFKSNFDLAEDAKLQLSKDTYDDDLDNLLAQIGDQYADLFLAAKNLSDAILLSDILRVNTEITKAPLSASMIKRYDEHHQDLTLLKALVRQQLPEKYKEIFFDQSKNGYAGYIDGGASQEEFYKFIKPILEKMDGTEELLVKLNREDLLRKQRTFDNGSIPHQIHLGELHAILRRQEDFYPFLKDNREKIEKILTFRIPYYVGPLARGNSRFAWMTRKSEETITPWNFEEVVDKGASAQSFIERMTNFDKNLPNEKVLPKHSLLYEYFTVYNELTKVKYVTEGMRKPAFLSGEQKKAIVDLLFKTNRKVTVKQLKEDYFKKIECFDSVEISGVEDRFNASLGTYHDLLKIIKDKDFLDNEENEDILEDIVLTLTLFEDREMIEERLKTYAHLFDDKVMKQLKRRRYTGWGRLSRKLINGIRDKQSGKTILDFLKSDGFANRNFMQLIHDDSLTFKEDIQKAQVSGQGDSLHEHIANLAGSPAIKKGILQTVKVVDELVKVMGRHKPENIVIEMARENQTTQKGQKNSRERMKRIEEGIKELGSQILKEHPVENTQLQNEKLYLYYLQNGRDMYVDQELDINRLSDYDVDHIVPQSFLKDDSIDNKVLTRSDKARGKSDNVPSEEVVKKMKNYWRQLLNAKLITQRKFDNLTKAERGGLSELDKAGFIKRQLVETRQITKHVAQILDSRMNTKYDENDKLIREVKVITLKSKLVSDFRKDFQFYKVREINNYHHAHDAYLNAVVGTALIKKYPKLESEFVYGDYKVYDVRKMIAKSEQEIGKATAKYFFYSNIMNFFKTEITLANGEIRKRPLIETNGETGEIVWDKGRDFATVRKVLSMPQVNIVKKTEVQTGGFSKESILPKRNSDKLIARKKDWDPKKYGGFDSPTVAYSVLVVAKVEKGKSKKLKSVKELLGITIMERSSFEKNPIDFLEAKGYKEVKKDLIIKLPKYSLFELENGRKRMLASAGELQKGNELALPSKYVNFLYLASHYEKLKGSPEDNEQKQLFVEQHKHYLDEIIEQISEFSKRVILADANLDKVLSAYNKHRDKPIREQAENIIHLFTLTNLGAPAAFKYFDTTIDRKRYTSTKEVLDATLIHQSITGLYETRIDLSQLGGDGGEAAAKPAPGSSGGTAPLEEEYRLFLEAPIQNVTLLEQWKREIPKVWAEINPPGLASTQAPIHVQLLSTALPVRVRQYPITLEAKRSLRETIRKFRAAGILRPVHSPWNTPLLPVRKSGTSEYRMVQDLREVNKRVETIHPTVPNPYTLLSLLPPDRIWYSVLDLKDAFFCIPLAPESQLIFAFEWADAEEGESGQLTWTRLPQGFKNSPTLFNEALNRDLQGFRLDHPSVSLLQYVDDLLIAADTQAACLSATRDLLMTLAELGYRVSGKKAQLCQEEVTYLGFKIHKGSRSLSNSRTQAILQIPVPKTKRQVREFLGTIGYCRLWIPGFAELAQPLYAATRPGNDPLVWGEKEEEAFQSLKLALTQPPALALPSLDKPFQLFVEETSGAAKGVLTQALGPWKRPVAYLSKRLDPVAAGWPRCLRAIAAAALLTREASKLTFGQDIEITSSHNLESLLRSPPDKWLTNARITQYQVLLLDPPRVRFKQTAALNPATLLPETDDTLPIHHCLDTLDSLTSTRPDLTDQPLAQAEATLFTDGSSYIRDGKRYAGAAVVTLDSVIWAEPLPIGTSAQKAELIALTKALEWSKDKSVNIYTDSRYAFATLHVHGMIYRERGWLTAGGKAIKNAPEILALLTAVWLPKRVAVMHCKGHQKDDAPTSTGNRRADEVAREVAIRPLSTQATISAGKRTADGSEFEKRTADGSEFESPKKKAKVE

SEQ ID NO: 1146 - protein, 2133 aa, synthetic construct
  source 1..2133: note = Description of Artificial Sequence: Synthetic polypeptide
MPAAKRVKLDGGDKKYSIGLDIGTNSVGWAVITDEYKVPSKKFKVLGNTDRHSIKKNLIGALLFDSGETAEATRLKRTARRRYTRRKNRICYLQEIFSNEMAKVDDSFFHRLEESFLVEEDKKHERHPIFGNIVDEVAYHEKYPTIYHLRKKLVDSTDKADLRLIYLALAHMIKFRGHFLIEGDLNPDNSDVDKLFIQLVQTYNQLFEENPINASGVDAKAILSARLSKSRRLENLIAQLPGEKKNGLFGNLIALSLGLTPNFKSNFDLAEDAKLQLSKDTYDDDLDNLLAQIGDQYADLFLAAKNLSDAILLSDILRVNTEITKAPLSASMIKRYDEHHQDLTLLKALVRQQLPEKYKEIFFDQSKNGYAGYIDGGASQEEFYKFIKPILEKMDGTEELLVKLNREDLLRKQRTFDNGSIPHQIHLGELHAILRRQEDFYPFLKDNREKIEKILTFRIPYYVGPLARGNSRFAWMTRKSEETITPWNFEEVVDKGASAQSFIERMTNFDKNLPNEKVLPKHSLLYEYFTVYNELTKVKYVTEGMRKPAFLSGEQKKAIVDLLFKTNRKVTVKQLKEDYFKKIECFDSVEISGVEDRFNASLGTYHDLLKIIKDKDFLDNEENEDILEDIVLTLTLFEDREMIEERLKTYAHLFDDKVMKQLKRRRYTGWGRLSRKLINGIRDKQSGKTILDFLKSDGFANRNFMQLIHDDSLTFKEDIQKAQVSGQGDSLHEHIANLAGSPAIKKGILQTVKVVDELVKVMGRHKPENIVIEMARENQTTQKGQKNSRERMKRIEEGIKELGSQILKEHPVENTQLQNEKLYLYYLQNGRDMYVDQELDINRLSDYDVDHIVPQSFLKDDSIDNKVLTRSDKARGKSDNVPSEEVVKKMKNYWRQLLNAKLITQRKFDNLTKAERGGLSELDKAGFIKRQLVETRQITKHVAQILDSRMNTKYDENDKLIREVKVITLKSKLVSDFRKDFQFYKVREINNYHHAHDAYLNAVVGTALIKKYPKLESEFVYGDYKVYDVRKMIAKSEQEIGKATAKYFFYSNIMNFFKTEITLANGEIRKRPLIETNGETGEIVWDKGRDFATVRKVLSMPQVNIVKKTEVQTGGFSKESILPKRNSDKLIARKKDWDPKKYGGFDSPTVAYSVLVVAKVEKGKSKKLKSVKELLGITIMERSSFEKNPIDFLEAKGYKEVKKDLIIKLPKYSLFELENGRKRMLASAGELQKGNELALPSKYVNFLYLASHYEKLKGSPEDNEQKQLFVEQHKHYLDEIIEQISEFSKRVILADANLDKVLSAYNKHRDKPIREQAENIIHLFTLTNLGAPAAFKYFDTTIDRKRYTSTKEVLDATLIHQSITGLYETRIDLSQLGGDGGAEAAAKEAAAKEAAAKEAAAKALEAEAAAKEAAAKEAAAKEAAAKAGGTAPLEEEYRLFLEAPIQNVTLLEQWKREIPKVWAEINPPGLASTQAPIHVQLLSTALPVRVRQYPITLEAKRSLRETIRKFRAAGILRPVHSPWNTPLLPVRKSGTSEYRMVQDLREVNKRVETIHPTVPNPYTLLSLLPPDRIWYSVLDLKDAFFCIPLAPESQLIFAFEWADAEEGESGQLTWTRLPQGFKNSPTLFNEALNRDLQGFRLDHPSVSLLQYVDDLLIAADTQAACLSATRDLLMTLAELGYRVSGKKAQLCQEEVTYLGFKIHKGSRSLSNSRTQAILQIPVPKTKRQVREFLGTIGYCRLWIPGFAELAQPLYAATRPGNDPLVWGEKEEEAFQSLKLALTQPPALALPSLDKPFQLFVEETSGAAKGVLTQALGPWKRPVAYLSKRLDPVAAGWPRCLRAIAAAALLTREASKLTFGQDIEITSSHNLESLLRSPPDKWLTNARITQYQVLLLDPPRVRFKQTAALNPATLLPETDDTLPIHHCLDTLDSLTSTRPDLTDQPLAQAEATLFTDGSSYIRDGKRYAGAAVVTLDSVIWAEPLPIGTSAQKAELIALTKALEWSKDKSVNIYTDSRYAFATLHVHGMIYRERGWLTAGGKAIKNAPEILALLTAVWLPKRVAVMHCKGHQKDDAPTSTGNRRADEVAREVAIRPLSTQATISAGKRTADGSEFEKRTADGSEFESPKKKAKVE

SEQ ID NO: 1147 - protein, 2098 aa, synthetic construct
  source 1..2098: note = Description of Artificial Sequence: Synthetic polypeptide
MPAAKRVKLDGGDKKYSIGLDIGTNSVGWAVITDEYKVPSKKFKVLGNTDRHSIKKNLIGALLFDSGETAEATRLKRTARRRYTRRKNRICYLQEIFSNEMAKVDDSFFHRLEESFLVEEDKKHERHPIFGNIVDEVAYHEKYPTIYHLRKKLVDSTDKADLRLIYLALAHMIKFRGHFLIEGDLNPDNSDVDKLFIQLVQTYNQLFEENPINASGVDAKAILSARLSKSRRLENLIAQLPGEKKNGLFGNLIALSLGLTPNFKSNFDLAEDAKLQLSKDTYDDDLDNLLAQIGDQYADLFLAAKNLSDAILLSDILRVNTEITKAPLSASMIKRYDEHHQDLTLLKALVRQQLPEKYKEIFFDQSKNGYAGYIDGGASQEEFYKFIKPILEKMDGTEELLVKLNREDLLRKQRTFDNGSIPHQIHLGELHAILRRQEDFYPFLKDNREKIEKILTFRIPYYVGPLARGNSRFAWMTRKSEETITPWNFEEVVDKGASAQSFIERMTNFDKNLPNEKVLPKHSLLYEYFTVYNELTKVKYVTEGMRKPAFLSGEQKKAIVDLLFKTNRKVTVKQLKEDYFKKIECFDSVEISGVEDRFNASLGTYHDLLKIIKDKDFLDNEENEDILEDIVLTLTLFEDREMIEERLKTYAHLFDDKVMKQLKRRRYTGWGRLSRKLINGIRDKQSGKTILDFLKSDGFANRNFMQLIHDDSLTFKEDIQKAQVSGQGDSLHEHIANLAGSPAIKKGILQTVKVVDELVKVMGRHKPENIVIEMARENQTTQKGQKNSRERMKRIEEGIKELGSQILKEHPVENTQLQNEKLYLYYLQNGRDMYVDQELDINRLSDYDVDHIVPQSFLKDDSIDNKVLTRSDKARGKSDNVPSEEVVKKMKNYWRQLLNAKLITQRKFDNLTKAERGGLSELDKAGFIKRQLVETRQITKHVAQILDSRMNTKYDENDKLIREVKVITLKSKLVSDFRKDFQFYKVREINNYHHAHDAYLNAVVGTALIKKYPKLESEFVYGDYKVYDVRKMIAKSEQEIGKATAKYFFYSNIMNFFKTEITLANGEIRKRPLIETNGETGEIVWDKGRDFATVRKVLSMPQVNIVKKTEVQTGGFSKESILPKRNSDKLIARKKDWDPKKYGGFDSPTVAYSVLVVAKVEKGKSKKLKSVKELLGITIMERSSFEKNPIDFLEAKGYKEVKKDLIIKLPKYSLFELENGRKRMLASAGELQKGNELALPSKYVNFLYLASHYEKLKGSPEDNEQKQLFVEQHKHYLDEIIEQISEFSKRVILADANLDKVLSAYNKHRDKPIREQAENIIHLFTLTNLGAPAAFKYFDTTIDRKRYTSTKEVLDATLIHQSITGLYETRIDLSQLGGDGGGGSEAAAKPAPGGTAPLEEEYRLFLEAPIQNVTLLEQWKREIPKVWAEINPPGLASTQAPIHVQLLSTALPVRVRQYPITLEAKRSLRETIRKFRAAGILRPVHSPWNTPLLPVRKSGTSEYRMVQDLREVNKRVETIHPTVPNPYTLLSLLPPDRIWYSVLDLKDAFFCIPLAPESQLIFAFEWADAEEGESGQLTWTRLPQGFKNSPTLFNEALNRDLQGFRLDHPSVSLLQYVDDLLIAADTQAACLSATRDLLMTLAELGYRVSGKKAQLCQEEVTYLGFKIHKGSRSLSNSRTQAILQIPVPKTKRQVREFLGTIGYCRLWIPGFAELAQPLYAATRPGNDPLVWGEKEEEAFQSLKLALTQPPALALPSLDKPFQLFVEETSGAAKGVLTQALGPWKRPVAYLSKRLDPVAAGWPRCLRAIAAAALLTREASKLTFGQDIEITSSHNLESLLRSPPDKWLTNARITQYQVLLLDPPRVRFKQTAALNPATLLPETDDTLPIHHCLDTLDSLTSTRPDLTDQPLAQAEATLFTDGSSYIRDGKRYAGAAVVTLDSVIWAEPLPIGTSAQKAELIALTKALEWSKDKSVNIYTDSRYAFATLHVHGMIYRERGWLTAGGKAIKNAPEILALLTAVWLPKRVAVMHCKGHQKDDAPTSTGNRRADEVAREVAIRPLSTQATISAGKRTADGSEFEKRTADGSEFESPKKKAKVE

SEQ ID NO: 1148 - protein, 2090 aa, synthetic construct
  source 1..2090: note = Description of Artificial Sequence: Synthetic polypeptide
MPAAKRVKLDGGDKKYSIGLDIGTNSVGWAVITDEYKVPSKKFKVLGNTDRHSIKKNLIGALLFDSGETAEATRLKRTARRRYTRRKNRICYLQEIFSNEMAKVDDSFFHRLEESFLVEEDKKHERHPIFGNIVDEVAYHEKYPTIYHLRKKLVDSTDKADLRLIYLALAHMIKFRGHFLIEGDLNPDNSDVDKLFIQLVQTYNQLFEENPINASGVDAKAILSARLSKSRRLENLIAQLPGEKKNGLFGNLIALSLGLTPNFKSNFDLAEDAKLQLSKDTYDDDLDNLLAQIGDQYADLFLAAKNLSDAILLSDILRVNTEITKAPLSASMIKRYDEHHQDLTLLKALVRQQLPEKYKEIFFDQSKNGYAGYIDGGASQEEFYKFIKPILEKMDGTEELLVKLNREDLLRKQRTFDNGSIPHQIHLGELHAILRRQEDFYPFLKDNREKIEKILTFRIPYYVGPLARGNSRFAWMTRKSEETITPWNFEEVVDKGASAQSFIERMTNFDKNLPNEKVLPKHSLLYEYFTVYNELTKVKYVTEGMRKPAFLSGEQKKAIVDLLFKTNRKVTVKQLKEDYFKKIECFDSVEISGVEDRFNASLGTYHDLLKIIKDKDFLDNEENEDILEDIVLTLTLFEDREMIEERLKTYAHLFDDKVMKQLKRRRYTGWGRLSRKLINGIRDKQSGKTILDFLKSDGFANRNFMQLIHDDSLTFKEDIQKAQVSGQGDSLHEHIANLAGSPAIKKGILQTVKVVDELVKVMGRHKPENIVIEMARENQTTQKGQKNSRERMKRIEEGIKELGSQILKEHPVENTQLQNEKLYLYYLQNGRDMYVDQELDINRLSDYDVDHIVPQSFLKDDSIDNKVLTRSDKARGKSDNVPSEEVVKKMKNYWRQLLNAKLITQRKFDNLTKAERGGLSELDKAGFIKRQLVETRQITKHVAQILDSRMNTKYDENDKLIREVKVITLKSKLVSDFRKDFQFYKVREINNYHHAHDAYLNAVVGTALIKKYPKLESEFVYGDYKVYDVRKMIAKSEQEIGKATAKYFFYSNIMNFFKTEITLANGEIRKRPLIETNGETGEIVWDKGRDFATVRKVLSMPQVNIVKKTEVQTGGFSKESILPKRNSDKLIARKKDWDPKKYGGFDSPTVAYSVLVVAKVEKGKSKKLKSVKELLGITIMERSSFEKNPIDFLEAKGYKEVKKDLIIKLPKYSLFELENGRKRMLASAGELQKGNELALPSKYVNFLYLASHYEKLKGSPEDNEQKQLFVEQHKHYLDEIIEQISEFSKRVILADANLDKVLSAYNKHRDKPIREQAENIIHLFTLTNLGAPAAFKYFDTTIDRKRYTSTKEVLDATLIHQSITGLYETRIDLSQLGGDGGPAPGGTAPLEEEYRLFLEAPIQNVTLLEQWKREIPKVWAEINPPGLASTQAPIHVQLLSTALPVRVRQYPITLEAKRSLRETIRKFRAAGILRPVHSPWNTPLLPVRKSGTSEYRMVQDLREVNKRVETIHPTVPNPYTLLSLLPPDRIWYSVLDLKDAFFCIPLAPESQLIFAFEWADAEEGESGQLTWTRLPQGFKNSPTLFNEALNRDLQGFRLDHPSVSLLQYVDDLLIAADTQAACLSATRDLLMTLAELGYRVSGKKAQLCQEEVTYLGFKIHKGSRSLSNSRTQAILQIPVPKTKRQVREFLGTIGYCRLWIPGFAELAQPLYAATRPGNDPLVWGEKEEEAFQSLKLALTQPPALALPSLDKPFQLFVEETSGAAKGVLTQALGPWKRPVAYLSKRLDPVAAGWPRCLRAIAAAALLTREASKLTFGQDIEITSSHNLESLLRSPPDKWLTNARITQYQVLLLDPPRVRFKQTAALNPATLLPETDDTLPIHHCLDTLDSLTSTRPDLTDQPLAQAEATLFTDGSSYIRDGKRYAGAAVVTLDSVIWAEPLPIGTSAQKAELIALTKALEWSKDKSVNIYTDSRYAFATLHVHGMIYRERGWLTAGGKAIKNAPEILALLTAVWLPKRVAVMHCKGHQKDDAPTSTGNRRADEVAREVAIRPLSTQATISAGKRTADGSEFEKRTADGSEFESPKKKAKVE

SEQ ID NO: 1149 - protein, 2092 aa, synthetic construct
  source 1..2092: note = Description of Artificial Sequence: Synthetic polypeptide
MPAAKRVKLDGGDKKYSIGLDIGTNSVGWAVITDEYKVPSKKFKVLGNTDRHSIKKNLIGALLFDSGETAEATRLKRTARRRYTRRKNRICYLQEIFSNEMAKVDDSFFHRLEESFLVEEDKKHERHPIFGNIVDEVAYHEKYPTIYHLRKKLVDSTDKADLRLIYLALAHMIKFRGHFLIEGDLNPDNSDVDKLFIQLVQTYNQLFEENPINASGVDAKAILSARLSKSRRLENLIAQLPGEKKNGLFGNLIALSLGLTPNFKSNFDLAEDAKLQLSKDTYDDDLDNLLAQIGDQYADLFLAAKNLSDAILLSDILRVNTEITKAPLSASMIKRYDEHHQDLTLLKALVRQQLPEKYKEIFFDQSKNGYAGYIDGGASQEEFYKFIKPILEKMDGTEELLVKLNREDLLRKQRTFDNGSIPHQIHLGELHAILRRQEDFYPFLKDNREKIEKILTFRIPYYVGPLARGNSRFAWMTRKSEETITPWNFEEVVDKGASAQSFIERMTNFDKNLPNEKVLPKHSLLYEYFTVYNELTKVKYVTEGMRKPAFLSGEQKKAIVDLLFKTNRKVTVKQLKEDYFKKIECFDSVEISGVEDRFNASLGTYHDLLKIIKDKDFLDNEENEDILEDIVLTLTLFEDREMIEERLKTYAHLFDDKVMKQLKRRRYTGWGRLSRKLINGIRDKQSGKTILDFLKSDGFANRNFMQLIHDDSLTFKEDIQKAQVSGQGDSLHEHIANLAGSPAIKKGILQTVKVVDELVKVMGRHKPENIVIEMARENQTTQKGQKNSRERMKRIEEGIKELGSQILKEHPVENTQLQNEKLYLYYLQNGRDMYVDQELDINRLSDYDVDHIVPQSFLKDDSIDNKVLTRSDKARGKSDNVPSEEVVKKMKNYWRQLLNAKLITQRKFDNLTKAERGGLSELDKAGFIKRQLVETRQITKHVAQILDSRMNTKYDENDKLIREVKVITLKSKLVSDFRKDFQFYKVREINNYHHAHDAYLNAVVGTALIKKYPKLESEFVYGDYKVYDVRKMIAKSEQEIGKATAKYFFYSNIMNFFKTEITLANGEIRKRPLIETNGETGEIVWDKGRDFATVRKVLSMPQVNIVKKTEVQTGGFSKESILPKRNSDKLIARKKDWDPKKYGGFDSPTVAYSVLVVAKVEKGKSKKLKSVKELLGITIMERSSFEKNPIDFLEAKGYKEVKKDLIIKLPKYSLFELENGRKRMLASAGELQKGNELALPSKYVNFLYLASHYEKLKGSPEDNEQKQLFVEQHKHYLDEIIEQISEFSKRVILADANLDKVLSAYNKHRDKPIREQAENIIHLFTLTNLGAPAAFKYFDTTIDRKRYTSTKEVLDATLIHQSITGLYETRIDLSQLGGDGGPAPAPGGTAPLEEEYRLFLEAPIQNVTLLEQWKREIPKVWAEINPPGLASTQAPIHVQLLSTALPVRVRQYPITLEAKRSLRETIRKFRAAGILRPVHSPWNTPLLPVRKSGTSEYRMVQDLREVNKRVETIHPTVPNPYTLLSLLPPDRIWYSVLDLKDAFFCIPLAPESQLIFAFEWADAEEGESGQLTWTRLPQGFKNSPTLFNEALNRDLQGFRLDHPSVSLLQYVDDLLIAADTQAACLSATRDLLMTLAELGYRVSGKKAQLCQEEVTYLGFKIHKGSRSLSNSRTQAILQIPVPKTKRQVREFLGTIGYCRLWIPGFAELAQPLYAATRPGNDPLVWGEKEEEAFQSLKLALTQPPALALPSLDKPFQLFVEETSGAAKGVLTQALGPWKRPVAYLSKRLDPVAAGWPRCLRAIAAAALLTREASKLTFGQDIEITSSHNLESLLRSPPDKWLTNARITQYQVLLLDPPRVRFKQTAALNPATLLPETDDTLPIHHCLDTLDSLTSTRPDLTDQPLAQAEATLFTDGSSYIRDGKRYAGAAVVTLDSVIWAEPLPIGTSAQKAELIALTKALEWSKDKSVNIYTDSRYAFATLHVHGMIYRERGWLTAGGKAIKNAPEILALLTAVWLPKRVAVMHCKGHQKDDAPTSTGNRRADEVAREVAIRPLSTQATISAGKRTADGSEFEKRTADGSEFESPKKKAKVE

SEQ ID NO: 1150 - protein, 2096 aa, synthetic construct
  source 1..2096: note = Description of Artificial Sequence: Synthetic polypeptide
MPAAKRVKLDGGDKKYSIGLDIGTNSVGWAVITDEYKVPSKKFKVLGNTDRHSIKKNLIGALLFDSGETAEATRLKRTARRRYTRRKNRICYLQEIFSNEMAKVDDSFFHRLEESFLVEEDKKHERHPIFGNIVDEVAYHEKYPTIYHLRKKLVDSTDKADLRLIYLALAHMIKFRGHFLIEGDLNPDNSDVDKLFIQLVQTYNQLFEENPINASGVDAKAILSARLSKSRRLENLIAQLPGEKKNGLFGNLIALSLGLTPNFKSNFDLAEDAKLQLSKDTYDDDLDNLLAQIGDQYADLFLAAKNLSDAILLSDILRVNTEITKAPLSASMIKRYDEHHQDLTLLKALVRQQLPEKYKEIFFDQSKNGYAGYIDGGASQEEFYKFIKPILEKMDGTEELLVKLNREDLLRKQRTFDNGSIPHQIHLGELHAILRRQEDFYPFLKDNREKIEKILTFRIPYYVGPLARGNSRFAWMTRKSEETITPWNFEEVVDKGASAQSFIERMTNFDKNLPNEKVLPKHSLLYEYFTVYNELTKVKYVTEGMRKPAFLSGEQKKAIVDLLFKTNRKVTVKQLKEDYFKKIECFDSVEISGVEDRFNASLGTYHDLLKIIKDKDFLDNEENEDILEDIVLTLTLFEDREMIEERLKTYAHLFDDKVMKQLKRRRYTGWGRLSRKLINGIRDKQSGKTILDFLKSDGFANRNFMQLIHDDSLTFKEDIQKAQVSGQGDSLHEHIANLAGSPAIKKGILQTVKVVDELVKVMGRHKPENIVIEMARENQTTQKGQKNSRERMKRIEEGIKELGSQILKEHPVENTQLQNEKLYLYYLQNGRDMYVDQELDINRLSDYDVDHIVPQSFLKDDSIDNKVLTRSDKARGKSDNVPSEEVVKKMKNYWRQLLNAKLITQRKFDNLTKAERGGLSELDKAGFIKRQLVETRQITKHVAQILDSRMNTKYDENDKLIREVKVITLKSKLVSDFRKDFQFYKVREINNYHHAHDAYLNAVVGTALIKKYPKLESEFVYGDYKVYDVRKMIAKSEQEIGKATAKYFFYSNIMNFFKTEITLANGEIRKRPLIETNGETGEIVWDKGRDFATVRKVLSMPQVNIVKKTEVQTGGFSKESILPKRNSDKLIARKKDWDPKKYGGFDSPTVAYSVLVVAKVEKGKSKKLKSVKELLGITIMERSSFEKNPIDFLEAKGYKEVKKDLIIKLPKYSLFELENGRKRMLASAGELQKGNELALPSKYVNFLYLASHYEKLKGSPEDNEQKQLFVEQHKHYLDEIIEQISEFSKRVILADANLDKVLSAYNKHRDKPIREQAENIIHLFTLTNLGAPAAFKYFDTTIDRKRYTSTKEVLDATLIHQSITGLYETRIDLSQLGGDGGGGSPAPGGGGGTAPLEEEYRLFLEAPIQNVTLLEQWKREIPKVWAEINPPGLASTQAPIHVQLLSTALPVRVRQYPITLEAKRSLRETIRKFRAAGILRPVHSPWNTPLLPVRKSGTSEYRMVQDLREVNKRVETIHPTVPNPYTLLSLLPPDRIWYSVLDLKDAFFCIPLAPESQLIFAFEWADAEEGESGQLTWTRLPQGFKNSPTLFNEALNRDLQGFRLDHPSVSLLQYVDDLLIAADTQAACLSATRDLLMTLAELGYRVSGKKAQLCQEEVTYLGFKIHKGSRSLSNSRTQAILQIPVPKTKRQVREFLGTIGYCRLWIPGFAELAQPLYAATRPGNDPLVWGEKEEEAFQSLKLALTQPPALALPSLDKPFQLFVEETSGAAKGVLTQALGPWKRPVAYLSKRLDPVAAGWPRCLRAIAAAALLTREASKLTFGQDIEITSSHNLESLLRSPPDKWLTNARITQYQVLLLDPPRVRFKQTAALNPATLLPETDDTLPIHHCLDTLDSLTSTRPDLTDQPLAQAEATLFTDGSSYIRDGKRYAGAAVVTLDSVIWAEPLPIGTSAQKAELIALTKALEWSKDKSVNIYTDSRYAFATLHVHGMIYRERGWLTAGGKAIKNAPEILALLTAVWLPKRVAVMHCKGHQKDDAPTSTGNRRADEVAREVAIRPLSTQATISAGKRTADGSEFEKRTADGSEFESPKKKAKVE

SEQ ID NO: 1151 - protein, 2098 aa, synthetic construct
  source 1..2098: note = Description of Artificial Sequence: Synthetic polypeptide
MPAAKRVKLDGGDKKYSIGLDIGTNSVGWAVITDEYKVPSKKFKVLGNTDRHSIKKNLIGALLFDSGETAEATRLKRTARRRYTRRKNRICYLQEIFSNEMAKVDDSFFHRLEESFLVEEDKKHERHPIFGNIVDEVAYHEKYPTIYHLRKKLVDSTDKADLRLIYLALAHMIKFRGHFLIEGDLNPDNSDVDKLFIQLVQTYNQLFEENPINASGVDAKAILSARLSKSRRLENLIAQLPGEKKNGLFGNLIALSLGLTPNFKSNFDLAEDAKLQLSKDTYDDDLDNLLAQIGDQYADLFLAAKNLSDAILLSDILRVNTEITKAPLSASMIKRYDEHHQDLTLLKALVRQQLPEKYKEIFFDQSKNGYAGYIDGGASQEEFYKFIKPILEKMDGTEELLVKLNREDLLRKQRTFDNGSIPHQIHLGELHAILRRQEDFYPFLKDNREKIEKILTFRIPYYVGPLARGNSRFAWMTRKSEETITPWNFEEVVDKGASAQSFIERMTNFDKNLPNEKVLPKHSLLYEYFTVYNELTKVKYVTEGMRKPAFLSGEQKKAIVDLLFKTNRKVTVKQLKEDYFKKIECFDSVEISGVEDRFNASLGTYHDLLKIIKDKDFLDNEENEDILEDIVLTLTLFEDREMIEERLKTYAHLFDDKVMKQLKRRRYTGWGRLSRKLINGIRDKQSGKTILDFLKSDGFANRNFMQLIHDDSLTFKEDIQKAQVSGQGDSLHEHIANLAGSPAIKKGILQTVKVVDELVKVMGRHKPENIVIEMARENQTTQKGQKNSRERMKRIEEGIKELGSQILKEHPVENTQLQNEKLYLYYLQNGRDMYVDQELDINRLSDYDVDHIVPQSFLKDDSIDNKVLTRSDKARGKSDNVPSEEVVKKMKNYWRQLLNAKLITQRKFDNLTKAERGGLSELDKAGFIKRQLVETRQITKHVAQILDSRMNTKYDENDKLIREVKVITLKSKLVSDFRKDFQFYKVREINNYHHAHDAYLNAVVGTALIKKYPKLESEFVYGDYKVYDVRKMIAKSEQEIGKATAKYFFYSNIMNFFKTEITLANGEIRKRPLIETNGETGEIVWDKGRDFATVRKVLSMPQVNIVKKTEVQTGGFSKESILPKRNSDKLIARKKDWDPKKYGGFDSPTVAYSVLVVAKVEKGKSKKLKSVKELLGITIMERSSFEKNPIDFLEAKGYKEVKKDLIIKLPKYSLFELENGRKRMLASAGELQKGNELALPSKYVNFLYLASHYEKLKGSPEDNEQKQLFVEQHKHYLDEIIEQISEFSKRVILADANLDKVLSAYNKHRDKPIREQAENIIHLFTLTNLGAPAAFKYFDTTIDRKRYTSTKEVLDATLIHQSITGLYETRIDLSQLGGDGGGSSGGGEAAAKGGTAPLEEEYRLFLEAPIQNVTLLEQWKREIPKVWAEINPPGLASTQAPIHVQLLSTALPVRVRQYPITLEAKRSLRETIRKFRAAGILRPVHSPWNTPLLPVRKSGTSEYRMVQDLREVNKRVETIHPTVPNPYTLLSLLPPDRIWYSVLDLKDAFFCIPLAPESQLIFAFEWADAEEGESGQLTWTRLPQGFKNSPTLFNEALNRDLQGFRLDHPSVSLLQYVDDLLIAADTQAACLSATRDLLMTLAELGYRVSGKKAQLCQEEVTYLGFKIHKGSRSLSNSRTQAILQIPVPKTKRQVREFLGTIGYCRLWIPGFAELAQPLYAATRPGNDPLVWGEKEEEAFQSLKLALTQPPALALPSLDKPFQLFVEETSGAAKGVLTQALGPWKRPVAYLSKRLDPVAAGWPRCLRAIAAAALLTREASKLTFGQDIEITSSHNLESLLRSPPDKWLTNARITQYQVLLLDPPRVRFKQTAALNPATLLPETDDTLPIHHCLDTLDSLTSTRPDLTDQPLAQAEATLFTDGSSYIRDGKRYAGAAVVTLDSVIWAEPLPIGTSAQKAELIALTKALEWSKDKSVNIYTDSRYAFATLHVHGMIYRERGWLTAGGKAIKNAPEILALLTAVWLPKRVAVMHCKGHQKDDAPTSTGNRRADEVAREVAIRPLSTQATISAGKRTADGSEFEKRTADGSEFESPKKKAKVE

SEQ ID NO: 1152 - protein, 2097 aa, synthetic construct
  source 1..2097: note = Description of Artificial Sequence: Synthetic polypeptide
MPAAKRVKLDGGDKKYSIGLDIGTNSVGWAVITDEYKVPSKKFKVLGNTDRHSIKKNLIGALLFDSGETAEATRLKRTARRRYTRRKNRICYLQEIFSNEMAKVDDSFFHRLEESFLVEEDKKHERHPIFGNIVDEVAYHEKYPTIYHLRKKLVDSTDKADLRLIYLALAHMIKFRGHFLIEGDLNPDNSDVDKLFIQLVQTYNQLFEENPINASGVDAKAILSARLSKSRRLENLIAQLPGEKKNGLFGNLIALSLGLTPNFKSNFDLAEDAKLQLSKDTYDDDLDNLLAQIGDQYADLFLAAKNLSDAILLSDILRVNTEITKAPLSASMIKRYDEHHQDLTLLKALVRQQLPEKYKEIFFDQSKNGYAGYIDGGASQEEFYKFIKPILEKMDGTEELLVKLNREDLLRKQRTFDNGSIPHQIHLGELHAILRRQEDFYPFLKDNREKIEKILTFRIPYYVGPLARGNSRFAWMTRKSEETITPWNFEEVVDKGASAQSFIERMTNFDKNLPNEKVLPKHSLLYEYFTVYNELTKVKYVTEGMRKPAFLSGEQKKAIVDLLFKTNRKVTVKQLKEDYFKKIECFDSVEISGVEDRFNASLGTYHDLLKIIKDKDFLDNEENEDILEDIVLTLTLFEDREMIEERLKTYAHLFDDKVMKQLKRRRYTGWGRLSRKLINGIRDKQSGKTILDFLKSDGFANRNFMQLIHDDSLTFKEDIQKAQVSGQGDSLHEHIANLAGSPAIKKGILQTVKVVDELVKVMGRHKPENIVIEMARENQTTQKGQKNSRERMKRIEEGIKELGSQILKEHPVENTQLQNEKLYLYYLQNGRDMYVDQELDINRLSDYDVDHIVPQSFLKDDSIDNKVLTRSDKARGKSDNVPSEEVVKKMKNYWRQLLNAKLITQRKFDNLTKAERGGLSELDKAGFIKRQLVETRQITKHVAQILDSRMNTKYDENDKLIREVKVITLKSKLVSDFRKDFQFYKVREINNYHHAHDAYLNAVVGTALIKKYPKLESEFVYGDYKVYDVRKMIAKSEQEIGKATAKYFFYSNIMNFFKTEITLANGEIRKRPLIETNGETGEIVWDKGRDFATVRKVLSMPQVNIVKKTEVQTGGFSKESILPKRNSDKLIARKKDWDPKKYGGFDSPTVAYSVLVVAKVEKGKSKKLKSVKELLGITIMERSSFEKNPIDFLEAKGYKEVKKDLIIKLPKYSLFELENGRKRMLASAGELQKGNELALPSKYVNFLYLASHYEKLKGSPEDNEQKQLFVEQHKHYLDEIIEQISEFSKRVILADANLDKVLSAYNKHRDKPIREQAENIIHLFTLTNLGAPAAFKYFDTTIDRKRYTSTKEVLDATLIHQSITGLYETRIDLSQLGGDGGEAAAKEAAAKGGTAPLEEEYRLFLEAPIQNVTLLEQWKREIPKVWAEINPPGLASTQAPIHVQLLSTALPVRVRQYPITLEAKRSLRETIRKFRAAGILRPVHSPWNTPLLPVRKSGTSEYRMVQDLREVNKRVETIHPTVPNPYTLLSLLPPDRIWYSVLDLKDAFFCIPLAPESQLIFAFEWADAEEGESGQLTWTRLPQGFKNSPTLFNEALNRDLQGFRLDHPSVSLLQYVDDLLIAADTQAACLSATRDLLMTLAELGYRVSGKKAQLCQEEVTYLGFKIHKGSRSLSNSRTQAILQIPVPKTKRQVREFLGTIGYCRLWIPGFAELAQPLYAATRPGNDPLVWGEKEEEAFQSLKLALTQPPALALPSLDKPFQLFVEETSGAAKGVLTQALGPWKRPVAYLSKRLDPVAAGWPRCLRAIAAAALLTREASKLTFGQDIEITSSHNLESLLRSPPDKWLTNARITQYQVLLLDPPRVRFKQTAALNPATLLPETDDTLPIHHCLDTLDSLTSTRPDLTDQPLAQAEATLFTDGSSYIRDGKRYAGAAVVTLDSVIWAEPLPIGTSAQKAELIALTKALEWSKDKSVNIYTDSRYAFATLHVHGMIYRERGWLTAGGKAIKNAPEILALLTAVWLPKRVAVMHCKGHQKDDAPTSTGNRRADEVAREVAIRPLSTQATISAGKRTADGSEFEKRTADGSEFESPKKKAKVE

SEQ ID NO: 1153 - protein, 2096 aa, synthetic construct
  source 1..2096: note = Description of Artificial Sequence: Synthetic polypeptide
MPAAKRVKLDGGDKKYSIGLDIGTNSVGWAVITDEYKVPSKKFKVLGNTDRHSIKKNLIGALLFDSGETAEATRLKRTARRRYTRRKNRICYLQEIFSNEMAKVDDSFFHRLEESFLVEEDKKHERHPIFGNIVDEVAYHEKYPTIYHLRKKLVDSTDKADLRLIYLALAHMIKFRGHFLIEGDLNPDNSDVDKLFIQLVQTYNQLFEENPINASGVDAKAILSARLSKSRRLENLIAQLPGEKKNGLFGNLIALSLGLTPNFKSNFDLAEDAKLQLSKDTYDDDLDNLLAQIGDQYADLFLAAKNLSDAILLSDILRVNTEITKAPLSASMIKRYDEHHQDLTLLKALVRQQLPEKYKEIFFDQSKNGYAGYIDGGASQEEFYKFIKPILEKMDGTEELLVKLNREDLLRKQRTFDNGSIPHQIHLGELHAILRRQEDFYPFLKDNREKIEKILTFRIPYYVGPLARGNSRFAWMTRKSEETITPWNFEEVVDKGASAQSFIERMTNFDKNLPNEKVLPKHSLLYEYFTVYNELTKVKYVTEGMRKPAFLSGEQKKAIVDLLFKTNRKVTVKQLKEDYFKKIECFDSVEISGVEDRFNASLGTYHDLLKIIKDKDFLDNEENEDILEDIVLTLTLFEDREMIEERLKTYAHLFDDKVMKQLKRRRYTGWGRLSRKLINGIRDKQSGKTILDFLKSDGFANRNFMQLIHDDSLTFKEDIQKAQVSGQGDSLHEHIANLAGSPAIKKGILQTVKVVDELVKVMGRHKPENIVIEMARENQTTQKGQKNSRERMKRIEEGIKELGSQILKEHPVENTQLQNEKLYLYYLQNGRDMYVDQELDINRLSDYDVDHIVPQSFLKDDSIDNKVLTRSDKARGKSDNVPSEEVVKKMKNYWRQLLNAKLITQRKFDNLTKAERGGLSELDKAGFIKRQLVETRQITKHVAQILDSRMNTKYDENDKLIREVKVITLKSKLVSDFRKDFQFYKVREINNYHHAHDAYLNAVVGTALIKKYPKLESEFVYGDYKVYDVRKMIAKSEQEIGKATAKYFFYSNIMNFFKTEITLANGEIRKRPLIETNGETGEIVWDKGRDFATVRKVLSMPQVNIVKKTEVQTGGFSKESILPKRNSDKLIARKKDWDPKKYGGFDSPTVAYSVLVVAKVEKGKSKKLKSVKELLGITIMERSSFEKNPIDFLEAKGYKEVKKDLIIKLPKYSLFELENGRKRMLASAGELQKGNELALPSKYVNFLYLASHYEKLKGSPEDNEQKQLFVEQHKHYLDEIIEQISEFSKRVILADANLDKVLSAYNKHRDKPIREQAENIIHLFTLTNLGAPAAFKYFDTTIDRKRYTSTKEVLDATLIHQSITGLYETRIDLSQLGGDGGGGSPAPGSSGGTAPLEEEYRLFLEAPIQNVTLLEQWKREIPKVWAEINPPGLASTQAPIHVQLLSTALPVRVRQYPITLEAKRSLRETIRKFRAAGILRPVHSPWNTPLLPVRKSGTSEYRMVQDLREVNKRVETIHPTVPNPYTLLSLLPPDRIWYSVLDLKDAFFCIPLAPESQLIFAFEWADAEEGESGQLTWTRLPQGFKNSPTLFNEALNRDLQGFRLDHPSVSLLQYVDDLLIAADTQAACLSATRDLLMTLAELGYRVSGKKAQLCQEEVTYLGFKIHKGSRSLSNSRTQAILQIPVPKTKRQVREFLGTIGYCRLWIPGFAELAQPLYAATRPGNDPLVWGEKEEEAFQSLKLALTQPPALALPSLDKPFQLFVEETSGAAKGVLTQALGPWKRPVAYLSKRLDPVAAGWPRCLRAIAAAALLTREASKLTFGQDIEITSSHNLESLLRSPPDKWLTNARITQYQVLLLDPPRVRFKQTAALNPATLLPETDDTLPIHHCLDTLDSLTSTRPDLTDQPLAQAEATLFTDGSSYIRDGKRYAGAAVVTLDSVIWAEPLPIGTSAQKAELIALTKALEWSKDKSVNIYTDSRYAFATLHVHGMIYRERGWLTAGGKAIKNAPEILALLTAVWLPKRVAVMHCKGHQKDDAPTSTGNRRADEVAREVAIRPLSTQATISAGKRTADGSEFEKRTADGSEFESPKKKAKVE

SEQ ID NO: 1154 - protein, 2098 aa, synthetic construct
  source 1..2098: note = Description of Artificial Sequence: Synthetic polypeptide
MPAAKRVKLDGGDKKYSIGLDIGTNSVGWAVITDEYKVPSKKFKVLGNTDRHSIKKNLIGALLFDSGETAEATRLKRTARRRYTRRKNRICYLQEIFSNEMAKVDDSFFHRLEESFLVEEDKKHERHPIFGNIVDEVAYHEKYPTIYHLRKKLVDSTDKADLRLIYLALAHMIKFRGHFLIEGDLNPDNSDVDKLFIQLVQTYNQLFEENPINASGVDAKAILSARLSKSRRLENLIAQLPGEKKNGLFGNLIALSLGLTPNFKSNFDLAEDAKLQLSKDTYDDDLDNLLAQIGDQYADLFLAAKNLSDAILLSDILRVNTEITKAPLSASMIKRYDEHHQDLTLLKALVRQQLPEKYKEIFFDQSKNGYAGYIDGGASQEEFYKFIKPILEKMDGTEELLVKLNREDLLRKQRTFDNGSIPHQIHLGELHAILRRQEDFYPFLKDNREKIEKILTFRIPYYVGPLARGNSRFAWMTRKSEETITPWNFEEVVDKGASAQSFIERMTNFDKNLPNEKVLPKHSLLYEYFTVYNELTKVKYVTEGMRKPAFLSGEQKKAIVDLLFKTNRKVTVKQLKEDYFKKIECFDSVEISGVEDRFNASLGTYHDLLKIIKDKDFLDNEENEDILEDIVLTLTLFEDREMIEERLKTYAHLFDDKVMKQLKRRRYTGWGRLSRKLINGIRDKQSGKTILDFLKSDGFANRNFMQLIHDDSLTFKEDIQKAQVSGQGDSLHEHIANLAGSPAIKKGILQTVKVVDELVKVMGRHKPENIVIEMARENQTTQKGQKNSRERMKRIEEGIKELGSQILKEHPVENTQLQNEKLYLYYLQNGRDMYVDQELDINRLSDYDVDHIVPQSFLKDDSIDNKVLTRSDKARGKSDNVPSEEVVKKMKNYWRQLLNAKLITQRKFDNLTKAERGGLSELDKAGFIKRQLVETRQITKHVAQILDSRMNTKYDENDKLIREVKVITLKSKLVSDFRKDFQFYKVREINNYHHAHDAYLNAVVGTALIKKYPKLESEFVYGDYKVYDVRKMIAKSEQEIGKATAKYFFYSNIMNFFKTEITLANGEIRKRPLIETNGETGEIVWDKGRDFATVRKVLSMPQVNIVKKTEVQTGGFSKESILPKRNSDKLIARKKDWDPKKYGGFDSPTVAYSVLVVAKVEKGKSKKLKSVKELLGITIMERSSFEKNPIDFLEAKGYKEVKKDLIIKLPKYSLFELENGRKRMLASAGELQKGNELALPSKYVNFLYLASHYEKLKGSPEDNEQKQLFVEQHKHYLDEIIEQISEFSKRVILADANLDKVLSAYNKHRDKPIREQAENIIHLFTLTNLGAPAAFKYFDTTIDRKRYTSTKEVLDATLIHQSITGLYETRIDLSQLGGDGGGGGEAAAKGGSGGTAPLEEEYRLFLEAPIQNVTLLEQWKREIPKVWAEINPPGLASTQAPIHVQLLSTALPVRVRQYPITLEAKRSLRETIRKFRAAGILRPVHSPWNTPLLPVRKSGTSEYRMVQDLREVNKRVETIHPTVPNPYTLLSLLPPDRIWYSVLDLKDAFFCIPLAPESQLIFAFEWADAEEGESGQLTWTRLPQGFKNSPTLFNEALNRDLQGFRLDHPSVSLLQYVDDLLIAADTQAACLSATRDLLMTLAELGYRVSGKKAQLCQEEVTYLGFKIHKGSRSLSNSRTQAILQIPVPKTKRQVREFLGTIGYCRLWIPGFAELAQPLYAATRPGNDPLVWGEKEEEAFQSLKLALTQPPALALPSLDKPFQLFVEETSGAAKGVLTQALGPWKRPVAYLSKRLDPVAAGWPRCLRAIAAAALLTREASKLTFGQDIEITSSHNLESLLRSPPDKWLTNARITQYQVLLLDPPRVRFKQTAALNPATLLPETDDTLPIHHCLDTLDSLTSTRPDLTDQPLAQAEATLFTDGSSYIRDGKRYAGAAVVTLDSVIWAEPLPIGTSAQKAELIALTKALEWSKDKSVNIYTDSRYAFATLHVHGMIYRERGWLTAGGKAIKNAPEILALLTAVWLPKRVAVMHCKGHQKDDAPTSTGNRRADEVAREVAIRPLSTQATISAGKRTADGSEFEKRTADGSEFESPKKKAKVE

SEQ ID NO: 1155 - protein, 2098 aa, synthetic construct
  source 1..2098: note = Description of Artificial Sequence: Synthetic polypeptide
MPAAKRVKLDGGDKKYSIGLDIGTNSVGWAVITDEYKVPSKKFKVLGNTDRHSIKKNLIGALLFDSGETAEATRLKRTARRRYTRRKNRICYLQEIFSNEMAKVDDSFFHRLEESFLVEEDKKHERHPIFGNIVDEVAYHEKYPTIYHLRKKLVDSTDKADLRLIYLALAHMIKFRGHFLIEGDLNPDNSDVDKLFIQLVQTYNQLFEENPINASGVDAKAILSARLSKSRRLENLIAQLPGEKKNGLFGNLIALSLGLTPNFKSNFDLAEDAKLQLSKDTYDDDLDNLLAQIGDQYADLFLAAKNLSDAILLSDILRVNTEITKAPLSASMIKRYDEHHQDLTLLKALVRQQLPEKYKEIFFDQSKNGYAGYIDGGASQEEFYKFIKPILEKMDGTEELLVKLNREDLLRKQRTFDNGSIPHQIHLGELHAILRRQEDFYPFLKDNREKIEKILTFRIPYYVGPLARGNSRFAWMTRKSEETITPWNFEEVVDKGASAQSFIERMTNFDKNLPNEKVLPKHSLLYEYFTVYNELTKVKYVTEGMRKPAFLSGEQKKAIVDLLFKTNRKVTVKQLKEDYFKKIECFDSVEISGVEDRFNASLGTYHDLLKIIKDKDFLDNEENEDILEDIVLTLTLFEDREMIEERLKTYAHLFDDKVMKQLKRRRYTGWGRLSRKLINGIRDKQSGKTILDFLKSDGFANRNFMQLIHDDSLTFKEDIQKAQVSGQGDSLHEHIANLAGSPAIKKGILQTVKVVDELVKVMGRHKPENIVIEMARENQTTQKGQKNSRERMKRIEEGIKELGSQILKEHPVENTQLQNEKLYLYYLQNGRDMYVDQELDINRLSDYDVDHIVPQSFLKDDSIDNKVLTRSDKARGKSDNVPSEEVVKKMKNYWRQLLNAKLITQRKFDNLTKAERGGLSELDKAGFIKRQLVETRQITKHVAQILDSRMNTKYDENDKLIREVKVITLKSKLVSDFRKDFQFYKVREINNYHHAHDAYLNAVVGTALIKKYPKLESEFVYGDYKVYDVRKMIAKSEQEIGKATAKYFFYSNIMNFFKTEITLANGEIRKRPLIETNGETGEIVWDKGRDFATVRKVLSMPQVNIVKKTEVQTGGFSKESILPKRNSDKLIARKKDWDPKKYGGFDSPTVAYSVLVVAKVEKGKSKKLKSVKELLGITIMERSSFEKNPIDFLEAKGYKEVKKDLIIKLPKYSLFELENGRKRMLASAGELQKGNELALPSKYVNFLYLASHYEKLKGSPEDNEQKQLFVEQHKHYLDEIIEQISEFSKRVILADANLDKVLSAYNKHRDKPIREQAENIIHLFTLTNLGAPAAFKYFDTTIDRKRYTSTKEVLDATLIHQSITGLYETRIDLSQLGGDGGGGGEAAAKPAPGGTAPLEEEYRLFLEAPIQNVTLLEQWKREIPKVWAEINPPGLASTQAPIHVQLLSTALPVRVRQYPITLEAKRSLRETIRKFRAAGILRPVHSPWNTPLLPVRKSGTSEYRMVQDLREVNKRVETIHPTVPNPYTLLSLLPPDRIWYSVLDLKDAFFCIPLAPESQLIFAFEWADAEEGESGQLTWTRLPQGFKNSPTLFNEALNRDLQGFRLDHPSVSLLQYVDDLLIAADTQAACLSATRDLLMTLAELGYRVSGKKAQLCQEEVTYLGFKIHKGSRSLSNSRTQAILQIPVPKTKRQVREFLGTIGYCRLWIPGFAELAQPLYAATRPGNDPLVWGEKEEEAFQSLKLALTQPPALALPSLDKPFQLFVEETSGAAKGVLTQALGPWKRPVAYLSKRLDPVAAGWPRCLRAIAAAALLTREASKLTFGQDIEITSSHNLESLLRSPPDKWLTNARITQYQVLLLDPPRVRFKQTAALNPATLLPETDDTLPIHHCLDTLDSLTSTRPDLTDQPLAQAEATLFTDGSSYIRDGKRYAGAAVVTLDSVIWAEPLPIGTSAQKAELIALTKALEWSKDKSVNIYTDSRYAFATLHVHGMIYRERGWLTAGGKAIKNAPEILALLTAVWLPKRVAVMHCKGHQKDDAPTSTGNRRADEVAREVAIRPLSTQATISAGKRTADGSEFEKRTADGSEFESPKKKAKVE

SEQ ID NO: 1156 - protein, 2098 aa, synthetic construct
  source 1..2098: note = Description of Artificial Sequence: Synthetic polypeptide
MPAAKRVKLDGGDKKYSIGLDIGTNSVGWAVITDEYKVPSKKFKVLGNTDRHSIKKNLIGALLFDSGETAEATRLKRTARRRYTRRKNRICYLQEIFSNEMAKVDDSFFHRLEESFLVEEDKKHERHPIFGNIVDEVAYHEKYPTIYHLRKKLVDSTDKADLRLIYLALAHMIKFRGHFLIEGDLNPDNSDVDKLFIQLVQTYNQLFEENPINASGVDAKAILSARLSKSRRLENLIAQLPGEKKNGLFGNLIALSLGLTPNFKSNFDLAEDAKLQLSKDTYDDDLDNLLAQIGDQYADLFLAAKNLSDAILLSDILRVNTEITKAPLSASMIKRYDEHHQDLTLLKALVRQQLPEKYKEIFFDQSKNGYAGYIDGGASQEEFYKFIKPILEKMDGTEELLVKLNREDLLRKQRTFDNGSIPHQIHLGELHAILRRQEDFYPFLKDNREKIEKILTFRIPYYVGPLARGNSRFAWMTRKSEETITPWNFEEVVDKGASAQSFIERMTNFDKNLPNEKVLPKHSLLYEYFTVYNELTKVKYVTEGMRKPAFLSGEQKKAIVDLLFKTNRKVTVKQLKEDYFKKIECFDSVEISGVEDRFNASLGTYHDLLKIIKDKDFLDNEENEDILEDIVLTLTLFEDREMIEERLKTYAHLFDDKVMKQLKRRRYTGWGRLSRKLINGIRDKQSGKTILDFLKSDGFANRNFMQLIHDDSLTFKEDIQKAQVSGQGDSLHEHIANLAGSPAIKKGILQTVKVVDELVKVMGRHKPENIVIEMARENQTTQKGQKNSRERMKRIEEGIKELGSQILKEHPVENTQLQNEKLYLYYLQNGRDMYVDQELDINRLSDYDVDHIVPQSFLKDDSIDNKVLTRSDKARGKSDNVPSEEVVKKMKNYWRQLLNAKLITQRKFDNLTKAERGGLSELDKAGFIKRQLVETRQITKHVAQILDSRMNTKYDENDKLIREVKVITLKSKLVSDFRKDFQFYKVREINNYHHAHDAYLNAVVGTALIKKYPKLESEFVYGDYKVYDVRKMIAKSEQEIGKATAKYFFYSNIMNFFKTEITLANGEIRKRPLIETNGETGEIVWDKGRDFATVRKVLSMPQVNIVKKTEVQTGGFSKESILPKRNSDKLIARKKDWDPKKYGGFDSPTVAYSVLVVAKVEKGKSKKLKSVKELLGITIMERSSFEKNPIDFLEAKGYKEVKKDLIIKLPKYSLFELENGRKRMLASAGELQKGNELALPSKYVNFLYLASHYEKLKGSPEDNEQKQLFVEQHKHYLDEIIEQISEFSKRVILADANLDKVLSAYNKHRDKPIREQAENIIHLFTLTNLGAPAAFKYFDTTIDRKRYTSTKEVLDATLIHQSITGLYETRIDLSQLGGDGGEAAAKPAPGGSGGTAPLEEEYRLFLEAPIQNVTLLEQWKREIPKVWAEINPPGLASTQAPIHVQLLSTALPVRVRQYPITLEAKRSLRETIRKFRAAGILRPVHSPWNTPLLPVRKSGTSEYRMVQDLREVNKRVETIHPTVPNPYTLLSLLPPDRIWYSVLDLKDAFFCIPLAPESQLIFAFEWADAEEGESGQLTWTRLPQGFKNSPTLFNEALNRDLQGFRLDHPSVSLLQYVDDLLIAADTQAACLSATRDLLMTLAELGYRVSGKKAQLCQEEVTYLGFKIHKGSRSLSNSRTQAILQIPVPKTKRQVREFLGTIGYCRLWIPGFAELAQPLYAATRPGNDPLVWGEKEEEAFQSLKLALTQPPALALPSLDKPFQLFVEETSGAAKGVLTQALGPWKRPVAYLSKRLDPVAAGWPRCLRAIAAAALLTREASKLTFGQDIEITSSHNLESLLRSPPDKWLTNARITQYQVLLLDPPRVRFKQTAALNPATLLPETDDTLPIHHCLDTLDSLTSTRPDLTDQPLAQAEATLFTDGSSYIRDGKRYAGAAVVTLDSVIWAEPLPIGTSAQKAELIALTKALEWSKDKSVNIYTDSRYAFATLHVHGMIYRERGWLTAGGKAIKNAPEILALLTAVWLPKRVAVMHCKGHQKDDAPTSTGNRRADEVAREVAIRPLSTQATISAGKRTADGSEFEKRTADGSEFESPKKKAKVE

SEQ ID NO: 1157 - protein, 2098 aa, synthetic construct
  source 1..2098: note = Description of Artificial Sequence: Synthetic polypeptide
MPAAKRVKLDGGDKKYSIGLDIGTNSVGWAVITDEYKVPSKKFKVLGNTDRHSIKKNLIGALLFDSGETAEATRLKRTARRRYTRRKNRICYLQEIFSNEMAKVDDSFFHRLEESFLVEEDKKHERHPIFGNIVDEVAYHEKYPTIYHLRKKLVDSTDKADLRLIYLALAHMIKFRGHFLIEGDLNPDNSDVDKLFIQLVQTYNQLFEENPINASGVDAKAILSARLSKSRRLENLIAQLPGEKKNGLFGNLIALSLGLTPNFKSNFDLAEDAKLQLSKDTYDDDLDNLLAQIGDQYADLFLAAKNLSDAILLSDILRVNTEITKAPLSASMIKRYDEHHQDLTLLKALVRQQLPEKYKEIFFDQSKNGYAGYIDGGASQEEFYKFIKPILEKMDGTEELLVKLNREDLLRKQRTFDNGSIPHQIHLGELHAILRRQEDFYPFLKDNREKIEKILTFRIPYYVGPLARGNSRFAWMTRKSEETITPWNFEEVVDKGASAQSFIERMTNFDKNLPNEKVLPKHSLLYEYFTVYNELTKVKYVTEGMRKPAFLSGEQKKAIVDLLFKTNRKVTVKQLKEDYFKKIECFDSVEISGVEDRFNASLGTYHDLLKIIKDKDFLDNEENEDILEDIVLTLTLFEDREMIEERLKTYAHLFDDKVMKQLKRRRYTGWGRLSRKLINGIRDKQSGKTILDFLKSDGFANRNFMQLIHDDSLTFKEDIQKAQVSGQGDSLHEHIANLAGSPAIKKGILQTVKVVDELVKVMGRHKPENIVIEMARENQTTQKGQKNSRERMKRIEEGIKELGSQILKEHPVENTQLQNEKLYLYYLQNGRDMYVDQELDINRLSDYDVDHIVPQSFLKDDSIDNKVLTRSDKARGKSDNVPSEEVVKKMKNYWRQLLNAKLITQRKFDNLTKAERGGLSELDKAGFIKRQLVETRQITKHVAQILDSRMNTKYDENDKLIREVKVITLKSKLVSDFRKDFQFYKVREINNYHHAHDAYLNAVVGTALIKKYPKLESEFVYGDYKVYDVRKMIAKSEQEIGKATAKYFFYSNIMNFFKTEITLANGEIRKRPLIETNGETGEIVWDKGRDFATVRKVLSMPQVNIVKKTEVQTGGFSKESILPKRNSDKLIARKKDWDPKKYGGFDSPTVAYSVLVVAKVEKGKSKKLKSVKELLGITIMERSSFEKNPIDFLEAKGYKEVKKDLIIKLPKYSLFELENGRKRMLASAGELQKGNELALPSKYVNFLYLASHYEKLKGSPEDNEQKQLFVEQHKHYLDEIIEQISEFSKRVILADANLDKVLSAYNKHRDKPIREQAENIIHLFTLTNLGAPAAFKYFDTTIDRKRYTSTKEVLDATLIHQSITGLYETRIDLSQLGGDGGEAAAKGGGGGSGGTAPLEEEYRLFLEAPIQNVTLLEQWKREIPKVWAEINPPGLASTQAPIHVQLLSTALPVRVRQYPITLEAKRSLRETIRKFRAAGILRPVHSPWNTPLLPVRKSGTSEYRMVQDLREVNKRVETIHPTVPNPYTLLSLLPPDRIWYSVLDLKDAFFCIPLAPESQLIFAFEWADAEEGESGQLTWTRLPQGFKNSPTLFNEALNRDLQGFRLDHPSVSLLQYVDDLLIAADTQAACLSATRDLLMTLAELGYRVSGKKAQLCQEEVTYLGFKIHKGSRSLSNSRTQAILQIPVPKTKRQVREFLGTIGYCRLWIPGFAELAQPLYAATRPGNDPLVWGEKEEEAFQSLKLALTQPPALALPSLDKPFQLFVEETSGAAKGVLTQALGPWKRPVAYLSKRLDPVAAGWPRCLRAIAAAALLTREASKLTFGQDIEITSSHNLESLLRSPPDKWLTNARITQYQVLLLDPPRVRFKQTAALNPATLLPETDDTLPIHHCLDTLDSLTSTRPDLTDQPLAQAEATLFTDGSSYIRDGKRYAGAAVVTLDSVIWAEPLPIGTSAQKAELIALTKALEWSKDKSVNIYTDSRYAFATLHVHGMIYRERGWLTAGGKAIKNAPEILALLTAVWLPKRVAVMHCKGHQKDDAPTSTGNRRADEVAREVAIRPLSTQATISAGKRTADGSEFEKRTADGSEFESPKKKAKVE

SEQ ID NO: 1158 - protein, 2102 aa, synthetic construct
  source 1..2102: note = Description of Artificial Sequence: Synthetic polypeptide
MPAAKRVKLDGGDKKYSIGLDIGTNSVGWAVITDEYKVPSKKFKVLGNTDRHSIKKNLIGALLFDSGETAEATRLKRTARRRYTRRKNRICYLQEIFSNEMAKVDDSFFHRLEESFLVEEDKKHERHPIFGNIVDEVAYHEKYPTIYHLRKKLVDSTDKADLRLIYLALAHMIKFRGHFLIEGDLNPDNSDVDKLFIQLVQTYNQLFEENPINASGVDAKAILSARLSKSRRLENLIAQLPGEKKNGLFGNLIALSLGLTPNFKSNFDLAEDAKLQLSKDTYDDDLDNLLAQIGDQYADLFLAAKNLSDAILLSDILRVNTEITKAPLSASMIKRYDEHHQDLTLLKALVRQQLPEKYKEIFFDQSKNGYAGYIDGGASQEEFYKFIKPILEKMDGTEELLVKLNREDLLRKQRTFDNGSIPHQIHLGELHAILRRQEDFYPFLKDNREKIEKILTFRIPYYVGPLARGNSRFAWMTRKSEETITPWNFEEVVDKGASAQSFIERMTNFDKNLPNEKVLPKHSLLYEYFTVYNELTKVKYVTEGMRKPAFLSGEQKKAIVDLLFKTNRKVTVKQLKEDYFKKIECFDSVEISGVEDRFNASLGTYHDLLKIIKDKDFLDNEENEDILEDIVLTLTLFEDREMIEERLKTYAHLFDDKVMKQLKRRRYTGWGRLSRKLINGIRDKQSGKTILDFLKSDGFANRNFMQLIHDDSLTFKEDIQKAQVSGQGDSLHEHIANLAGSPAIKKGILQTVKVVDELVKVMGRHKPENIVIEMARENQTTQKGQKNSRERMKRIEEGIKELGSQILKEHPVENTQLQNEKLYLYYLQNGRDMYVDQELDINRLSDYDVDHIVPQSFLKDDSIDNKVLTRSDKARGKSDNVPSEEVVKKMKNYWRQLLNAKLITQRKFDNLTKAERGGLSELDKAGFIKRQLVETRQITKHVAQILDSRMNTKYDENDKLIREVKVITLKSKLVSDFRKDFQFYKVREINNYHHAHDAYLNAVVGTALIKKYPKLESEFVYGDYKVYDVRKMIAKSEQEIGKATAKYFFYSNIMNFFKTEITLANGEIRKRPLIETNGETGEIVWDKGRDFATVRKVLSMPQVNIVKKTEVQTGGFSKESILPKRNSDKLIARKKDWDPKKYGGFDSPTVAYSVLVVAKVEKGKSKKLKSVKELLGITIMERSSFEKNPIDFLEAKGYKEVKKDLIIKLPKYSLFELENGRKRMLASAGELQKGNELALPSKYVNFLYLASHYEKLKGSPEDNEQKQLFVEQHKHYLDEIIEQISEFSKRVILADANLDKVLSAYNKHRDKPIREQAENIIHLFTLTNLGAPAAFKYFDTTIDRKRYTSTKEVLDATLIHQSITGLYETRIDLSQLGGDGGGGGGSEAAAKGGGGSGGTAPLEEEYRLFLEAPIQNVTLLEQWKREIPKVWAEINPPGLASTQAPIHVQLLSTALPVRVRQYPITLEAKRSLRETIRKFRAAGILRPVHSPWNTPLLPVRKSGTSEYRMVQDLREVNKRVETIHPTVPNPYTLLSLLPPDRIWYSVLDLKDAFFCIPLAPESQLIFAFEWADAEEGESGQLTWTRLPQGFKNSPTLFNEALNRDLQGFRLDHPSVSLLQYVDDLLIAADTQAACLSATRDLLMTLAELGYRVSGKKAQLCQEEVTYLGFKIHKGSRSLSNSRTQAILQIPVPKTKRQVREFLGTIGYCRLWIPGFAELAQPLYAATRPGNDPLVWGEKEEEAFQSLKLALTQPPALALPSLDKPFQLFVEETSGAAKGVLTQALGPWKRPVAYLSKRLDPVAAGWPRCLRAIAAAALLTREASKLTFGQDIEITSSHNLESLLRSPPDKWLTNARITQYQVLLLDPPRVRFKQTAALNPATLLPETDDTLPIHHCLDTLDSLTSTRPDLTDQPLAQAEATLFTDGSSYIRDGKRYAGAAVVTLDSVIWAEPLPIGTSAQKAELIALTKALEWSKDKSVNIYTDSRYAFATLHVHGMIYRERGWLTAGGKAIKNAPEILALLTAVWLPKRVAVMHCKGHQKDDAPTSTGNRRADEVAREVAIRPLSTQATISAGKRTADGSEFEKRTADGSEFESPKKKAKVE

SEQ ID NO: 1159 - protein, 2096 aa, synthetic construct
  source 1..2096: note = Description of Artificial Sequence: Synthetic polypeptide
MPAAKRVKLDGGDKKYSIGLDIGTNSVGWAVITDEYKVPSKKFKVLGNTDRHSIKKNLIGALLFDSGETAEATRLKRTARRRYTRRKNRICYLQEIFSNEMAKVDDSFFHRLEESFLVEEDKKHERHPIFGNIVDEVAYHEKYPTIYHLRKKLVDSTDKADLRLIYLALAHMIKFRGHFLIEGDLNPDNSDVDKLFIQLVQTYNQLFEENPINASGVDAKAILSARLSKSRRLENLIAQLPGEKKNGLFGNLIALSLGLTPNFKSNFDLAEDAKLQLSKDTYDDDLDNLLAQIGDQYADLFLAAKNLSDAILLSDILRVNTEITKAPLSASMIKRYDEHHQDLTLLKALVRQQLPEKYKEIFFDQSKNGYAGYIDGGASQEEFYKFIKPILEKMDGTEELLVKLNREDLLRKQRTFDNGSIPHQIHLGELHAILRRQEDFYPFLKDNREKIEKILTFRIPYYVGPLARGNSRFAWMTRKSEETITPWNFEEVVDKGASAQSFIERMTNFDKNLPNEKVLPKHSLLYEYFTVYNELTKVKYVTEGMRKPAFLSGEQKKAIVDLLFKTNRKVTVKQLKEDYFKKIECFDSVEISGVEDRFNASLGTYHDLLKIIKDKDFLDNEENEDILEDIVLTLTLFEDREMIEERLKTYAHLFDDKVMKQLKRRRYTGWGRLSRKLINGIRDKQSGKTILDFLKSDGFANRNFMQLIHDDSLTFKEDIQKAQVSGQGDSLHEHIANLAGSPAIKKGILQTVKVVDELVKVMGRHKPENIVIEMARENQTTQKGQKNSRERMKRIEEGIKELGSQILKEHPVENTQLQNEKLYLYYLQNGRDMYVDQELDINRLSDYDVDHIVPQSFLKDDSIDNKVLTRSDKARGKSDNVPSEEVVKKMKNYWRQLLNAKLITQRKFDNLTKAERGGLSELDKAGFIKRQLVETRQITKHVAQILDSRMNTKYDENDKLIREVKVITLKSKLVSDFRKDFQFYKVREINNYHHAHDAYLNAVVGTALIKKYPKLESEFVYGDYKVYDVRKMIAKSEQEIGKATAKYFFYSNIMNFFKTEITLANGEIRKRPLIETNGETGEIVWDKGRDFATVRKVLSMPQVNIVKKTEVQTGGFSKESILPKRNSDKLIARKKDWDPKKYGGFDSPTVAYSVLVVAKVEKGKSKKLKSVKELLGITIMERSSFEKNPIDFLEAKGYKEVKKDLIIKLPKYSLFELENGRKRMLASAGELQKGNELALPSKYVNFLYLASHYEKLKGSPEDNEQKQLFVEQHKHYLDEIIEQISEFSKRVILADANLDKVLSAYNKHRDKPIREQAENIIHLFTLTNLGAPAAFKYFDTTIDRKRYTSTKEVLDATLIHQSITGLYETRIDLSQLGGDGGPAPGGGGGSGGTAPLEEEYRLFLEAPIQNVTLLEQWKREIPKVWAEINPPGLASTQAPIHVQLLSTALPVRVRQYPITLEAKRSLRETIRKFRAAGILRPVHSPWNTPLLPVRKSGTSEYRMVQDLREVNKRVETIHPTVPNPYTLLSLLPPDRIWYSVLDLKDAFFCIPLAPESQLIFAFEWADAEEGESGQLTWTRLPQGFKNSPTLFNEALNRDLQGFRLDHPSVSLLQYVDDLLIAADTQAACLSATRDLLMTLAELGYRVSGKKAQLCQEEVTYLGFKIHKGSRSLSNSRTQAILQIPVPKTKRQVREFLGTIGYCRLWIPGFAELAQPLYAATRPGNDPLVWGEKEEEAFQSLKLALTQPPALALPSLDKPFQLFVEETSGAAKGVLTQALGPWKRPVAYLSKRLDPVAAGWPRCLRAIAAAALLTREASKLTFGQDIEITSSHNLESLLRSPPDKWLTNARITQYQVLLLDPPRVRFKQTAALNPATLLPETDDTLPIHHCLDTLDSLTSTRPDLTDQPLAQAEATLFTDGSSYIRDGKRYAGAAVVTLDSVIWAEPLPIGTSAQKAELIALTKALEWSKDKSVNIYTDSRYAFATLHVHGMIYRERGWLTAGGKAIKNAPEILALLTAVWLPKRVAVMHCKGHQKDDAPTSTGNRRADEVAREVAIRPLSTQATISAGKRTADGSEFEKRTADGSEFESPKKKAKVE

SEQ ID NO: 1160 - protein, 2098 aa, synthetic construct
  source 1..2098: note = Description of Artificial Sequence: Synthetic polypeptide
MPAAKRVKLDGGDKKYSIGLDIGTNSVGWAVITDEYKVPSKKFKVLGNTDRHSIKKNLIGALLFDSGETAEATRLKRTARRRYTRRKNRICYLQEIFSNEMAKVDDSFFHRLEESFLVEEDKKHERHPIFGNIVDEVAYHEKYPTIYHLRKKLVDSTDKADLRLIYLALAHMIKFRGHFLIEGDLNPDNSDVDKLFIQLVQTYNQLFEENPINASGVDAKAILSARLSKSRRLENLIAQLPGEKKNGLFGNLIALSLGLTPNFKSNFDLAEDAKLQLSKDTYDDDLDNLLAQIGDQYADLFLAAKNLSDAILLSDILRVNTEITKAPLSASMIKRYDEHHQDLTLLKALVRQQLPEKYKEIFFDQSKNGYAGYIDGGASQEEFYKFIKPILEKMDGTEELLVKLNREDLLRKQRTFDNGSIPHQIHLGELHAILRRQEDFYPFLKDNREKIEKILTFRIPYYVGPLARGNSRFAWMTRKSEETITPWNFEEVVDKGASAQSFIERMTNFDKNLPNEKVLPKHSLLYEYFTVYNELTKVKYVTEGMRKPAFLSGEQKKAIVDLLFKTNRKVTVKQLKEDYFKKIECFDSVEISGVEDRFNASLGTYHDLLKIIKDKDFLDNEENEDILEDIVLTLTLFEDREMIEERLKTYAHLFDDKVMKQLKRRRYTGWGRLSRKLINGIRDKQSGKTILDFLKSDGFANRNFMQLIHDDSLTFKEDIQKAQVSGQGDSLHEHIANLAGSPAIKKGILQTVKVVDELVKVMGRHKPENIVIEMARENQTTQKGQKNSRERMKRIEEGIKELGSQILKEHPVENTQLQNEKLYLYYLQNGRDMYVDQELDINRLSDYDVDHIVPQSFLKDDSIDNKVLTRSDKARGKSDNVPSEEVVKKMKNYWRQLLNAKLITQRKFDNLTKAERGGLSELDKAGFIKRQLVETRQITKHVAQILDSRMNTKYDENDKLIREVKVITLKSKLVSDFRKDFQFYKVREINNYHHAHDAYLNAVVGTALIKKYPKLESEFVYGDYKVYDVRKMIAKSEQEIGKATAKYFFYSNIMNFFKTEITLANGEIRKRPLIETNGETGEIVWDKGRDFATVRKVLSMPQVNIVKKTEVQTGGFSKESILPKRNSDKLIARKKDWDPKKYGGFDSPTVAYSVLVVAKVEKGKSKKLKSVKELLGITIMERSSFEKNPIDFLEAKGYKEVKKDLIIKLPKYSLFELENGRKRMLASAGELQKGNELALPSKYVNFLYLASHYEKLKGSPEDNEQKQLFVEQHKHYLDEIIEQISEFSKRVILADANLDKVLSAYNKHRDKPIREQAENIIHLFTLTNLGAPAAFKYFDTTIDRKRYTSTKEVLDATLIHQSITGLYETRIDLSQLGGDGGGGSPAPEAAAKGGTAPLEEEYRLFLEAPIQNVTLLEQWKREIPKVWAEINPPGLASTQAPIHVQLLSTALPVRVRQYPITLEAKRSLRETIRKFRAAGILRPVHSPWNTPLLPVRKSGTSEYRMVQDLREVNKRVETIHPTVPNPYTLLSLLPPDRIWYSVLDLKDAFFCIPLAPESQLIFAFEWADAEEGESGQLTWTRLPQGFKNSPTLFNEALNRDLQGFRLDHPSVSLLQYVDDLLIAADTQAACLSATRDLLMTLAELGYRVSGKKAQLCQEEVTYLGFKIHKGSRSLSNSRTQAILQIPVPKTKRQVREFLGTIGYCRLWIPGFAELAQPLYAATRPGNDPLVWGEKEEEAFQSLKLALTQPPALALPSLDKPFQLFVEETSGAAKGVLTQALGPWKRPVAYLSKRLDPVAAGWPRCLRAIAAAALLTREASKLTFGQDIEITSSHNLESLLRSPPDKWLTNARITQYQVLLLDPPRVRFKQTAALNPATLLPETDDTLPIHHCLDTLDSLTSTRPDLTDQPLAQAEATLFTDGSSYIRDGKRYAGAAVVTLDSVIWAEPLPIGTSAQKAELIALTKALEWSKDKSVNIYTDSRYAFATLHVHGMIYRERGWLTAGGKAIKNAPEILALLTAVWLPKRVAVMHCKGHQKDDAPTSTGNRRADEVAREVAIRPLSTQATISAGKRTADGSEFEKRTADGSEFESPKKKAKVE

SEQ ID NO: 1161 - protein, 2098 aa, synthetic construct
  source 1..2098: note = Description of Artificial Sequence: Synthetic polypeptide
MPAAKRVKLDGGDKKYSIGLDIGTNSVGWAVITDEYKVPSKKFKVLGNTDRHSIKKNLIGALLFDSGETAEATRLKRTARRRYTRRKNRICYLQEIFSNEMAKVDDSFFHRLEESFLVEEDKKHERHPIFGNIVDEVAYHEKYPTIYHLRKKLVDSTDKADLRLIYLALAHMIKFRGHFLIEGDLNPDNSDVDKLFIQLVQTYNQLFEENPINASGVDAKAILSARLSKSRRLENLIAQLPGEKKNGLFGNLIALSLGLTPNFKSNFDLAEDAKLQLSKDTYDDDLDNLLAQIGDQYADLFLAAKNLSDAILLSDILRVNTEITKAPLSASMIKRYDEHHQDLTLLKALVRQQLPEKYKEIFFDQSKNGYAGYIDGGASQEEFYKFIKPILEKMDGTEELLVKLNREDLLRKQRTFDNGSIPHQIHLGELHAILRRQEDFYPFLKDNREKIEKILTFRIPYYVGPLARGNSRFAWMTRKSEETITPWNFEEVVDKGASAQSFIERMTNFDKNLPNEKVLPKHSLLYEYFTVYNELTKVKYVTEGMRKPAFLSGEQKKAIVDLLFKTNRKVTVKQLKEDYFKKIECFDSVEISGVEDRFNASLGTYHDLLKIIKDKDFLDNEENEDILEDIVLTLTLFEDREMIEERLKTYAHLFDDKVMKQLKRRRYTGWGRLSRKLINGIRDKQSGKTILDFLKSDGFANRNFMQLIHDDSLTFKEDIQKAQVSGQGDSLHEHIANLAGSPAIKKGILQTVKVVDELVKVMGRHKPENIVIEMARENQTTQKGQKNSRERMKRIEEGIKELGSQILKEHPVENTQLQNEKLYLYYLQNGRDMYVDQELDINRLSDYDVDHIVPQSFLKDDSIDNKVLTRSDKARGKSDNVPSEEVVKKMKNYWRQLLNAKLITQRKFDNLTKAERGGLSELDKAGFIKRQLVETRQITKHVAQILDSRMNTKYDENDKLIREVKVITLKSKLVSDFRKDFQFYKVREINNYHHAHDAYLNAVVGTALIKKYPKLESEFVYGDYKVYDVRKMIAKSEQEIGKATAKYFFYSNIMNFFKTEITLANGEIRKRPLIETNGETGEIVWDKGRDFATVRKVLSMPQVNIVKKTEVQTGGFSKESILPKRNSDKLIARKKDWDPKKYGGFDSPTVAYSVLVVAKVEKGKSKKLKSVKELLGITIMERSSFEKNPIDFLEAKGYKEVKKDLIIKLPKYSLFELENGRKRMLASAGELQKGNELALPSKYVNFLYLASHYEKLKGSPEDNEQKQLFVEQHKHYLDEIIEQISEFSKRVILADANLDKVLSAYNKHRDKPIREQAENIIHLFTLTNLGAPAAFKYFDTTIDRKRYTSTKEVLDATLIHQSITGLYETRIDLSQLGGDGGPAPEAAAKGGSGGTAPLEEEYRLFLEAPIQNVTLLEQWKREIPKVWAEINPPGLASTQAPIHVQLLSTALPVRVRQYPITLEAKRSLRETIRKFRAAGILRPVHSPWNTPLLPVRKSGTSEYRMVQDLREVNKRVETIHPTVPNPYTLLSLLPPDRIWYSVLDLKDAFFCIPLAPESQLIFAFEWADAEEGESGQLTWTRLPQGFKNSPTLFNEALNRDLQGFRLDHPSVSLLQYVDDLLIAADTQAACLSATRDLLMTLAELGYRVSGKKAQLCQEEVTYLGFKIHKGSRSLSNSRTQAILQIPVPKTKRQVREFLGTIGYCRLWIPGFAELAQPLYAATRPGNDPLVWGEKEEEAFQSLKLALTQPPALALPSLDKPFQLFVEETSGAAKGVLTQALGPWKRPVAYLSKRLDPVAAGWPRCLRAIAAAALLTREASKLTFGQDIEITSSHNLESLLRSPPDKWLTNARITQYQVLLLDPPRVRFKQTAALNPATLLPETDDTLPIHHCLDTLDSLTSTRPDLTDQPLAQAEATLFTDGSSYIRDGKRYAGAAVVTLDSVIWAEPLPIGTSAQKAELIALTKALEWSKDKSVNIYTDSRYAFATLHVHGMIYRERGWLTAGGKAIKNAPEILALLTAVWLPKRVAVMHCKGHQKDDAPTSTGNRRADEVAREVAIRPLSTQATISAGKRTADGSEFEKRTADGSEFESPKKKAKVE

SEQ ID NO: 1162 - protein, 2098 aa, synthetic construct
  source 1..2098: note = Description of Artificial Sequence: Synthetic polypeptide
MPAAKRVKLDGGDKKYSIGLDIGTNSVGWAVITDEYKVPSKKFKVLGNTDRHSIKKNLIGALLFDSGETAEATRLKRTARRRYTRRKNRICYLQEIFSNEMAKVDDSFFHRLEESFLVEEDKKHERHPIFGNIVDEVAYHEKYPTIYHLRKKLVDSTDKADLRLIYLALAHMIKFRGHFLIEGDLNPDNSDVDKLFIQLVQTYNQLFEENPINASGVDAKAILSARLSKSRRLENLIAQLPGEKKNGLFGNLIALSLGLTPNFKSNFDLAEDAKLQLSKDTYDDDLDNLLAQIGDQYADLFLAAKNLSDAILLSDILRVNTEITKAPLSASMIKRYDEHHQDLTLLKALVRQQLPEKYKEIFFDQSKNGYAGYIDGGASQEEFYKFIKPILEKMDGTEELLVKLNREDLLRKQRTFDNGSIPHQIHLGELHAILRRQEDFYPFLKDNREKIEKILTFRIPYYVGPLARGNSRFAWMTRKSEETITPWNFEEVVDKGASAQSFIERMTNFDKNLPNEKVLPKHSLLYEYFTVYNELTKVKYVTEGMRKPAFLSGEQKKAIVDLLFKTNRKVTVKQLKEDYFKKIECFDSVEISGVEDRFNASLGTYHDLLKIIKDKDFLDNEENEDILEDIVLTLTLFEDREMIEERLKTYAHLFDDKVMKQLKRRRYTGWGRLSRKLINGIRDKQSGKTILDFLKSDGFANRNFMQLIHDDSLTFKEDIQKAQVSGQGDSLHEHIANLAGSPAIKKGILQTVKVVDELVKVMGRHKPENIVIEMARENQTTQKGQKNSRERMKRIEEGIKELGSQILKEHPVENTQLQNEKLYLYYLQNGRDMYVDQELDINRLSDYDVDHIVPQSFLKDDSIDNKVLTRSDKARGKSDNVPSEEVVKKMKNYWRQLLNAKLITQRKFDNLTKAERGGLSELDKAGFIKRQLVETRQITKHVAQILDSRMNTKYDENDKLIREVKVITLKSKLVSDFRKDFQFYKVREINNYHHAHDAYLNAVVGTALIKKYPKLESEFVYGDYKVYDVRKMIAKSEQEIGKATAKYFFYSNIMNFFKTEITLANGEIRKRPLIETNGETGEIVWDKGRDFATVRKVLSMPQVNIVKKTEVQTGGFSKESILPKRNSDKLIARKKDWDPKKYGGFDSPTVAYSVLVVAKVEKGKSKKLKSVKELLGITIMERSSFEKNPIDFLEAKGYKEVKKDLIIKLPKYSLFELENGRKRMLASAGELQKGNELALPSKYVNFLYLASHYEKLKGSPEDNEQKQLFVEQHKHYLDEIIEQISEFSKRVILADANLDKVLSAYNKHRDKPIREQAENIIHLFTLTNLGAPAAFKYFDTTIDRKRYTSTKEVLDATLIHQSITGLYETRIDLSQLGGDGGGSSEAAAKGGGGGTAPLEEEYRLFLEAPIQNVTLLEQWKREIPKVWAEINPPGLASTQAPIHVQLLSTALPVRVRQYPITLEAKRSLRETIRKFRAAGILRPVHSPWNTPLLPVRKSGTSEYRMVQDLREVNKRVETIHPTVPNPYTLLSLLPPDRIWYSVLDLKDAFFCIPLAPESQLIFAFEWADAEEGESGQLTWTRLPQGFKNSPTLFNEALNRDLQGFRLDHPSVSLLQYVDDLLIAADTQAACLSATRDLLMTLAELGYRVSGKKAQLCQEEVTYLGFKIHKGSRSLSNSRTQAILQIPVPKTKRQVREFLGTIGYCRLWIPGFAELAQPLYAATRPGNDPLVWGEKEEEAFQSLKLALTQPPALALPSLDKPFQLFVEETSGAAKGVLTQALGPWKRPVAYLSKRLDPVAAGWPRCLRAIAAAALLTREASKLTFGQDIEITSSHNLESLLRSPPDKWLTNARITQYQVLLLDPPRVRFKQTAALNPATLLPETDDTLPIHHCLDTLDSLTSTRPDLTDQPLAQAEATLFTDGSSYIRDGKRYAGAAVVTLDSVIWAEPLPIGTSAQKAELIALTKALEWSKDKSVNIYTDSRYAFATLHVHGMIYRERGWLTAGGKAIKNAPEILALLTAVWLPKRVAVMHCKGHQKDDAPTSTGNRRADEVAREVAIRPLSTQATISAGKRTADGSEFEKRTADGSEFESPKKKAKVE

SEQ ID NO: 1163 - protein, 2096 aa, synthetic construct
  source 1..2096: note = Description of Artificial Sequence: Synthetic polypeptide
MPAAKRVKLDGGDKKYSIGLDIGTNSVGWAVITDEYKVPSKKFKVLGNTDRHSIKKNLIGALLFDSGETAEATRLKRTARRRYTRRKNRICYLQEIFSNEMAKVDDSFFHRLEESFLVEEDKKHERHPIFGNIVDEVAYHEKYPTIYHLRKKLVDSTDKADLRLIYLALAHMIKFRGHFLIEGDLNPDNSDVDKLFIQLVQTYNQLFEENPINASGVDAKAILSARLSKSRRLENLIAQLPGEKKNGLFGNLIALSLGLTPNFKSNFDLAEDAKLQLSKDTYDDDLDNLLAQIGDQYADLFLAAKNLSDAILLSDILRVNTEITKAPLSASMIKRYDEHHQDLTLLKALVRQQLPEKYKEIFFDQSKNGYAGYIDGGASQEEFYKFIKPILEKMDGTEELLVKLNREDLLRKQRTFDNGSIPHQIHLGELHAILRRQEDFYPFLKDNREKIEKILTFRIPYYVGPLARGNSRFAWMTRKSEETITPWNFEEVVDKGASAQSFIERMTNFDKNLPNEKVLPKHSLLYEYFTVYNELTKVKYVTEGMRKPAFLSGEQKKAIVDLLFKTNRKVTVKQLKEDYFKKIECFDSVEISGVEDRFNASLGTYHDLLKIIKDKDFLDNEENEDILEDIVLTLTLFEDREMIEERLKTYAHLFDDKVMKQLKRRRYTGWGRLSRKLINGIRDKQSGKTILDFLKSDGFANRNFMQLIHDDSLTFKEDIQKAQVSGQGDSLHEHIANLAGSPAIKKGILQTVKVVDELVKVMGRHKPENIVIEMARENQTTQKGQKNSRERMKRIEEGIKELGSQILKEHPVENTQLQNEKLYLYYLQNGRDMYVDQELDINRLSDYDVDHIVPQSFLKDDSIDNKVLTRSDKARGKSDNVPSEEVVKKMKNYWRQLLNAKLITQRKFDNLTKAERGGLSELDKAGFIKRQLVETRQITKHVAQILDSRMNTKYDENDKLIREVKVITLKSKLVSDFRKDFQFYKVREINNYHHAHDAYLNAVVGTALIKKYPKLESEFVYGDYKVYDVRKMIAKSEQEIGKATAKYFFYSNIMNFFKTEITLANGEIRKRPLIETNGETGEIVWDKGRDFATVRKVLSMPQVNIVKKTEVQTGGFSKESILPKRNSDKLIARKKDWDPKKYGGFDSPTVAYSVLVVAKVEKGKSKKLKSVKELLGITIMERSSFEKNPIDFLEAKGYKEVKKDLIIKLPKYSLFELENGRKRMLASAGELQKGNELALPSKYVNFLYLASHYEKLKGSPEDNEQKQLFVEQHKHYLDEIIEQISEFSKRVILADANLDKVLSAYNKHRDKPIREQAENIIHLFTLTNLGAPAAFKYFDTTIDRKRYTSTKEVLDATLIHQSITGLYETRIDLSQLGGDGGGGGGGSPAPGGTAPLEEEYRLFLEAPIQNVTLLEQWKREIPKVWAEINPPGLASTQAPIHVQLLSTALPVRVRQYPITLEAKRSLRETIRKFRAAGILRPVHSPWNTPLLPVRKSGTSEYRMVQDLREVNKRVETIHPTVPNPYTLLSLLPPDRIWYSVLDLKDAFFCIPLAPESQLIFAFEWADAEEGESGQLTWTRLPQGFKNSPTLFNEALNRDLQGFRLDHPSVSLLQYVDDLLIAADTQAACLSATRDLLMTLAELGYRVSGKKAQLCQEEVTYLGFKIHKGSRSLSNSRTQAILQIPVPKTKRQVREFLGTIGYCRLWIPGFAELAQPLYAATRPGNDPLVWGEKEEEAFQSLKLALTQPPALALPSLDKPFQLFVEETSGAAKGVLTQALGPWKRPVAYLSKRLDPVAAGWPRCLRAIAAAALLTREASKLTFGQDIEITSSHNLESLLRSPPDKWLTNARITQYQVLLLDPPRVRFKQTAALNPATLLPETDDTLPIHHCLDTLDSLTSTRPDLTDQPLAQAEATLFTDGSSYIRDGKRYAGAAVVTLDSVIWAEPLPIGTSAQKAELIALTKALEWSKDKSVNIYTDSRYAFATLHVHGMIYRERGWLTAGGKAIKNAPEILALLTAVWLPKRVAVMHCKGHQKDDAPTSTGNRRADEVAREVAIRPLSTQATISAGKRTADGSEFEKRTADGSEFESPKKKAKVE

SEQ ID NO: 1164 - protein, 2098 aa, synthetic construct
  source 1..2098: note = Description of Artificial Sequence: Synthetic polypeptide
MPAAKRVKLDGGDKKYSIGLDIGTNSVGWAVITDEYKVPSKKFKVLGNTDRHSIKKNLIGALLFDSGETAEATRLKRTARRRYTRRKNRICYLQEIFSNEMAKVDDSFFHRLEESFLVEEDKKHERHPIFGNIVDEVAYHEKYPTIYHLRKKLVDSTDKADLRLIYLALAHMIKFRGHFLIEGDLNPDNSDVDKLFIQLVQTYNQLFEENPINASGVDAKAILSARLSKSRRLENLIAQLPGEKKNGLFGNLIALSLGLTPNFKSNFDLAEDAKLQLSKDTYDDDLDNLLAQIGDQYADLFLAAKNLSDAILLSDILRVNTEITKAPLSASMIKRYDEHHQDLTLLKALVRQQLPEKYKEIFFDQSKNGYAGYIDGGASQEEFYKFIKPILEKMDGTEELLVKLNREDLLRKQRTFDNGSIPHQIHLGELHAILRRQEDFYPFLKDNREKIEKILTFRIPYYVGPLARGNSRFAWMTRKSEETITPWNFEEVVDKGASAQSFIERMTNFDKNLPNEKVLPKHSLLYEYFTVYNELTKVKYVTEGMRKPAFLSGEQKKAIVDLLFKTNRKVTVKQLKEDYFKKIECFDSVEISGVEDRFNASLGTYHDLLKIIKDKDFLDNEENEDILEDIVLTLTLFEDREMIEERLKTYAHLFDDKVMKQLKRRRYTGWGRLSRKLINGIRDKQSGKTILDFLKSDGFANRNFMQLIHDDSLTFKEDIQKAQVSGQGDSLHEHIANLAGSPAIKKGILQTVKVVDELVKVMGRHKPENIVIEMARENQTTQKGQKNSRERMKRIEEGIKELGSQILKEHPVENTQLQNEKLYLYYLQNGRDMYVDQELDINRLSDYDVDHIVPQSFLKDDSIDNKVLTRSDKARGKSDNVPSEEVVKKMKNYWRQLLNAKLITQRKFDNLTKAERGGLSELDKAGFIKRQLVETRQITKHVAQILDSRMNTKYDENDKLIREVKVITLKSKLVSDFRKDFQFYKVREINNYHHAHDAYLNAVVGTALIKKYPKLESEFVYGDYKVYDVRKMIAKSEQEIGKATAKYFFYSNIMNFFKTEITLANGEIRKRPLIETNGETGEIVWDKGRDFATVRKVLSMPQVNIVKKTEVQTGGFSKESILPKRNSDKLIARKKDWDPKKYGGFDSPTVAYSVLVVAKVEKGKSKKLKSVKELLGITIMERSSFEKNPIDFLEAKGYKEVKKDLIIKLPKYSLFELENGRKRMLASAGELQKGNELALPSKYVNFLYLASHYEKLKGSPEDNEQKQLFVEQHKHYLDEIIEQISEFSKRVILADANLDKVLSAYNKHRDKPIREQAENIIHLFTLTNLGAPAAFKYFDTTIDRKRYTSTKEVLDATLIHQSITGLYETRIDLSQLGGDGGGSSPAPEAAAKGGTAPLEEEYRLFLEAPIQNVTLLEQWKREIPKVWAEINPPGLASTQAPIHVQLLSTALPVRVRQYPITLEAKRSLRETIRKFRAAGILRPVHSPWNTPLLPVRKSGTSEYRMVQDLREVNKRVETIHPTVPNPYTLLSLLPPDRIWYSVLDLKDAFFCIPLAPESQLIFAFEWADAEEGESGQLTWTRLPQGFKNSPTLFNEALNRDLQGFRLDHPSVSLLQYVDDLLIAADTQAACLSATRDLLMTLAELGYRVSGKKAQLCQEEVTYLGFKIHKGSRSLSNSRTQAILQIPVPKTKRQVREFLGTIGYCRLWIPGFAELAQPLYAATRPGNDPLVWGEKEEEAFQSLKLALTQPPALALPSLDKPFQLFVEETSGAAKGVLTQALGPWKRPVAYLSKRLDPVAAGWPRCLRAIAAAALLTREASKLTFGQDIEITSSHNLESLLRSPPDKWLTNARITQYQVLLLDPPRVRFKQTAALNPATLLPETDDTLPIHHCLDTLDSLTSTRPDLTDQPLAQAEATLFTDGSSYIRDGKRYAGAAVVTLDSVIWAEPLPIGTSAQKAELIALTKALEWSKDKSVNIYTDSRYAFATLHVHGMIYRERGWLTAGGKAIKNAPEILALLTAVWLPKRVAVMHCKGHQKDDAPTSTGNRRADEVAREVAIRPLSTQATISAGKRTADGSEFEKRTADGSEFESPKKKAKVE

SEQ ID NO: 1165 - protein, 2096 aa, synthetic construct
  source 1..2096: note = Description of Artificial Sequence: Synthetic polypeptide
MPAAKRVKLDGGDKKYSIGLDIGTNSVGWAVITDEYKVPSKKFKVLGNTDRHSIKKNLIGALLFDSGETAEATRLKRTARRRYTRRKNRICYLQEIFSNEMAKVDDSFFHRLEESFLVEEDKKHERHPIFGNIVDEVAYHEKYPTIYHLRKKLVDSTDKADLRLIYLALAHMIKFRGHFLIEGDLNPDNSDVDKLFIQLVQTYNQLFEENPINASGVDAKAILSARLSKSRRLENLIAQLPGEKKNGLFGNLIALSLGLTPNFKSNFDLAEDAKLQLSKDTYDDDLDNLLAQIGDQYADLFLAAKNLSDAILLSDILRVNTEITKAPLSASMIKRYDEHHQDLTLLKALVRQQLPEKYKEIFFDQSKNGYAGYIDGGASQEEFYKFIKPILEKMDGTEELLVKLNREDLLRKQRTFDNGSIPHQIHLGELHAILRRQEDFYPFLKDNREKIEKILTFRIPYYVGPLARGNSRFAWMTRKSEETITPWNFEEVVDKGASAQSFIERMTNFDKNLPNEKVLPKHSLLYEYFTVYNELTKVKYVTEGMRKPAFLSGEQKKAIVDLLFKTNRKVTVKQLKEDYFKKIECFDSVEISGVEDRFNASLGTYHDLLKIIKDKDFLDNEENEDILEDIVLTLTLFEDREMIEERLKTYAHLFDDKVMKQLKRRRYTGWGRLSRKLINGIRDKQSGKTILDFLKSDGFANRNFMQLIHDDSLTFKEDIQKAQVSGQGDSLHEHIANLAGSPAIKKGILQTVKVVDELVKVMGRHKPENIVIEMARENQTTQKGQKNSRERMKRIEEGIKELGSQILKEHPVENTQLQNEKLYLYYLQNGRDMYVDQELDINRLSDYDVDHIVPQSFLKDDSIDNKVLTRSDKARGKSDNVPSEEVVKKMKNYWRQLLNAKLITQRKFDNLTKAERGGLSELDKAGFIKRQLVETRQITKHVAQILDSRMNTKYDENDKLIREVKVITLKSKLVSDFRKDFQFYKVREINNYHHAHDAYLNAVVGTALIKKYPKLESEFVYGDYKVYDVRKMIAKSEQEIGKATAKYFFYSNIMNFFKTEITLANGEIRKRPLIETNGETGEIVWDKGRDFATVRKVLSMPQVNIVKKTEVQTGGFSKESILPKRNSDKLIARKKDWDPKKYGGFDSPTVAYSVLVVAKVEKGKSKKLKSVKELLGITIMERSSFEKNPIDFLEAKGYKEVKKDLIIKLPKYSLFELENGRKRMLASAGELQKGNELALPSKYVNFLYLASHYEKLKGSPEDNEQKQLFVEQHKHYLDEIIEQISEFSKRVILADANLDKVLSAYNKHRDKPIREQAENIIHLFTLTNLGAPAAFKYFDTTIDRKRYTSTKEVLDATLIHQSITGLYETRIDLSQLGGDGGGSSGGSPAPGGTAPLEEEYRLFLEAPIQNVTLLEQWKREIPKVWAEINPPGLASTQAPIHVQLLSTALPVRVRQYPITLEAKRSLRETIRKFRAAGILRPVHSPWNTPLLPVRKSGTSEYRMVQDLREVNKRVETIHPTVPNPYTLLSLLPPDRIWYSVLDLKDAFFCIPLAPESQLIFAFEWADAEEGESGQLTWTRLPQGFKNSPTLFNEALNRDLQGFRLDHPSVSLLQYVDDLLIAADTQAACLSATRDLLMTLAELGYRVSGKKAQLCQEEVTYLGFKIHKGSRSLSNSRTQAILQIPVPKTKRQVREFLGTIGYCRLWIPGFAELAQPLYAATRPGNDPLVWGEKEEEAFQSLKLALTQPPALALPSLDKPFQLFVEETSGAAKGVLTQALGPWKRPVAYLSKRLDPVAAGWPRCLRAIAAAALLTREASKLTFGQDIEITSSHNLESLLRSPPDKWLTNARITQYQVLLLDPPRVRFKQTAALNPATLLPETDDTLPIHHCLDTLDSLTSTRPDLTDQPLAQAEATLFTDGSSYIRDGKRYAGAAVVTLDSVIWAEPLPIGTSAQKAELIALTKALEWSKDKSVNIYTDSRYAFATLHVHGMIYRERGWLTAGGKAIKNAPEILALLTAVWLPKRVAVMHCKGHQKDDAPTSTGNRRADEVAREVAIRPLSTQATISAGKRTADGSEFEKRTADGSEFESPKKKAKVE

SEQ ID NO: 1166 - protein, 2093 aa, synthetic construct
  source 1..2093: note = Description of Artificial Sequence: Synthetic polypeptide
MPAAKRVKLDGGDKKYSIGLDIGTNSVGWAVITDEYKVPSKKFKVLGNTDRHSIKKNLIGALLFDSGETAEATRLKRTARRRYTRRKNRICYLQEIFSNEMAKVDDSFFHRLEESFLVEEDKKHERHPIFGNIVDEVAYHEKYPTIYHLRKKLVDSTDKADLRLIYLALAHMIKFRGHFLIEGDLNPDNSDVDKLFIQLVQTYNQLFEENPINASGVDAKAILSARLSKSRRLENLIAQLPGEKKNGLFGNLIALSLGLTPNFKSNFDLAEDAKLQLSKDTYDDDLDNLLAQIGDQYADLFLAAKNLSDAILLSDILRVNTEITKAPLSASMIKRYDEHHQDLTLLKALVRQQLPEKYKEIFFDQSKNGYAGYIDGGASQEEFYKFIKPILEKMDGTEELLVKLNREDLLRKQRTFDNGSIPHQIHLGELHAILRRQEDFYPFLKDNREKIEKILTFRIPYYVGPLARGNSRFAWMTRKSEETITPWNFEEVVDKGASAQSFIERMTNFDKNLPNEKVLPKHSLLYEYFTVYNELTKVKYVTEGMRKPAFLSGEQKKAIVDLLFKTNRKVTVKQLKEDYFKKIECFDSVEISGVEDRFNASLGTYHDLLKIIKDKDFLDNEENEDILEDIVLTLTLFEDREMIEERLKTYAHLFDDKVMKQLKRRRYTGWGRLSRKLINGIRDKQSGKTILDFLKSDGFANRNFMQLIHDDSLTFKEDIQKAQVSGQGDSLHEHIANLAGSPAIKKGILQTVKVVDELVKVMGRHKPENIVIEMARENQTTQKGQKNSRERMKRIEEGIKELGSQILKEHPVENTQLQNEKLYLYYLQNGRDMYVDQELDINRLSDYDVDHIVPQSFLKDDSIDNKVLTRSDKARGKSDNVPSEEVVKKMKNYWRQLLNAKLITQRKFDNLTKAERGGLSELDKAGFIKRQLVETRQITKHVAQILDSRMNTKYDENDKLIREVKVITLKSKLVSDFRKDFQFYKVREINNYHHAHDAYLNAVVGTALIKKYPKLESEFVYGDYKVYDVRKMIAKSEQEIGKATAKYFFYSNIMNFFKTEITLANGEIRKRPLIETNGETGEIVWDKGRDFATVRKVLSMPQVNIVKKTEVQTGGFSKESILPKRNSDKLIARKKDWDPKKYGGFDSPTVAYSVLVVAKVEKGKSKKLKSVKELLGITIMERSSFEKNPIDFLEAKGYKEVKKDLIIKLPKYSLFELENGRKRMLASAGELQKGNELALPSKYVNFLYLASHYEKLKGSPEDNEQKQLFVEQHKHYLDEIIEQISEFSKRVILADANLDKVLSAYNKHRDKPIREQAENIIHLFTLTNLGAPAAFKYFDTTIDRKRYTSTKEVLDATLIHQSITGLYETRIDLSQLGGDGGGGSGSSGGTAPLEEEYRLFLEAPIQNVTLLEQWKREIPKVWAEINPPGLASTQAPIHVQLLSTALPVRVRQYPITLEAKRSLRETIRKFRAAGILRPVHSPWNTPLLPVRKSGTSEYRMVQDLREVNKRVETIHPTVPNPYTLLSLLPPDRIWYSVLDLKDAFFCIPLAPESQLIFAFEWADAEEGESGQLTWTRLPQGFKNSPTLFNEALNRDLQGFRLDHPSVSLLQYVDDLLIAADTQAACLSATRDLLMTLAELGYRVSGKKAQLCQEEVTYLGFKIHKGSRSLSNSRTQAILQIPVPKTKRQVREFLGTIGYCRLWIPGFAELAQPLYAATRPGNDPLVWGEKEEEAFQSLKLALTQPPALALPSLDKPFQLFVEETSGAAKGVLTQALGPWKRPVAYLSKRLDPVAAGWPRCLRAIAAAALLTREASKLTFGQDIEITSSHNLESLLRSPPDKWLTNARITQYQVLLLDPPRVRFKQTAALNPATLLPETDDTLPIHHCLDTLDSLTSTRPDLTDQPLAQAEATLFTDGSSYIRDGKRYAGAAVVTLDSVIWAEPLPIGTSAQKAELIALTKALEWSKDKSVNIYTDSRYAFATLHVHGMIYRERGWLTAGGKAIKNAPEILALLTAVWLPKRVAVMHCKGHQKDDAPTSTGNRRADEVAREVAIRPLSTQATISAGKRTADGSEFEKRTADGSEFESPKKKAKVE

SEQ ID NO: 1167 - protein, 2098 aa, synthetic construct
  source 1..2098: note = Description of Artificial Sequence: Synthetic polypeptide
MPAAKRVKLDGGDKKYSIGLDIGTNSVGWAVITDEYKVPSKKFKVLGNTDRHSIKKNLIGALLFDSGETAEATRLKRTARRRYTRRKNRICYLQEIFSNEMAKVDDSFFHRLEESFLVEEDKKHERHPIFGNIVDEVAYHEKYPTIYHLRKKLVDSTDKADLRLIYLALAHMIKFRGHFLIEGDLNPDNSDVDKLFIQLVQTYNQLFEENPINASGVDAKAILSARLSKSRRLENLIAQLPGEKKNGLFGNLIALSLGLTPNFKSNFDLAEDAKLQLSKDTYDDDLDNLLAQIGDQYADLFLAAKNLSDAILLSDILRVNTEITKAPLSASMIKRYDEHHQDLTLLKALVRQQLPEKYKEIFFDQSKNGYAGYIDGGASQEEFYKFIKPILEKMDGTEELLVKLNREDLLRKQRTFDNGSIPHQIHLGELHAILRRQEDFYPFLKDNREKIEKILTFRIPYYVGPLARGNSRFAWMTRKSEETITPWNFEEVVDKGASAQSFIERMTNFDKNLPNEKVLPKHSLLYEYFTVYNELTKVKYVTEGMRKPAFLSGEQKKAIVDLLFKTNRKVTVKQLKEDYFKKIECFDSVEISGVEDRFNASLGTYHDLLKIIKDKDFLDNEENEDILEDIVLTLTLFEDREMIEERLKTYAHLFDDKVMKQLKRRRYTGWGRLSRKLINGIRDKQSGKTILDFLKSDGFANRNFMQLIHDDSLTFKEDIQKAQVSGQGDSLHEHIANLAGSPAIKKGILQTVKVVDELVKVMGRHKPENIVIEMARENQTTQKGQKNSRERMKRIEEGIKELGSQILKEHPVENTQLQNEKLYLYYLQNGRDMYVDQELDINRLSDYDVDHIVPQSFLKDDSIDNKVLTRSDKARGKSDNVPSEEVVKKMKNYWRQLLNAKLITQRKFDNLTKAERGGLSELDKAGFIKRQLVETRQITKHVAQILDSRMNTKYDENDKLIREVKVITLKSKLVSDFRKDFQFYKVREINNYHHAHDAYLNAVVGTALIKKYPKLESEFVYGDYKVYDVRKMIAKSEQEIGKATAKYFFYSNIMNFFKTEITLANGEIRKRPLIETNGETGEIVWDKGRDFATVRKVLSMPQVNIVKKTEVQTGGFSKESILPKRNSDKLIARKKDWDPKKYGGFDSPTVAYSVLVVAKVEKGKSKKLKSVKELLGITIMERSSFEKNPIDFLEAKGYKEVKKDLIIKLPKYSLFELENGRKRMLASAGELQKGNELALPSKYVNFLYLASHYEKLKGSPEDNEQKQLFVEQHKHYLDEIIEQISEFSKRVILADANLDKVLSAYNKHRDKPIREQAENIIHLFTLTNLGAPAAFKYFDTTIDRKRYTSTKEVLDATLIHQSITGLYETRIDLSQLGGDGGEAAAKPAPGGGGGTAPLEEEYRLFLEAPIQNVTLLEQWKREIPKVWAEINPPGLASTQAPIHVQLLSTALPVRVRQYPITLEAKRSLRETIRKFRAAGILRPVHSPWNTPLLPVRKSGTSEYRMVQDLREVNKRVETIHPTVPNPYTLLSLLPPDRIWYSVLDLKDAFFCIPLAPESQLIFAFEWADAEEGESGQLTWTRLPQGFKNSPTLFNEALNRDLQGFRLDHPSVSLLQYVDDLLIAADTQAACLSATRDLLMTLAELGYRVSGKKAQLCQEEVTYLGFKIHKGSRSLSNSRTQAILQIPVPKTKRQVREFLGTIGYCRLWIPGFAELAQPLYAATRPGNDPLVWGEKEEEAFQSLKLALTQPPALALPSLDKPFQLFVEETSGAAKGVLTQALGPWKRPVAYLSKRLDPVAAGWPRCLRAIAAAALLTREASKLTFGQDIEITSSHNLESLLRSPPDKWLTNARITQYQVLLLDPPRVRFKQTAALNPATLLPETDDTLPIHHCLDTLDSLTSTRPDLTDQPLAQAEATLFTDGSSYIRDGKRYAGAAVVTLDSVIWAEPLPIGTSAQKAELIALTKALEWSKDKSVNIYTDSRYAFATLHVHGMIYRERGWLTAGGKAIKNAPEILALLTAVWLPKRVAVMHCKGHQKDDAPTSTGNRRADEVAREVAIRPLSTQATISAGKRTADGSEFEKRTADGSEFESPKKKAKVE

SEQ ID NO: 1168 - protein, 2093 aa, synthetic construct
  source 1..2093: note = Description of Artificial Sequence: Synthetic polypeptide
MPAAKRVKLDGGDKKYSIGLDIGTNSVGWAVITDEYKVPSKKFKVLGNTDRHSIKKNLIGALLFDSGETAEATRLKRTARRRYTRRKNRICYLQEIFSNEMAKVDDSFFHRLEESFLVEEDKKHERHPIFGNIVDEVAYHEKYPTIYHLRKKLVDSTDKADLRLIYLALAHMIKFRGHFLIEGDLNPDNSDVDKLFIQLVQTYNQLFEENPINASGVDAKAILSARLSKSRRLENLIAQLPGEKKNGLFGNLIALSLGLTPNFKSNFDLAEDAKLQLSKDTYDDDLDNLLAQIGDQYADLFLAAKNLSDAILLSDILRVNTEITKAPLSASMIKRYDEHHQDLTLLKALVRQQLPEKYKEIFFDQSKNGYAGYIDGGASQEEFYKFIKPILEKMDGTEELLVKLNREDLLRKQRTFDNGSIPHQIHLGELHAILRRQEDFYPFLKDNREKIEKILTFRIPYYVGPLARGNSRFAWMTRKSEETITPWNFEEVVDKGASAQSFIERMTNFDKNLPNEKVLPKHSLLYEYFTVYNELTKVKYVTEGMRKPAFLSGEQKKAIVDLLFKTNRKVTVKQLKEDYFKKIECFDSVEISGVEDRFNASLGTYHDLLKIIKDKDFLDNEENEDILEDIVLTLTLFEDREMIEERLKTYAHLFDDKVMKQLKRRRYTGWGRLSRKLINGIRDKQSGKTILDFLKSDGFANRNFMQLIHDDSLTFKEDIQKAQVSGQGDSLHEHIANLAGSPAIKKGILQTVKVVDELVKVMGRHKPENIVIEMARENQTTQKGQKNSRERMKRIEEGIKELGSQILKEHPVENTQLQNEKLYLYYLQNGRDMYVDQELDINRLSDYDVDHIVPQSFLKDDSIDNKVLTRSDKARGKSDNVPSEEVVKKMKNYWRQLLNAKLITQRKFDNLTKAERGGLSELDKAGFIKRQLVETRQITKHVAQILDSRMNTKYDENDKLIREVKVITLKSKLVSDFRKDFQFYKVREINNYHHAHDAYLNAVVGTALIKKYPKLESEFVYGDYKVYDVRKMIAKSEQEIGKATAKYFFYSNIMNFFKTEITLANGEIRKRPLIETNGETGEIVWDKGRDFATVRKVLSMPQVNIVKKTEVQTGGFSKESILPKRNSDKLIARKKDWDPKKYGGFDSPTVAYSVLVVAKVEKGKSKKLKSVKELLGITIMERSSFEKNPIDFLEAKGYKEVKKDLIIKLPKYSLFELENGRKRMLASAGELQKGNELALPSKYVNFLYLASHYEKLKGSPEDNEQKQLFVEQHKHYLDEIIEQISEFSKRVILADANLDKVLSAYNKHRDKPIREQAENIIHLFTLTNLGAPAAFKYFDTTIDRKRYTSTKEVLDATLIHQSITGLYETRIDLSQLGGDGGGGGGGSPAPGGTLQLEEEYRLFEPESTQKQEMDIWLKNFPQAWAETGGMGTAHCQAPVLIQLKATATPISIRQYPMPHEAYQGIKPHIRRMLDQGILKPCQSPWNTPLLPVKKPGTEDYRPVQDLREVNKRVEDIHPTVPNPYNLLSTLPPSHPWYTVLDLKDAFFCLRLHSESQLLFAFEWRDPEIGLSGQLTWTRLPQGFKNSPTLFNEALHSDLADFRVRYPALVLLQYVDDLLLAAATRTECLEGTKALLETLGNKGYRASAKKAQICLQEVTYLGYSLKDGQRWLTKARKEAILSIPVPKNSRQVREFLGTAGYCRLWIPGFAELAAPLYPLTRPGTLFQWGTEQQLAFEDIKKALLSSPALGLPDITKPFELFIDENSGFAKGVLVQKLGPWKRPVAYLSKKLDTVASGWPPCLRMVAAIAILVKDAGKLTLGQPLTILTSHPVEALVRQPPNKWLSNARMTHYQAMLLDAERVHFGPTVSLNPATLLPLPSGGNHHDCLQILAETHGTRPDLTDQPLPDADLTWYTDGSSFIRNGEREAGAAVTTESEVIWAAPLPPGTSAQRAELIALTQALKMAEGKKLTVYTDSRYAFATTHVHGEIYRRRGWLTSEGKEIKNKNEILALLEALFLPKRLSIIHCPGHQKGDSPQAKGNRLADDTAKKAATETHSSLTVLPAGKRTADGSEFEKRTADGSEFESPKKKAKVE

SEQ ID NO: 1169 - protein, 2117 aa, synthetic construct
  source 1..2117: note = Description of Artificial Sequence: Synthetic polypeptide
MPAAKRVKLDGGDKKYSIGLDIGTNSVGWAVITDEYKVPSKKFKVLGNTDRHSIKKNLIGALLFDSGETAEATRLKRTARRRYTRRKNRICYLQEIFSNEMAKVDDSFFHRLEESFLVEEDKKHERHPIFGNIVDEVAYHEKYPTIYHLRKKLVDSTDKADLRLIYLALAHMIKFRGHFLIEGDLNPDNSDVDKLFIQLVQTYNQLFEENPINASGVDAKAILSARLSKSRRLENLIAQLPGEKKNGLFGNLIALSLGLTPNFKSNFDLAEDAKLQLSKDTYDDDLDNLLAQIGDQYADLFLAAKNLSDAILLSDILRVNTEITKAPLSASMIKRYDEHHQDLTLLKALVRQQLPEKYKEIFFDQSKNGYAGYIDGGASQEEFYKFIKPILEKMDGTEELLVKLNREDLLRKQRTFDNGSIPHQIHLGELHAILRRQEDFYPFLKDNREKIEKILTFRIPYYVGPLARGNSRFAWMTRKSEETITPWNFEEVVDKGASAQSFIERMTNFDKNLPNEKVLPKHSLLYEYFTVYNELTKVKYVTEGMRKPAFLSGEQKKAIVDLLFKTNRKVTVKQLKEDYFKKIECFDSVEISGVEDRFNASLGTYHDLLKIIKDKDFLDNEENEDILEDIVLTLTLFEDREMIEERLKTYAHLFDDKVMKQLKRRRYTGWGRLSRKLINGIRDKQSGKTILDFLKSDGFANRNFMQLIHDDSLTFKEDIQKAQVSGQGDSLHEHIANLAGSPAIKKGILQTVKVVDELVKVMGRHKPENIVIEMARENQTTQKGQKNSRERMKRIEEGIKELGSQILKEHPVENTQLQNEKLYLYYLQNGRDMYVDQELDINRLSDYDVDHIVPQSFLKDDSIDNKVLTRSDKARGKSDNVPSEEVVKKMKNYWRQLLNAKLITQRKFDNLTKAERGGLSELDKAGFIKRQLVETRQITKHVAQILDSRMNTKYDENDKLIREVKVITLKSKLVSDFRKDFQFYKVREINNYHHAHDAYLNAVVGTALIKKYPKLESEFVYGDYKVYDVRKMIAKSEQEIGKATAKYFFYSNIMNFFKTEITLANGEIRKRPLIETNGETGEIVWDKGRDFATVRKVLSMPQVNIVKKTEVQTGGFSKESILPKRNSDKLIARKKDWDPKKYGGFDSPTVAYSVLVVAKVEKGKSKKLKSVKELLGITIMERSSFEKNPIDFLEAKGYKEVKKDLIIKLPKYSLFELENGRKRMLASAGELQKGNELALPSKYVNFLYLASHYEKLKGSPEDNEQKQLFVEQHKHYLDEIIEQISEFSKRVILADANLDKVLSAYNKHRDKPIREQAENIIHLFTLTNLGAPAAFKYFDTTIDRKRYTSTKEVLDATLIHQSITGLYETRIDLSQLGGDGGSGGSSGGSSGSETPGTSESATPESSGGSSGGSSGGTLQLEEEYRLFEPESTQKQEMDIWLKNFPQAWAETGGMGTAHCQAPVLIQLKATATPISIRQYPMPHEAYQGIKPHIRRMLDQGILKPCQSPWNTPLLPVKKPGTEDYRPVQDLREVNKRVEDIHPTVPNPYNLLSTLPPSHPWYTVLDLKDAFFCLRLHSESQLLFAFEWRDPEIGLSGQLTWTRLPQGFKNSPTLFNEALHSDLADFRVRYPALVLLQYVDDLLLAAATRTECLEGTKALLETLGNKGYRASAKKAQICLQEVTYLGYSLKDGQRWLTKARKEAILSIPVPKNSRQVREFLGTAGYCRLWIPGFAELAAPLYPLTRPGTLFQWGTEQQLAFEDIKKALLSSPALGLPDITKPFELFIDENSGFAKGVLVQKLGPWKRPVAYLSKKLDTVASGWPPCLRMVAAIAILVKDAGKLTLGQPLTILTSHPVEALVRQPPNKWLSNARMTHYQAMLLDAERVHFGPTVSLNPATLLPLPSGGNHHDCLQILAETHGTRPDLTDQPLPDADLTWYTDGSSFIRNGEREAGAAVTTESEVIWAAPLPPGTSAQRAELIALTQALKMAEGKKLTVYTDSRYAFATTHVHGEIYRRRGWLTSEGKEIKNKNEILALLEALFLPKRLSIIHCPGHQKGDSPQAKGNRLADDTAKKAATETHSSLTVLPAGKRTADGSEFEKRTADGSEFESPKKKAKVE

SEQ ID NO: 1170 - protein, 2130 aa, synthetic construct
  source 1..2130: note = Description of Artificial Sequence: Synthetic polypeptide
MPAAKRVKLDGGDKKYSIGLDIGTNSVGWAVITDEYKVPSKKFKVLGNTDRHSIKKNLIGALLFDSGETAEATRLKRTARRRYTRRKNRICYLQEIFSNEMAKVDDSFFHRLEESFLVEEDKKHERHPIFGNIVDEVAYHEKYPTIYHLRKKLVDSTDKADLRLIYLALAHMIKFRGHFLIEGDLNPDNSDVDKLFIQLVQTYNQLFEENPINASGVDAKAILSARLSKSRRLENLIAQLPGEKKNGLFGNLIALSLGLTPNFKSNFDLAEDAKLQLSKDTYDDDLDNLLAQIGDQYADLFLAAKNLSDAILLSDILRVNTEITKAPLSASMIKRYDEHHQDLTLLKALVRQQLPEKYKEIFFDQSKNGYAGYIDGGASQEEFYKFIKPILEKMDGTEELLVKLNREDLLRKQRTFDNGSIPHQIHLGELHAILRRQEDFYPFLKDNREKIEKILTFRIPYYVGPLARGNSRFAWMTRKSEETITPWNFEEVVDKGASAQSFIERMTNFDKNLPNEKVLPKHSLLYEYFTVYNELTKVKYVTEGMRKPAFLSGEQKKAIVDLLFKTNRKVTVKQLKEDYFKKIECFDSVEISGVEDRFNASLGTYHDLLKIIKDKDFLDNEENEDILEDIVLTLTLFEDREMIEERLKTYAHLFDDKVMKQLKRRRYTGWGRLSRKLINGIRDKQSGKTILDFLKSDGFANRNFMQLIHDDSLTFKEDIQKAQVSGQGDSLHEHIANLAGSPAIKKGILQTVKVVDELVKVMGRHKPENIVIEMARENQTTQKGQKNSRERMKRIEEGIKELGSQILKEHPVENTQLQNEKLYLYYLQNGRDMYVDQELDINRLSDYDVDHIVPQSFLKDDSIDNKVLTRSDKARGKSDNVPSEEVVKKMKNYWRQLLNAKLITQRKFDNLTKAERGGLSELDKAGFIKRQLVETRQITKHVAQILDSRMNTKYDENDKLIREVKVITLKSKLVSDFRKDFQFYKVREINNYHHAHDAYLNAVVGTALIKKYPKLESEFVYGDYKVYDVRKMIAKSEQEIGKATAKYFFYSNIMNFFKTEITLANGEIRKRPLIETNGETGEIVWDKGRDFATVRKVLSMPQVNIVKKTEVQTGGFSKESILPKRNSDKLIARKKDWDPKKYGGFDSPTVAYSVLVVAKVEKGKSKKLKSVKELLGITIMERSSFEKNPIDFLEAKGYKEVKKDLIIKLPKYSLFELENGRKRMLASAGELQKGNELALPSKYVNFLYLASHYEKLKGSPEDNEQKQLFVEQHKHYLDEIIEQISEFSKRVILADANLDKVLSAYNKHRDKPIREQAENIIHLFTLTNLGAPAAFKYFDTTIDRKRYTSTKEVLDATLIHQSITGLYETRIDLSQLGGDGGAEAAAKEAAAKEAAAKEAAAKALEAEAAAKEAAAKEAAAKEAAAKAGGTLQLEEEYRLFEPESTQKQEMDIWLKNFPQAWAETGGMGTAHCQAPVLIQLKATATPISIRQYPMPHEAYQGIKPHIRRMLDQGILKPCQSPWNTPLLPVKKPGTEDYRPVQDLREVNKRVEDIHPTVPNPYNLLSTLPPSHPWYTVLDLKDAFFCLRLHSESQLLFAFEWRDPEIGLSGQLTWTRLPQGFKNSPTLFNEALHSDLADFRVRYPALVLLQYVDDLLLAAATRTECLEGTKALLETLGNKGYRASAKKAQICLQEVTYLGYSLKDGQRWLTKARKEAILSIPVPKNSRQVREFLGTAGYCRLWIPGFAELAAPLYPLTRPGTLFQWGTEQQLAFEDIKKALLSSPALGLPDITKPFELFIDENSGFAKGVLVQKLGPWKRPVAYLSKKLDTVASGWPPCLRMVAAIAILVKDAGKLTLGQPLTILTSHPVEALVRQPPNKWLSNARMTHYQAMLLDAERVHFGPTVSLNPATLLPLPSGGNHHDCLQILAETHGTRPDLTDQPLPDADLTWYTDGSSFIRNGEREAGAAVTTESEVIWAAPLPPGTSAQRAELIALTQALKMAEGKKLTVYTDSRYAFATTHVHGEIYRRRGWLTSEGKEIKNKNEILALLEALFLPKRLSIIHCPGHQKGDSPQAKGNRLADDTAKKAATETHSSLTVLPAGKRTADGSEFEKRTADGSEFESPKKKAKVE

SEQ ID NO: 1171 - protein, 2114 aa, synthetic construct
  source 1..2114: note = Description of Artificial Sequence: Synthetic polypeptide
MPAAKRVKLDGGDKKYSIGLDIGTNSVGWAVITDEYKVPSKKFKVLGNTDRHSIKKNLIGALLFDSGETAEATRLKRTARRRYTRRKNRICYLQEIFSNEMAKVDDSFFHRLEESFLVEEDKKHERHPIFGNIVDEVAYHEKYPTIYHLRKKLVDSTDKADLRLIYLALAHMIKFRGHFLIEGDLNPDNSDVDKLFIQLVQTYNQLFEENPINASGVDAKAILSARLSKSRRLENLIAQLPGEKKNGLFGNLIALSLGLTPNFKSNFDLAEDAKLQLSKDTYDDDLDNLLAQIGDQYADLFLAAKNLSDAILLSDILRVNTEITKAPLSASMIKRYDEHHQDLTLLKALVRQQLPEKYKEIFFDQSKNGYAGYIDGGASQEEFYKFIKPILEKMDGTEELLVKLNREDLLRKQRTFDNGSIPHQIHLGELHAILRRQEDFYPFLKDNREKIEKILTFRIPYYVGPLARGNSRFAWMTRKSEETITPWNFEEVVDKGASAQSFIERMTNFDKNLPNEKVLPKHSLLYEYFTVYNELTKVKYVTEGMRKPAFLSGEQKKAIVDLLFKTNRKVTVKQLKEDYFKKIECFDSVEISGVEDRFNASLGTYHDLLKIIKDKDFLDNEENEDILEDIVLTLTLFEDREMIEERLKTYAHLFDDKVMKQLKRRRYTGWGRLSRKLINGIRDKQSGKTILDFLKSDGFANRNFMQLIHDDSLTFKEDIQKAQVSGQGDSLHEHIANLAGSPAIKKGILQTVKVVDELVKVMGRHKPENIVIEMARENQTTQKGQKNSRERMKRIEEGIKELGSQILKEHPVENTQLQNEKLYLYYLQNGRDMYVDQELDINRLSDYDVDHIVPQSFLKDDSIDNKVLTRSDKARGKSDNVPSEEVVKKMKNYWRQLLNAKLITQRKFDNLTKAERGGLSELDKAGFIKRQLVETRQITKHVAQILDSRMNTKYDENDKLIREVKVITLKSKLVSDFRKDFQFYKVREINNYHHAHDAYLNAVVGTALIKKYPKLESEFVYGDYKVYDVRKMIAKSEQEIGKATAKYFFYSNIMNFFKTEITLANGEIRKRPLIETNGETGEIVWDKGRDFATVRKVLSMPQVNIVKKTEVQTGGFSKESILPKRNSDKLIARKKDWDPKKYGGFDSPTVAYSVLVVAKVEKGKSKKLKSVKELLGITIMERSSFEKNPIDFLEAKGYKEVKKDLIIKLPKYSLFELENGRKRMLASAGELQKGNELALPSKYVNFLYLASHYEKLKGSPEDNEQKQLFVEQHKHYLDEIIEQISEFSKRVILADANLDKVLSAYNKHRDKPIREQAENIIHLFTLTNLGAPAAFKYFDTTIDRKRYTSTKEVLDATLIHQSITGLYETRIDLSQLGGDGGEAAAKEAAAKEAAAKEAAAKEAAAKEAAAKGGTLQLEEEYRLFEPESTQKQEMDIWLKNFPQAWAETGGMGTAHCQAPVLIQLKATATPISIRQYPMPHEAYQGIKPHIRRMLDQGILKPCQSPWNTPLLPVKKPGTEDYRPVQDLREVNKRVEDIHPTVPNPYNLLSTLPPSHPWYTVLDLKDAFFCLRLHSESQLLFAFEWRDPEIGLSGQLTWTRLPQGFKNSPTLFNEALHSDLADFRVRYPALVLLQYVDDLLLAAATRTECLEGTKALLETLGNKGYRASAKKAQICLQEVTYLGYSLKDGQRWLTKARKEAILSIPVPKNSRQVREFLGTAGYCRLWIPGFAELAAPLYPLTRPGTLFQWGTEQQLAFEDIKKALLSSPALGLPDITKPFELFIDENSGFAKGVLVQKLGPWKRPVAYLSKKLDTVASGWPPCLRMVAAIAILVKDAGKLTLGQPLTILTSHPVEALVRQPPNKWLSNARMTHYQAMLLDAERVHFGPTVSLNPATLLPLPSGGNHHDCLQILAETHGTRPDLTDQPLPDADLTWYTDGSSFIRNGEREAGAAVTTESEVIWAAPLPPGTSAQRAELIALTQALKMAEGKKLTVYTDSRYAFATTHVHGEIYRRRGWLTSEGKEIKNKNEILALLEALFLPKRLSIIHCPGHQKGDSPQAKGNRLADDTAKKAATETHSSLTVLPAGKRTADGSEFEKRTADGSEFESPKKKAKVE

SEQ ID NO: 1172 - protein, 2092 aa, synthetic construct
  source 1..2092: note = Description of Artificial Sequence: Synthetic polypeptide
MPAAKRVKLDGGDKKYSIGLDIGTNSVGWAVITDEYKVPSKKFKVLGNTDRHSIKKNLIGALLFDSGETAEATRLKRTARRRYTRRKNRICYLQEIFSNEMAKVDDSFFHRLEESFLVEEDKKHERHPIFGNIVDEVAYHEKYPTIYHLRKKLVDSTDKADLRLIYLALAHMIKFRGHFLIEGDLNPDNSDVDKLFIQLVQTYNQLFEENPINASGVDAKAILSARLSKSRRLENLIAQLPGEKKNGLFGNLIALSLGLTPNFKSNFDLAEDAKLQLSKDTYDDDLDNLLAQIGDQYADLFLAAKNLSDAILLSDILRVNTEITKAPLSASMIKRYDEHHQDLTLLKALVRQQLPEKYKEIFFDQSKNGYAGYIDGGASQEEFYKFIKPILEKMDGTEELLVKLNREDLLRKQRTFDNGSIPHQIHLGELHAILRRQEDFYPFLKDNREKIEKILTFRIPYYVGPLARGNSRFAWMTRKSEETITPWNFEEVVDKGASAQSFIERMTNFDKNLPNEKVLPKHSLLYEYFTVYNELTKVKYVTEGMRKPAFLSGEQKKAIVDLLFKTNRKVTVKQLKEDYFKKIECFDSVEISGVEDRFNASLGTYHDLLKIIKDKDFLDNEENEDILEDIVLTLTLFEDREMIEERLKTYAHLFDDKVMKQLKRRRYTGWGRLSRKLINGIRDKQSGKTILDFLKSDGFANRNFMQLIHDDSLTFKEDIQKAQVSGQGDSLHEHIANLAGSPAIKKGILQTVKVVDELVKVMGRHKPENIVIEMARENQTTQKGQKNSRERMKRIEEGIKELGSQILKEHPVENTQLQNEKLYLYYLQNGRDMYVDQELDINRLSDYDVDHIVPQSFLKDDSIDNKVLTRSDKARGKSDNVPSEEVVKKMKNYWRQLLNAKLITQRKFDNLTKAERGGLSELDKAGFIKRQLVETRQITKHVAQILDSRMNTKYDENDKLIREVKVITLKSKLVSDFRKDFQFYKVREINNYHHAHDAYLNAVVGTALIKKYPKLESEFVYGDYKVYDVRKMIAKSEQEIGKATAKYFFYSNIMNFFKTEITLANGEIRKRPLIETNGETGEIVWDKGRDFATVRKVLSMPQVNIVKKTEVQTGGFSKESILPKRNSDKLIARKKDWDPKKYGGFDSPTVAYSVLVVAKVEKGKSKKLKSVKELLGITIMERSSFEKNPIDFLEAKGYKEVKKDLIIKLPKYSLFELENGRKRMLASAGELQKGNELALPSKYVNFLYLASHYEKLKGSPEDNEQKQLFVEQHKHYLDEIIEQISEFSKRVILADANLDKVLSAYNKHRDKPIREQAENIIHLFTLTNLGAPAAFKYFDTTIDRKRYTSTKEVLDATLIHQSITGLYETRIDLSQLGGDGGEAAAKGGSGGTLQLEEEYRLFEPESTQKQEMDIWLKNFPQAWAETGGMGTAHCQAPVLIQLKATATPISIRQYPMPHEAYQGIKPHIRRMLDQGILKPCQSPWNTPLLPVKKPGTEDYRPVQDLREVNKRVEDIHPTVPNPYNLLSTLPPSHPWYTVLDLKDAFFCLRLHSESQLLFAFEWRDPEIGLSGQLTWTRLPQGFKNSPTLFNEALHSDLADFRVRYPALVLLQYVDDLLLAAATRTECLEGTKALLETLGNKGYRASAKKAQICLQEVTYLGYSLKDGQRWLTKARKEAILSIPVPKNSRQVREFLGTAGYCRLWIPGFAELAAPLYPLTRPGTLFQWGTEQQLAFEDIKKALLSSPALGLPDITKPFELFIDENSGFAKGVLVQKLGPWKRPVAYLSKKLDTVASGWPPCLRMVAAIAILVKDAGKLTLGQPLTILTSHPVEALVRQPPNKWLSNARMTHYQAMLLDAERVHFGPTVSLNPATLLPLPSGGNHHDCLQILAETHGTRPDLTDQPLPDADLTWYTDGSSFIRNGEREAGAAVTTESEVIWAAPLPPGTSAQRAELIALTQALKMAEGKKLTVYTDSRYAFATTHVHGEIYRRRGWLTSEGKEIKNKNEILALLEALFLPKRLSIIHCPGHQKGDSPQAKGNRLADDTAKKAATETHSSLTVLPAGKRTADGSEFEKRTADGSEFESPKKKAKVE

SEQ ID NO: 1173 - protein, 2095 aa, synthetic construct
  source 1..2095: note = Description of Artificial Sequence: Synthetic polypeptide
MPAAKRVKLDGGDKKYSIGLDIGTNSVGWAVITDEYKVPSKKFKVLGNTDRHSIKKNLIGALLFDSGETAEATRLKRTARRRYTRRKNRICYLQEIFSNEMAKVDDSFFHRLEESFLVEEDKKHERHPIFGNIVDEVAYHEKYPTIYHLRKKLVDSTDKADLRLIYLALAHMIKFRGHFLIEGDLNPDNSDVDKLFIQLVQTYNQLFEENPINASGVDAKAILSARLSKSRRLENLIAQLPGEKKNGLFGNLIALSLGLTPNFKSNFDLAEDAKLQLSKDTYDDDLDNLLAQIGDQYADLFLAAKNLSDAILLSDILRVNTEITKAPLSASMIKRYDEHHQDLTLLKALVRQQLPEKYKEIFFDQSKNGYAGYIDGGASQEEFYKFIKPILEKMDGTEELLVKLNREDLLRKQRTFDNGSIPHQIHLGELHAILRRQEDFYPFLKDNREKIEKILTFRIPYYVGPLARGNSRFAWMTRKSEETITPWNFEEVVDKGASAQSFIERMTNFDKNLPNEKVLPKHSLLYEYFTVYNELTKVKYVTEGMRKPAFLSGEQKKAIVDLLFKTNRKVTVKQLKEDYFKKIECFDSVEISGVEDRFNASLGTYHDLLKIIKDKDFLDNEENEDILEDIVLTLTLFEDREMIEERLKTYAHLFDDKVMKQLKRRRYTGWGRLSRKLINGIRDKQSGKTILDFLKSDGFANRNFMQLIHDDSLTFKEDIQKAQVSGQGDSLHEHIANLAGSPAIKKGILQTVKVVDELVKVMGRHKPENIVIEMARENQTTQKGQKNSRERMKRIEEGIKELGSQILKEHPVENTQLQNEKLYLYYLQNGRDMYVDQELDINRLSDYDVDHIVPQSFLKDDSIDNKVLTRSDKARGKSDNVPSEEVVKKMKNYWRQLLNAKLITQRKFDNLTKAERGGLSELDKAGFIKRQLVETRQITKHVAQILDSRMNTKYDENDKLIREVKVITLKSKLVSDFRKDFQFYKVREINNYHHAHDAYLNAVVGTALIKKYPKLESEFVYGDYKVYDVRKMIAKSEQEIGKATAKYFFYSNIMNFFKTEITLANGEIRKRPLIETNGETGEIVWDKGRDFATVRKVLSMPQVNIVKKTEVQTGGFSKESILPKRNSDKLIARKKDWDPKKYGGFDSPTVAYSVLVVAKVEKGKSKKLKSVKELLGITIMERSSFEKNPIDFLEAKGYKEVKKDLIIKLPKYSLFELENGRKRMLASAGELQKGNELALPSKYVNFLYLASHYEKLKGSPEDNEQKQLFVEQHKHYLDEIIEQISEFSKRVILADANLDKVLSAYNKHRDKPIREQAENIIHLFTLTNLGAPAAFKYFDTTIDRKRYTSTKEVLDATLIHQSITGLYETRIDLSQLGGDGGPAPAPAPAPAPGGTLQLEEEYRLFEPESTQKQEMDIWLKNFPQAWAETGGMGTAHCQAPVLIQLKATATPISIRQYPMPHEAYQGIKPHIRRMLDQGILKPCQSPWNTPLLPVKKPGTEDYRPVQDLREVNKRVEDIHPTVPNPYNLLSTLPPSHPWYTVLDLKDAFFCLRLHSESQLLFAFEWRDPEIGLSGQLTWTRLPQGFKNSPTLFNEALHSDLADFRVRYPALVLLQYVDDLLLAAATRTECLEGTKALLETLGNKGYRASAKKAQICLQEVTYLGYSLKDGQRWLTKARKEAILSIPVPKNSRQVREFLGTAGYCRLWIPGFAELAAPLYPLTRPGTLFQWGTEQQLAFEDIKKALLSSPALGLPDITKPFELFIDENSGFAKGVLVQKLGPWKRPVAYLSKKLDTVASGWPPCLRMVAAIAILVKDAGKLTLGQPLTILTSHPVEALVRQPPNKWLSNARMTHYQAMLLDAERVHFGPTVSLNPATLLPLPSGGNHHDCLQILAETHGTRPDLTDQPLPDADLTWYTDGSSFIRNGEREAGAAVTTESEVIWAAPLPPGTSAQRAELIALTQALKMAEGKKLTVYTDSRYAFATTHVHGEIYRRRGWLTSEGKEIKNKNEILALLEALFLPKRLSIIHCPGHQKGDSPQAKGNRLADDTAKKAATETHSSLTVLPAGKRTADGSEFEKRTADGSEFESPKKKAKVE

SEQ ID NO: 1174 - protein, 2099 aa, synthetic construct
  source 1..2099: note = Description of Artificial Sequence: Synthetic polypeptide
MPAAKRVKLDGGDKKYSIGLDIGTNSVGWAVITDEYKVPSKKFKVLGNTDRHSIKKNLIGALLFDSGETAEATRLKRTARRRYTRRKNRICYLQEIFSNEMAKVDDSFFHRLEESFLVEEDKKHERHPIFGNIVDEVAYHEKYPTIYHLRKKLVDSTDKADLRLIYLALAHMIKFRGHFLIEGDLNPDNSDVDKLFIQLVQTYNQLFEENPINASGVDAKAILSARLSKSRRLENLIAQLPGEKKNGLFGNLIALSLGLTPNFKSNFDLAEDAKLQLSKDTYDDDLDNLLAQIGDQYADLFLAAKNLSDAILLSDILRVNTEITKAPLSASMIKRYDEHHQDLTLLKALVRQQLPEKYKEIFFDQSKNGYAGYIDGGASQEEFYKFIKPILEKMDGTEELLVKLNREDLLRKQRTFDNGSIPHQIHLGELHAILRRQEDFYPFLKDNREKIEKILTFRIPYYVGPLARGNSRFAWMTRKSEETITPWNFEEVVDKGASAQSFIERMTNFDKNLPNEKVLPKHSLLYEYFTVYNELTKVKYVTEGMRKPAFLSGEQKKAIVDLLFKTNRKVTVKQLKEDYFKKIECFDSVEISGVEDRFNASLGTYHDLLKIIKDKDFLDNEENEDILEDIVLTLTLFEDREMIEERLKTYAHLFDDKVMKQLKRRRYTGWGRLSRKLINGIRDKQSGKTILDFLKSDGFANRNFMQLIHDDSLTFKEDIQKAQVSGQGDSLHEHIANLAGSPAIKKGILQTVKVVDELVKVMGRHKPENIVIEMARENQTTQKGQKNSRERMKRIEEGIKELGSQILKEHPVENTQLQNEKLYLYYLQNGRDMYVDQELDINRLSDYDVDHIVPQSFLKDDSIDNKVLTRSDKARGKSDNVPSEEVVKKMKNYWRQLLNAKLITQRKFDNLTKAERGGLSELDKAGFIKRQLVETRQITKHVAQILDSRMNTKYDENDKLIREVKVITLKSKLVSDFRKDFQFYKVREINNYHHAHDAYLNAVVGTALIKKYPKLESEFVYGDYKVYDVRKMIAKSEQEIGKATAKYFFYSNIMNFFKTEITLANGEIRKRPLIETNGETGEIVWDKGRDFATVRKVLSMPQVNIVKKTEVQTGGFSKESILPKRNSDKLIARKKDWDPKKYGGFDSPTVAYSVLVVAKVEKGKSKKLKSVKELLGITIMERSSFEKNPIDFLEAKGYKEVKKDLIIKLPKYSLFELENGRKRMLASAGELQKGNELALPSKYVNFLYLASHYEKLKGSPEDNEQKQLFVEQHKHYLDEIIEQISEFSKRVILADANLDKVLSAYNKHRDKPIREQAENIIHLFTLTNLGAPAAFKYFDTTIDRKRYTSTKEVLDATLIHQSITGLYETRIDLSQLGGDGGGGGGSGGGGSGGGGSGGTLQLEEEYRLFEPESTQKQEMDIWLKNFPQAWAETGGMGTAHCQAPVLIQLKATATPISIRQYPMPHEAYQGIKPHIRRMLDQGILKPCQSPWNTPLLPVKKPGTEDYRPVQDLREVNKRVEDIHPTVPNPYNLLSTLPPSHPWYTVLDLKDAFFCLRLHSESQLLFAFEWRDPEIGLSGQLTWTRLPQGFKNSPTLFNEALHSDLADFRVRYPALVLLQYVDDLLLAAATRTECLEGTKALLETLGNKGYRASAKKAQICLQEVTYLGYSLKDGQRWLTKARKEAILSIPVPKNSRQVREFLGTAGYCRLWIPGFAELAAPLYPLTRPGTLFQWGTEQQLAFEDIKKALLSSPALGLPDITKPFELFIDENSGFAKGVLVQKLGPWKRPVAYLSKKLDTVASGWPPCLRMVAAIAILVKDAGKLTLGQPLTILTSHPVEALVRQPPNKWLSNARMTHYQAMLLDAERVHFGPTVSLNPATLLPLPSGGNHHDCLQILAETHGTRPDLTDQPLPDADLTWYTDGSSFIRNGEREAGAAVTTESEVIWAAPLPPGTSAQRAELIALTQALKMAEGKKLTVYTDSRYAFATTHVHGEIYRRRGWLTSEGKEIKNKNEILALLEALFLPKRLSIIHCPGHQKGDSPQAKGNRLADDTAKKAATETHSSLTVLPAGKRTADGSEFEKRTADGSEFESPKKKAKVE

SEQ ID NO: 1175 - protein, 2109 aa, synthetic construct
  source 1..2109: note = Description of Artificial Sequence: Synthetic polypeptide
MPAAKRVKLDGGDKKYSIGLDIGTNSVGWAVITDEYKVPSKKFKVLGNTDRHSIKKNLIGALLFDSGETAEATRLKRTARRRYTRRKNRICYLQEIFSNEMAKVDDSFFHRLEESFLVEEDKKHERHPIFGNIVDEVAYHEKYPTIYHLRKKLVDSTDKADLRLIYLALAHMIKFRGHFLIEGDLNPDNSDVDKLFIQLVQTYNQLFEENPINASGVDAKAILSARLSKSRRLENLIAQLPGEKKNGLFGNLIALSLGLTPNFKSNFDLAEDAKLQLSKDTYDDDLDNLLAQIGDQYADLFLAAKNLSDAILLSDILRVNTEITKAPLSASMIKRYDEHHQDLTLLKALVRQQLPEKYKEIFFDQSKNGYAGYIDGGASQEEFYKFIKPILEKMDGTEELLVKLNREDLLRKQRTFDNGSIPHQIHLGELHAILRRQEDFYPFLKDNREKIEKILTFRIPYYVGPLARGNSRFAWMTRKSEETITPWNFEEVVDKGASAQSFIERMTNFDKNLPNEKVLPKHSLLYEYFTVYNELTKVKYVTEGMRKPAFLSGEQKKAIVDLLFKTNRKVTVKQLKEDYFKKIECFDSVEISGVEDRFNASLGTYHDLLKIIKDKDFLDNEENEDILEDIVLTLTLFEDREMIEERLKTYAHLFDDKVMKQLKRRRYTGWGRLSRKLINGIRDKQSGKTILDFLKSDGFANRNFMQLIHDDSLTFKEDIQKAQVSGQGDSLHEHIANLAGSPAIKKGILQTVKVVDELVKVMGRHKPENIVIEMARENQTTQKGQKNSRERMKRIEEGIKELGSQILKEHPVENTQLQNEKLYLYYLQNGRDMYVDQELDINRLSDYDVDHIVPQSFLKDDSIDNKVLTRSDKARGKSDNVPSEEVVKKMKNYWRQLLNAKLITQRKFDNLTKAERGGLSELDKAGFIKRQLVETRQITKHVAQILDSRMNTKYDENDKLIREVKVITLKSKLVSDFRKDFQFYKVREINNYHHAHDAYLNAVVGTALIKKYPKLESEFVYGDYKVYDVRKMIAKSEQEIGKATAKYFFYSNIMNFFKTEITLANGEIRKRPLIETNGETGEIVWDKGRDFATVRKVLSMPQVNIVKKTEVQTGGFSKESILPKRNSDKLIARKKDWDPKKYGGFDSPTVAYSVLVVAKVEKGKSKKLKSVKELLGITIMERSSFEKNPIDFLEAKGYKEVKKDLIIKLPKYSLFELENGRKRMLASAGELQKGNELALPSKYVNFLYLASHYEKLKGSPEDNEQKQLFVEQHKHYLDEIIEQISEFSKRVILADANLDKVLSAYNKHRDKPIREQAENIIHLFTLTNLGAPAAFKYFDTTIDRKRYTSTKEVLDATLIHQSITGLYETRIDLSQLGGDGGEAAAKEAAAKEAAAKEAAAKEAAAKGGTLQLEEEYRLFEPESTQKQEMDIWLKNFPQAWAETGGMGTAHCQAPVLIQLKATATPISIRQYPMPHEAYQGIKPHIRRMLDQGILKPCQSPWNTPLLPVKKPGTEDYRPVQDLREVNKRVEDIHPTVPNPYNLLSTLPPSHPWYTVLDLKDAFFCLRLHSESQLLFAFEWRDPEIGLSGQLTWTRLPQGFKNSPTLFNEALHSDLADFRVRYPALVLLQYVDDLLLAAATRTECLEGTKALLETLGNKGYRASAKKAQICLQEVTYLGYSLKDGQRWLTKARKEAILSIPVPKNSRQVREFLGTAGYCRLWIPGFAELAAPLYPLTRPGTLFQWGTEQQLAFEDIKKALLSSPALGLPDITKPFELFIDENSGFAKGVLVQKLGPWKRPVAYLSKKLDTVASGWPPCLRMVAAIAILVKDAGKLTLGQPLTILTSHPVEALVRQPPNKWLSNARMTHYQAMLLDAERVHFGPTVSLNPATLLPLPSGGNHHDCLQILAETHGTRPDLTDQPLPDADLTWYTDGSSFIRNGEREAGAAVTTESEVIWAAPLPPGTSAQRAELIALTQALKMAEGKKLTVYTDSRYAFATTHVHGEIYRRRGWLTSEGKEIKNKNEILALLEALFLPKRLSIIHCPGHQKGDSPQAKGNRLADDTAKKAATETHSSLTVLPAGKRTADGSEFEKRTADGSEFESPKKKAKVE

SEQ ID NO: 1176 - protein, 2095 aa, synthetic construct
  source 1..2095: note = Description of Artificial Sequence: Synthetic polypeptide
MPAAKRVKLDGGDKKYSIGLDIGTNSVGWAVITDEYKVPSKKFKVLGNTDRHSIKKNLIGALLFDSGETAEATRLKRTARRRYTRRKNRICYLQEIFSNEMAKVDDSFFHRLEESFLVEEDKKHERHPIFGNIVDEVAYHEKYPTIYHLRKKLVDSTDKADLRLIYLALAHMIKFRGHFLIEGDLNPDNSDVDKLFIQLVQTYNQLFEENPINASGVDAKAILSARLSKSRRLENLIAQLPGEKKNGLFGNLIALSLGLTPNFKSNFDLAEDAKLQLSKDTYDDDLDNLLAQIGDQYADLFLAAKNLSDAILLSDILRVNTEITKAPLSASMIKRYDEHHQDLTLLKALVRQQLPEKYKEIFFDQSKNGYAGYIDGGASQEEFYKFIKPILEKMDGTEELLVKLNREDLLRKQRTFDNGSIPHQIHLGELHAILRRQEDFYPFLKDNREKIEKILTFRIPYYVGPLARGNSRFAWMTRKSEETITPWNFEEVVDKGASAQSFIERMTNFDKNLPNEKVLPKHSLLYEYFTVYNELTKVKYVTEGMRKPAFLSGEQKKAIVDLLFKTNRKVTVKQLKEDYFKKIECFDSVEISGVEDRFNASLGTYHDLLKIIKDKDFLDNEENEDILEDIVLTLTLFEDREMIEERLKTYAHLFDDKVMKQLKRRRYTGWGRLSRKLINGIRDKQSGKTILDFLKSDGFANRNFMQLIHDDSLTFKEDIQKAQVSGQGDSLHEHIANLAGSPAIKKGILQTVKVVDELVKVMGRHKPENIVIEMARENQTTQKGQKNSRERMKRIEEGIKELGSQILKEHPVENTQLQNEKLYLYYLQNGRDMYVDQELDINRLSDYDVDHIVPQSFLKDDSIDNKVLTRSDKARGKSDNVPSEEVVKKMKNYWRQLLNAKLITQRKFDNLTKAERGGLSELDKAGFIKRQLVETRQITKHVAQILDSRMNTKYDENDKLIREVKVITLKSKLVSDFRKDFQFYKVREINNYHHAHDAYLNAVVGTALIKKYPKLESEFVYGDYKVYDVRKMIAKSEQEIGKATAKYFFYSNIMNFFKTEITLANGEIRKRPLIETNGETGEIVWDKGRDFATVRKVLSMPQVNIVKKTEVQTGGFSKESILPKRNSDKLIARKKDWDPKKYGGFDSPTVAYSVLVVAKVEKGKSKKLKSVKELLGITIMERSSFEKNPIDFLEAKGYKEVKKDLIIKLPKYSLFELENGRKRMLASAGELQKGNELALPSKYVNFLYLASHYEKLKGSPEDNEQKQLFVEQHKHYLDEIIEQISEFSKRVILADANLDKVLSAYNKHRDKPIREQAENIIHLFTLTNLGAPAAFKYFDTTIDRKRYTSTKEVLDATLIHQSITGLYETRIDLSQLGGDGGGGSPAPEAAAKGGTLQLEEEYRLFEPESTQKQEMDIWLKNFPQAWAETGGMGTAHCQAPVLIQLKATATPISIRQYPMPHEAYQGIKPHIRRMLDQGILKPCQSPWNTPLLPVKKPGTEDYRPVQDLREVNKRVEDIHPTVPNPYNLLSTLPPSHPWYTVLDLKDAFFCLRLHSESQLLFAFEWRDPEIGLSGQLTWTRLPQGFKNSPTLFNEALHSDLADFRVRYPALVLLQYVDDLLLAAATRTECLEGTKALLETLGNKGYRASAKKAQICLQEVTYLGYSLKDGQRWLTKARKEAILSIPVPKNSRQVREFLGTAGYCRLWIPGFAELAAPLYPLTRPGTLFQWGTEQQLAFEDIKKALLSSPALGLPDITKPFELFIDENSGFAKGVLVQKLGPWKRPVAYLSKKLDTVASGWPPCLRMVAAIAILVKDAGKLTLGQPLTILTSHPVEALVRQPPNKWLSNARMTHYQAMLLDAERVHFGPTVSLNPATLLPLPSGGNHHDCLQILAETHGTRPDLTDQPLPDADLTWYTDGSSFIRNGEREAGAAVTTESEVIWAAPLPPGTSAQRAELIALTQALKMAEGKKLTVYTDSRYAFATTHVHGEIYRRRGWLTSEGKEIKNKNEILALLEALFLPKRLSIIHCPGHQKGDSPQAKGNRLADDTAKKAATETHSSLTVLPAGKRTADGSEFEKRTADGSEFESPKKKAKVE

SEQ ID NO: 1177 - protein, 2102 aa, synthetic construct
  source 1..2102: note = Description of Artificial Sequence: Synthetic polypeptide
MPAAKRVKLDGGDKKYSIGLDIGTNSVGWAVITDEYKVPSKKFKVLGNTDRHSIKKNLIGALLFDSGETAEATRLKRTARRRYTRRKNRICYLQEIFSNEMAKVDDSFFHRLEESFLVEEDKKHERHPIFGNIVDEVAYHEKYPTIYHLRKKLVDSTDKADLRLIYLALAHMIKFRGHFLIEGDLNPDNSDVDKLFIQLVQTYNQLFEENPINASGVDAKAILSARLSKSRRLENLIAQLPGEKKNGLFGNLIALSLGLTPNFKSNFDLAEDAKLQLSKDTYDDDLDNLLAQIGDQYADLFLAAKNLSDAILLSDILRVNTEITKAPLSASMIKRYDEHHQDLTLLKALVRQQLPEKYKEIFFDQSKNGYAGYIDGGASQEEFYKFIKPILEKMDGTEELLVKLNREDLLRKQRTFDNGSIPHQIHLGELHAILRRQEDFYPFLKDNREKIEKILTFRIPYYVGPLARGNSRFAWMTRKSEETITPWNFEEVVDKGASAQSFIERMTNFDKNLPNEKVLPKHSLLYEYFTVYNELTKVKYVTEGMRKPAFLSGEQKKAIVDLLFKTNRKVTVKQLKEDYFKKIECFDSVEISGVEDRFNASLGTYHDLLKIIKDKDFLDNEENEDILEDIVLTLTLFEDREMIEERLKTYAHLFDDKVMKQLKRRRYTGWGRLSRKLINGIRDKQSGKTILDFLKSDGFANRNFMQLIHDDSLTFKEDIQKAQVSGQGDSLHEHIANLAGSPAIKKGILQTVKVVDELVKVMGRHKPENIVIEMARENQTTQKGQKNSRERMKRIEEGIKELGSQILKEHPVENTQLQNEKLYLYYLQNGRDMYVDQELDINRLSDYDVDHIVPQSFLKDDSIDNKVLTRSDKARGKSDNVPSEEVVKKMKNYWRQLLNAKLITQRKFDNLTKAERGGLSELDKAGFIKRQLVETRQITKHVAQILDSRMNTKYDENDKLIREVKVITLKSKLVSDFRKDFQFYKVREINNYHHAHDAYLNAVVGTALIKKYPKLESEFVYGDYKVYDVRKMIAKSEQEIGKATAKYFFYSNIMNFFKTEITLANGEIRKRPLIETNGETGEIVWDKGRDFATVRKVLSMPQVNIVKKTEVQTGGFSKESILPKRNSDKLIARKKDWDPKKYGGFDSPTVAYSVLVVAKVEKGKSKKLKSVKELLGITIMERSSFEKNPIDFLEAKGYKEVKKDLIIKLPKYSLFELENGRKRMLASAGELQKGNELALPSKYVNFLYLASHYEKLKGSPEDNEQKQLFVEQHKHYLDEIIEQISEFSKRVILADANLDKVLSAYNKHRDKPIREQAENIIHLFTLTNLGAPAAFKYFDTTIDRKRYTSTKEVLDATLIHQSITGLYETRIDLSQLGGDGGGGSGGSGGSGGSGGSGGSGGTLQLEEEYRLFEPESTQKQEMDIWLKNFPQAWAETGGMGTAHCQAPVLIQLKATATPISIRQYPMPHEAYQGIKPHIRRMLDQGILKPCQSPWNTPLLPVKKPGTEDYRPVQDLREVNKRVEDIHPTVPNPYNLLSTLPPSHPWYTVLDLKDAFFCLRLHSESQLLFAFEWRDPEIGLSGQLTWTRLPQGFKNSPTLFNEALHSDLADFRVRYPALVLLQYVDDLLLAAATRTECLEGTKALLETLGNKGYRASAKKAQICLQEVTYLGYSLKDGQRWLTKARKEAILSIPVPKNSRQVREFLGTAGYCRLWIPGFAELAAPLYPLTRPGTLFQWGTEQQLAFEDIKKALLSSPALGLPDITKPFELFIDENSGFAKGVLVQKLGPWKRPVAYLSKKLDTVASGWPPCLRMVAAIAILVKDAGKLTLGQPLTILTSHPVEALVRQPPNKWLSNARMTHYQAMLLDAERVHFGPTVSLNPATLLPLPSGGNHHDCLQILAETHGTRPDLTDQPLPDADLTWYTDGSSFIRNGEREAGAAVTTESEVIWAAPLPPGTSAQRAELIALTQALKMAEGKKLTVYTDSRYAFATTHVHGEIYRRRGWLTSEGKEIKNKNEILALLEALFLPKRLSIIHCPGHQKGDSPQAKGNRLADDTAKKAATETHSSLTVLPAGKRTADGSEFEKRTADGSEFESPKKKAKVE

SEQ ID NO: 1178 - protein, 2095 aa, synthetic construct
  source 1..2095: note = Description of Artificial Sequence: Synthetic polypeptide
MPAAKRVKLDGGDKKYSIGLDIGTNSVGWAVITDEYKVPSKKFKVLGNTDRHSIKKNLIGALLFDSGETAEATRLKRTARRRYTRRKNRICYLQEIFSNEMAKVDDSFFHRLEESFLVEEDKKHERHPIFGNIVDEVAYHEKYPTIYHLRKKLVDSTDKADLRLIYLALAHMIKFRGHFLIEGDLNPDNSDVDKLFIQLVQTYNQLFEENPINASGVDAKAILSARLSKSRRLENLIAQLPGEKKNGLFGNLIALSLGLTPNFKSNFDLAEDAKLQLSKDTYDDDLDNLLAQIGDQYADLFLAAKNLSDAILLSDILRVNTEITKAPLSASMIKRYDEHHQDLTLLKALVRQQLPEKYKEIFFDQSKNGYAGYIDGGASQEEFYKFIKPILEKMDGTEELLVKLNREDLLRKQRTFDNGSIPHQIHLGELHAILRRQEDFYPFLKDNREKIEKILTFRIPYYVGPLARGNSRFAWMTRKSEETITPWNFEEVVDKGASAQSFIERMTNFDKNLPNEKVLPKHSLLYEYFTVYNELTKVKYVTEGMRKPAFLSGEQKKAIVDLLFKTNRKVTVKQLKEDYFKKIECFDSVEISGVEDRFNASLGTYHDLLKIIKDKDFLDNEENEDILEDIVLTLTLFEDREMIEERLKTYAHLFDDKVMKQLKRRRYTGWGRLSRKLINGIRDKQSGKTILDFLKSDGFANRNFMQLIHDDSLTFKEDIQKAQVSGQGDSLHEHIANLAGSPAIKKGILQTVKVVDELVKVMGRHKPENIVIEMARENQTTQKGQKNSRERMKRIEEGIKELGSQILKEHPVENTQLQNEKLYLYYLQNGRDMYVDQELDINRLSDYDVDHIVPQSFLKDDSIDNKVLTRSDKARGKSDNVPSEEVVKKMKNYWRQLLNAKLITQRKFDNLTKAERGGLSELDKAGFIKRQLVETRQITKHVAQILDSRMNTKYDENDKLIREVKVITLKSKLVSDFRKDFQFYKVREINNYHHAHDAYLNAVVGTALIKKYPKLESEFVYGDYKVYDVRKMIAKSEQEIGKATAKYFFYSNIMNFFKTEITLANGEIRKRPLIETNGETGEIVWDKGRDFATVRKVLSMPQVNIVKKTEVQTGGFSKESILPKRNSDKLIARKKDWDPKKYGGFDSPTVAYSVLVVAKVEKGKSKKLKSVKELLGITIMERSSFEKNPIDFLEAKGYKEVKKDLIIKLPKYSLFELENGRKRMLASAGELQKGNELALPSKYVNFLYLASHYEKLKGSPEDNEQKQLFVEQHKHYLDEIIEQISEFSKRVILADANLDKVLSAYNKHRDKPIREQAENIIHLFTLTNLGAPAAFKYFDTTIDRKRYTSTKEVLDATLIHQSITGLYETRIDLSQLGGDGGEAAAKGGSGSSGGTLQLEEEYRLFEPESTQKQEMDIWLKNFPQAWAETGGMGTAHCQAPVLIQLKATATPISIRQYPMPHEAYQGIKPHIRRMLDQGILKPCQSPWNTPLLPVKKPGTEDYRPVQDLREVNKRVEDIHPTVPNPYNLLSTLPPSHPWYTVLDLKDAFFCLRLHSESQLLFAFEWRDPEIGLSGQLTWTRLPQGFKNSPTLFNEALHSDLADFRVRYPALVLLQYVDDLLLAAATRTECLEGTKALLETLGNKGYRASAKKAQICLQEVTYLGYSLKDGQRWLTKARKEAILSIPVPKNSRQVREFLGTAGYCRLWIPGFAELAAPLYPLTRPGTLFQWGTEQQLAFEDIKKALLSSPALGLPDITKPFELFIDENSGFAKGVLVQKLGPWKRPVAYLSKKLDTVASGWPPCLRMVAAIAILVKDAGKLTLGQPLTILTSHPVEALVRQPPNKWLSNARMTHYQAMLLDAERVHFGPTVSLNPATLLPLPSGGNHHDCLQILAETHGTRPDLTDQPLPDADLTWYTDGSSFIRNGEREAGAAVTTESEVIWAAPLPPGTSAQRAELIALTQALKMAEGKKLTVYTDSRYAFATTHVHGEIYRRRGWLTSEGKEIKNKNEILALLEALFLPKRLSIIHCPGHQKGDSPQAKGNRLADDTAKKAATETHSSLTVLPAGKRTADGSEFEKRTADGSEFESPKKKAKVE

SEQ ID NO: 1179 - protein, 2095 aa, synthetic construct
  source 1..2095: note = Description of Artificial Sequence: Synthetic polypeptide
MPAAKRVKLDGGDKKYSIGLDIGTNSVGWAVITDEYKVPSKKFKVLGNTDRHSIKKNLIGALLFDSGETAEATRLKRTARRRYTRRKNRICYLQEIFSNEMAKVDDSFFHRLEESFLVEEDKKHERHPIFGNIVDEVAYHEKYPTIYHLRKKLVDSTDKADLRLIYLALAHMIKFRGHFLIEGDLNPDNSDVDKLFIQLVQTYNQLFEENPINASGVDAKAILSARLSKSRRLENLIAQLPGEKKNGLFGNLIALSLGLTPNFKSNFDLAEDAKLQLSKDTYDDDLDNLLAQIGDQYADLFLAAKNLSDAILLSDILRVNTEITKAPLSASMIKRYDEHHQDLTLLKALVRQQLPEKYKEIFFDQSKNGYAGYIDGGASQEEFYKFIKPILEKMDGTEELLVKLNREDLLRKQRTFDNGSIPHQIHLGELHAILRRQEDFYPFLKDNREKIEKILTFRIPYYVGPLARGNSRFAWMTRKSEETITPWNFEEVVDKGASAQSFIERMTNFDKNLPNEKVLPKHSLLYEYFTVYNELTKVKYVTEGMRKPAFLSGEQKKAIVDLLFKTNRKVTVKQLKEDYFKKIECFDSVEISGVEDRFNASLGTYHDLLKIIKDKDFLDNEENEDILEDIVLTLTLFEDREMIEERLKTYAHLFDDKVMKQLKRRRYTGWGRLSRKLINGIRDKQSGKTILDFLKSDGFANRNFMQLIHDDSLTFKEDIQKAQVSGQGDSLHEHIANLAGSPAIKKGILQTVKVVDELVKVMGRHKPENIVIEMARENQTTQKGQKNSRERMKRIEEGIKELGSQILKEHPVENTQLQNEKLYLYYLQNGRDMYVDQELDINRLSDYDVDHIVPQSFLKDDSIDNKVLTRSDKARGKSDNVPSEEVVKKMKNYWRQLLNAKLITQRKFDNLTKAERGGLSELDKAGFIKRQLVETRQITKHVAQILDSRMNTKYDENDKLIREVKVITLKSKLVSDFRKDFQFYKVREINNYHHAHDAYLNAVVGTALIKKYPKLESEFVYGDYKVYDVRKMIAKSEQEIGKATAKYFFYSNIMNFFKTEITLANGEIRKRPLIETNGETGEIVWDKGRDFATVRKVLSMPQVNIVKKTEVQTGGFSKESILPKRNSDKLIARKKDWDPKKYGGFDSPTVAYSVLVVAKVEKGKSKKLKSVKELLGITIMERSSFEKNPIDFLEAKGYKEVKKDLIIKLPKYSLFELENGRKRMLASAGELQKGNELALPSKYVNFLYLASHYEKLKGSPEDNEQKQLFVEQHKHYLDEIIEQISEFSKRVILADANLDKVLSAYNKHRDKPIREQAENIIHLFTLTNLGAPAAFKYFDTTIDRKRYTSTKEVLDATLIHQSITGLYETRIDLSQLGGDGGGGGEAAAKPAPGGTLQLEEEYRLFEPESTQKQEMDIWLKNFPQAWAETGGMGTAHCQAPVLIQLKATATPISIRQYPMPHEAYQGIKPHIRRMLDQGILKPCQSPWNTPLLPVKKPGTEDYRPVQDLREVNKRVEDIHPTVPNPYNLLSTLPPSHPWYTVLDLKDAFFCLRLHSESQLLFAFEWRDPEIGLSGQLTWTRLPQGFKNSPTLFNEALHSDLADFRVRYPALVLLQYVDDLLLAAATRTECLEGTKALLETLGNKGYRASAKKAQICLQEVTYLGYSLKDGQRWLTKARKEAILSIPVPKNSRQVREFLGTAGYCRLWIPGFAELAAPLYPLTRPGTLFQWGTEQQLAFEDIKKALLSSPALGLPDITKPFELFIDENSGFAKGVLVQKLGPWKRPVAYLSKKLDTVASGWPPCLRMVAAIAILVKDAGKLTLGQPLTILTSHPVEALVRQPPNKWLSNARMTHYQAMLLDAERVHFGPTVSLNPATLLPLPSGGNHHDCLQILAETHGTRPDLTDQPLPDADLTWYTDGSSFIRNGEREAGAAVTTESEVIWAAPLPPGTSAQRAELIALTQALKMAEGKKLTVYTDSRYAFATTHVHGEIYRRRGWLTSEGKEIKNKNEILALLEALFLPKRLSIIHCPGHQKGDSPQAKGNRLADDTAKKAATETHSSLTVLPAGKRTADGSEFEKRTADGSEFESPKKKAKVE

SEQ ID NO: 1180 - protein, 2094 aa, synthetic construct
  source 1..2094: note = Description of Artificial Sequence: Synthetic polypeptide
MPAAKRVKLDGGDKKYSIGLDIGTNSVGWAVITDEYKVPSKKFKVLGNTDRHSIKKNLIGALLFDSGETAEATRLKRTARRRYTRRKNRICYLQEIFSNEMAKVDDSFFHRLEESFLVEEDKKHERHPIFGNIVDEVAYHEKYPTIYHLRKKLVDSTDKADLRLIYLALAHMIKFRGHFLIEGDLNPDNSDVDKLFIQLVQTYNQLFEENPINASGVDAKAILSARLSKSRRLENLIAQLPGEKKNGLFGNLIALSLGLTPNFKSNFDLAEDAKLQLSKDTYDDDLDNLLAQIGDQYADLFLAAKNLSDAILLSDILRVNTEITKAPLSASMIKRYDEHHQDLTLLKALVRQQLPEKYKEIFFDQSKNGYAGYIDGGASQEEFYKFIKPILEKMDGTEELLVKLNREDLLRKQRTFDNGSIPHQIHLGELHAILRRQEDFYPFLKDNREKIEKILTFRIPYYVGPLARGNSRFAWMTRKSEETITPWNFEEVVDKGASAQSFIERMTNFDKNLPNEKVLPKHSLLYEYFTVYNELTKVKYVTEGMRKPAFLSGEQKKAIVDLLFKTNRKVTVKQLKEDYFKKIECFDSVEISGVEDRFNASLGTYHDLLKIIKDKDFLDNEENEDILEDIVLTLTLFEDREMIEERLKTYAHLFDDKVMKQLKRRRYTGWGRLSRKLINGIRDKQSGKTILDFLKSDGFANRNFMQLIHDDSLTFKEDIQKAQVSGQGDSLHEHIANLAGSPAIKKGILQTVKVVDELVKVMGRHKPENIVIEMARENQTTQKGQKNSRERMKRIEEGIKELGSQILKEHPVENTQLQNEKLYLYYLQNGRDMYVDQELDINRLSDYDVDHIVPQSFLKDDSIDNKVLTRSDKARGKSDNVPSEEVVKKMKNYWRQLLNAKLITQRKFDNLTKAERGGLSELDKAGFIKRQLVETRQITKHVAQILDSRMNTKYDENDKLIREVKVITLKSKLVSDFRKDFQFYKVREINNYHHAHDAYLNAVVGTALIKKYPKLESEFVYGDYKVYDVRKMIAKSEQEIGKATAKYFFYSNIMNFFKTEITLANGEIRKRPLIETNGETGEIVWDKGRDFATVRKVLSMPQVNIVKKTEVQTGGFSKESILPKRNSDKLIARKKDWDPKKYGGFDSPTVAYSVLVVAKVEKGKSKKLKSVKELLGITIMERSSFEKNPIDFLEAKGYKEVKKDLIIKLPKYSLFELENGRKRMLASAGELQKGNELALPSKYVNFLYLASHYEKLKGSPEDNEQKQLFVEQHKHYLDEIIEQISEFSKRVILADANLDKVLSAYNKHRDKPIREQAENIIHLFTLTNLGAPAAFKYFDTTIDRKRYTSTKEVLDATLIHQSITGLYETRIDLSQLGGDGGGGGGSGGGGSGGTLQLEEEYRLFEPESTQKQEMDIWLKNFPQAWAETGGMGTAHCQAPVLIQLKATATPISIRQYPMPHEAYQGIKPHIRRMLDQGILKPCQSPWNTPLLPVKKPGTEDYRPVQDLREVNKRVEDIHPTVPNPYNLLSTLPPSHPWYTVLDLKDAFFCLRLHSESQLLFAFEWRDPEIGLSGQLTWTRLPQGFKNSPTLFNEALHSDLADFRVRYPALVLLQYVDDLLLAAATRTECLEGTKALLETLGNKGYRASAKKAQICLQEVTYLGYSLKDGQRWLTKARKEAILSIPVPKNSRQVREFLGTAGYCRLWIPGFAELAAPLYPLTRPGTLFQWGTEQQLAFEDIKKALLSSPALGLPDITKPFELFIDENSGFAKGVLVQKLGPWKRPVAYLSKKLDTVASGWPPCLRMVAAIAILVKDAGKLTLGQPLTILTSHPVEALVRQPPNKWLSNARMTHYQAMLLDAERVHFGPTVSLNPATLLPLPSGGNHHDCLQILAETHGTRPDLTDQPLPDADLTWYTDGSSFIRNGEREAGAAVTTESEVIWAAPLPPGTSAQRAELIALTQALKMAEGKKLTVYTDSRYAFATTHVHGEIYRRRGWLTSEGKEIKNKNEILALLEALFLPKRLSIIHCPGHQKGDSPQAKGNRLADDTAKKAATETHSSLTVLPAGKRTADGSEFEKRTADGSEFESPKKKAKVE

SEQ ID NO: 1181 - protein, 2091 aa, synthetic construct
  source 1..2091: note = Description of Artificial Sequence: Synthetic polypeptide
MPAAKRVKLDGGDKKYSIGLDIGTNSVGWAVITDEYKVPSKKFKVLGNTDRHSIKKNLIGALLFDSGETAEATRLKRTARRRYTRRKNRICYLQEIFSNEMAKVDDSFFHRLEESFLVEEDKKHERHPIFGNIVDEVAYHEKYPTIYHLRKKLVDSTDKADLRLIYLALAHMIKFRGHFLIEGDLNPDNSDVDKLFIQLVQTYNQLFEENPINASGVDAKAILSARLSKSRRLENLIAQLPGEKKNGLFGNLIALSLGLTPNFKSNFDLAEDAKLQLSKDTYDDDLDNLLAQIGDQYADLFLAAKNLSDAILLSDILRVNTEITKAPLSASMIKRYDEHHQDLTLLKALVRQQLPEKYKEIFFDQSKNGYAGYIDGGASQEEFYKFIKPILEKMDGTEELLVKLNREDLLRKQRTFDNGSIPHQIHLGELHAILRRQEDFYPFLKDNREKIEKILTFRIPYYVGPLARGNSRFAWMTRKSEETITPWNFEEVVDKGASAQSFIERMTNFDKNLPNEKVLPKHSLLYEYFTVYNELTKVKYVTEGMRKPAFLSGEQKKAIVDLLFKTNRKVTVKQLKEDYFKKIECFDSVEISGVEDRFNASLGTYHDLLKIIKDKDFLDNEENEDILEDIVLTLTLFEDREMIEERLKTYAHLFDDKVMKQLKRRRYTGWGRLSRKLINGIRDKQSGKTILDFLKSDGFANRNFMQLIHDDSLTFKEDIQKAQVSGQGDSLHEHIANLAGSPAIKKGILQTVKVVDELVKVMGRHKPENIVIEMARENQTTQKGQKNSRERMKRIEEGIKELGSQILKEHPVENTQLQNEKLYLYYLQNGRDMYVDQELDINRLSDYDVDHIVPQSFLKDDSIDNKVLTRSDKARGKSDNVPSEEVVKKMKNYWRQLLNAKLITQRKFDNLTKAERGGLSELDKAGFIKRQLVETRQITKHVAQILDSRMNTKYDENDKLIREVKVITLKSKLVSDFRKDFQFYKVREINNYHHAHDAYLNAVVGTALIKKYPKLESEFVYGDYKVYDVRKMIAKSEQEIGKATAKYFFYSNIMNFFKTEITLANGEIRKRPLIETNGETGEIVWDKGRDFATVRKVLSMPQVNIVKKTEVQTGGFSKESILPKRNSDKLIARKKDWDPKKYGGFDSPTVAYSVLVVAKVEKGKSKKLKSVKELLGITIMERSSFEKNPIDFLEAKGYKEVKKDLIIKLPKYSLFELENGRKRMLASAGELQKGNELALPSKYVNFLYLASHYEKLKGSPEDNEQKQLFVEQHKHYLDEIIEQISEFSKRVILADANLDKVLSAYNKHRDKPIREQAENIIHLFTLTNLGAPAAFKYFDTTIDRKRYTSTKEVLDATLIHQSITGLYETRIDLSQLGGDGGGGGGGGGGGTLQLEEEYRLFEPESTQKQEMDIWLKNFPQAWAETGGMGTAHCQAPVLIQLKATATPISIRQYPMPHEAYQGIKPHIRRMLDQGILKPCQSPWNTPLLPVKKPGTEDYRPVQDLREVNKRVEDIHPTVPNPYNLLSTLPPSHPWYTVLDLKDAFFCLRLHSESQLLFAFEWRDPEIGLSGQLTWTRLPQGFKNSPTLFNEALHSDLADFRVRYPALVLLQYVDDLLLAAATRTECLEGTKALLETLGNKGYRASAKKAQICLQEVTYLGYSLKDGQRWLTKARKEAILSIPVPKNSRQVREFLGTAGYCRLWIPGFAELAAPLYPLTRPGTLFQWGTEQQLAFEDIKKALLSSPALGLPDITKPFELFIDENSGFAKGVLVQKLGPWKRPVAYLSKKLDTVASGWPPCLRMVAAIAILVKDAGKLTLGQPLTILTSHPVEALVRQPPNKWLSNARMTHYQAMLLDAERVHFGPTVSLNPATLLPLPSGGNHHDCLQILAETHGTRPDLTDQPLPDADLTWYTDGSSFIRNGEREAGAAVTTESEVIWAAPLPPGTSAQRAELIALTQALKMAEGKKLTVYTDSRYAFATTHVHGEIYRRRGWLTSEGKEIKNKNEILALLEALFLPKRLSIIHCPGHQKGDSPQAKGNRLADDTAKKAATETHSSLTVLPAGKRTADGSEFEKRTADGSEFESPKKKAKVE

SEQ ID NO: 1182 - protein, 2093 aa, synthetic construct
  source 1..2093: note = Description of Artificial Sequence: Synthetic polypeptide
MPAAKRVKLDGGDKKYSIGLDIGTNSVGWAVITDEYKVPSKKFKVLGNTDRHSIKKNLIGALLFDSGETAEATRLKRTARRRYTRRKNRICYLQEIFSNEMAKVDDSFFHRLEESFLVEEDKKHERHPIFGNIVDEVAYHEKYPTIYHLRKKLVDSTDKADLRLIYLALAHMIKFRGHFLIEGDLNPDNSDVDKLFIQLVQTYNQLFEENPINASGVDAKAILSARLSKSRRLENLIAQLPGEKKNGLFGNLIALSLGLTPNFKSNFDLAEDAKLQLSKDTYDDDLDNLLAQIGDQYADLFLAAKNLSDAILLSDILRVNTEITKAPLSASMIKRYDEHHQDLTLLKALVRQQLPEKYKEIFFDQSKNGYAGYIDGGASQEEFYKFIKPILEKMDGTEELLVKLNREDLLRKQRTFDNGSIPHQIHLGELHAILRRQEDFYPFLKDNREKIEKILTFRIPYYVGPLARGNSRFAWMTRKSEETITPWNFEEVVDKGASAQSFIERMTNFDKNLPNEKVLPKHSLLYEYFTVYNELTKVKYVTEGMRKPAFLSGEQKKAIVDLLFKTNRKVTVKQLKEDYFKKIECFDSVEISGVEDRFNASLGTYHDLLKIIKDKDFLDNEENEDILEDIVLTLTLFEDREMIEERLKTYAHLFDDKVMKQLKRRRYTGWGRLSRKLINGIRDKQSGKTILDFLKSDGFANRNFMQLIHDDSLTFKEDIQKAQVSGQGDSLHEHIANLAGSPAIKKGILQTVKVVDELVKVMGRHKPENIVIEMARENQTTQKGQKNSRERMKRIEEGIKELGSQILKEHPVENTQLQNEKLYLYYLQNGRDMYVDQELDINRLSDYDVDHIVPQSFLKDDSIDNKVLTRSDKARGKSDNVPSEEVVKKMKNYWRQLLNAKLITQRKFDNLTKAERGGLSELDKAGFIKRQLVETRQITKHVAQILDSRMNTKYDENDKLIREVKVITLKSKLVSDFRKDFQFYKVREINNYHHAHDAYLNAVVGTALIKKYPKLESEFVYGDYKVYDVRKMIAKSEQEIGKATAKYFFYSNIMNFFKTEITLANGEIRKRPLIETNGETGEIVWDKGRDFATVRKVLSMPQVNIVKKTEVQTGGFSKESILPKRNSDKLIARKKDWDPKKYGGFDSPTVAYSVLVVAKVEKGKSKKLKSVKELLGITIMERSSFEKNPIDFLEAKGYKEVKKDLIIKLPKYSLFELENGRKRMLASAGELQKGNELALPSKYVNFLYLASHYEKLKGSPEDNEQKQLFVEQHKHYLDEIIEQISEFSKRVILADANLDKVLSAYNKHRDKPIREQAENIIHLFTLTNLGAPAAFKYFDTTIDRKRYTSTKEVLDATLIHQSITGLYETRIDLSQLGGDGGGGGPAPGGSGGTLQLEEEYRLFEPESTQKQEMDIWLKNFPQAWAETGGMGTAHCQAPVLIQLKATATPISIRQYPMPHEAYQGIKPHIRRMLDQGILKPCQSPWNTPLLPVKKPGTEDYRPVQDLREVNKRVEDIHPTVPNPYNLLSTLPPSHPWYTVLDLKDAFFCLRLHSESQLLFAFEWRDPEIGLSGQLTWTRLPQGFKNSPTLFNEALHSDLADFRVRYPALVLLQYVDDLLLAAATRTECLEGTKALLETLGNKGYRASAKKAQICLQEVTYLGYSLKDGQRWLTKARKEAILSIPVPKNSRQVREFLGTAGYCRLWIPGFAELAAPLYPLTRPGTLFQWGTEQQLAFEDIKKALLSSPALGLPDITKPFELFIDENSGFAKGVLVQKLGPWKRPVAYLSKKLDTVASGWPPCLRMVAAIAILVKDAGKLTLGQPLTILTSHPVEALVRQPPNKWLSNARMTHYQAMLLDAERVHFGPTVSLNPATLLPLPSGGNHHDCLQILAETHGTRPDLTDQPLPDADLTWYTDGSSFIRNGEREAGAAVTTESEVIWAAPLPPGTSAQRAELIALTQALKMAEGKKLTVYTDSRYAFATTHVHGEIYRRRGWLTSEGKEIKNKNEILALLEALFLPKRLSIIHCPGHQKGDSPQAKGNRLADDTAKKAATETHSSLTVLPAGKRTADGSEFEKRTADGSEFESPKKKAKVE

SEQ ID NO: 1183 - protein, 2089 aa, synthetic construct
  source 1..2089: note = Description of Artificial Sequence: Synthetic polypeptide
MPAAKRVKLDGGDKKYSIGLDIGTNSVGWAVITDEYKVPSKKFKVLGNTDRHSIKKNLIGALLFDSGETAEATRLKRTARRRYTRRKNRICYLQEIFSNEMAKVDDSFFHRLEESFLVEEDKKHERHPIFGNIVDEVAYHEKYPTIYHLRKKLVDSTDKADLRLIYLALAHMIKFRGHFLIEGDLNPDNSDVDKLFIQLVQTYNQLFEENPINASGVDAKAILSARLSKSRRLENLIAQLPGEKKNGLFGNLIALSLGLTPNFKSNFDLAEDAKLQLSKDTYDDDLDNLLAQIGDQYADLFLAAKNLSDAILLSDILRVNTEITKAPLSASMIKRYDEHHQDLTLLKALVRQQLPEKYKEIFFDQSKNGYAGYIDGGASQEEFYKFIKPILEKMDGTEELLVKLNREDLLRKQRTFDNGSIPHQIHLGELHAILRRQEDFYPFLKDNREKIEKILTFRIPYYVGPLARGNSRFAWMTRKSEETITPWNFEEVVDKGASAQSFIERMTNFDKNLPNEKVLPKHSLLYEYFTVYNELTKVKYVTEGMRKPAFLSGEQKKAIVDLLFKTNRKVTVKQLKEDYFKKIECFDSVEISGVEDRFNASLGTYHDLLKIIKDKDFLDNEENEDILEDIVLTLTLFEDREMIEERLKTYAHLFDDKVMKQLKRRRYTGWGRLSRKLINGIRDKQSGKTILDFLKSDGFANRNFMQLIHDDSLTFKEDIQKAQVSGQGDSLHEHIANLAGSPAIKKGILQTVKVVDELVKVMGRHKPENIVIEMARENQTTQKGQKNSRERMKRIEEGIKELGSQILKEHPVENTQLQNEKLYLYYLQNGRDMYVDQELDINRLSDYDVDHIVPQSFLKDDSIDNKVLTRSDKARGKSDNVPSEEVVKKMKNYWRQLLNAKLITQRKFDNLTKAERGGLSELDKAGFIKRQLVETRQITKHVAQILDSRMNTKYDENDKLIREVKVITLKSKLVSDFRKDFQFYKVREINNYHHAHDAYLNAVVGTALIKKYPKLESEFVYGDYKVYDVRKMIAKSEQEIGKATAKYFFYSNIMNFFKTEITLANGEIRKRPLIETNGETGEIVWDKGRDFATVRKVLSMPQVNIVKKTEVQTGGFSKESILPKRNSDKLIARKKDWDPKKYGGFDSPTVAYSVLVVAKVEKGKSKKLKSVKELLGITIMERSSFEKNPIDFLEAKGYKEVKKDLIIKLPKYSLFELENGRKRMLASAGELQKGNELALPSKYVNFLYLASHYEKLKGSPEDNEQKQLFVEQHKHYLDEIIEQISEFSKRVILADANLDKVLSAYNKHRDKPIREQAENIIHLFTLTNLGAPAAFKYFDTTIDRKRYTSTKEVLDATLIHQSITGLYETRIDLSQLGGDGGEAAAKGGTLQLEEEYRLFEPESTQKQEMDIWLKNFPQAWAETGGMGTAHCQAPVLIQLKATATPISIRQYPMPHEAYQGIKPHIRRMLDQGILKPCQSPWNTPLLPVKKPGTEDYRPVQDLREVNKRVEDIHPTVPNPYNLLSTLPPSHPWYTVLDLKDAFFCLRLHSESQLLFAFEWRDPEIGLSGQLTWTRLPQGFKNSPTLFNEALHSDLADFRVRYPALVLLQYVDDLLLAAATRTECLEGTKALLETLGNKGYRASAKKAQICLQEVTYLGYSLKDGQRWLTKARKEAILSIPVPKNSRQVREFLGTAGYCRLWIPGFAELAAPLYPLTRPGTLFQWGTEQQLAFEDIKKALLSSPALGLPDITKPFELFIDENSGFAKGVLVQKLGPWKRPVAYLSKKLDTVASGWPPCLRMVAAIAILVKDAGKLTLGQPLTILTSHPVEALVRQPPNKWLSNARMTHYQAMLLDAERVHFGPTVSLNPATLLPLPSGGNHHDCLQILAETHGTRPDLTDQPLPDADLTWYTDGSSFIRNGEREAGAAVTTESEVIWAAPLPPGTSAQRAELIALTQALKMAEGKKLTVYTDSRYAFATTHVHGEIYRRRGWLTSEGKEIKNKNEILALLEALFLPKRLSIIHCPGHQKGDSPQAKGNRLADDTAKKAATETHSSLTVLPAGKRTADGSEFEKRTADGSEFESPKKKAKVE

SEQ ID NO: 1184 - protein, 2090 aa, synthetic construct
  source 1..2090: note = Description of Artificial Sequence: Synthetic polypeptide
MPAAKRVKLDGGDKKYSIGLDIGTNSVGWAVITDEYKVPSKKFKVLGNTDRHSIKKNLIGALLFDSGETAEATRLKRTARRRYTRRKNRICYLQEIFSNEMAKVDDSFFHRLEESFLVEEDKKHERHPIFGNIVDEVAYHEKYPTIYHLRKKLVDSTDKADLRLIYLALAHMIKFRGHFLIEGDLNPDNSDVDKLFIQLVQTYNQLFEENPINASGVDAKAILSARLSKSRRLENLIAQLPGEKKNGLFGNLIALSLGLTPNFKSNFDLAEDAKLQLSKDTYDDDLDNLLAQIGDQYADLFLAAKNLSDAILLSDILRVNTEITKAPLSASMIKRYDEHHQDLTLLKALVRQQLPEKYKEIFFDQSKNGYAGYIDGGASQEEFYKFIKPILEKMDGTEELLVKLNREDLLRKQRTFDNGSIPHQIHLGELHAILRRQEDFYPFLKDNREKIEKILTFRIPYYVGPLARGNSRFAWMTRKSEETITPWNFEEVVDKGASAQSFIERMTNFDKNLPNEKVLPKHSLLYEYFTVYNELTKVKYVTEGMRKPAFLSGEQKKAIVDLLFKTNRKVTVKQLKEDYFKKIECFDSVEISGVEDRFNASLGTYHDLLKIIKDKDFLDNEENEDILEDIVLTLTLFEDREMIEERLKTYAHLFDDKVMKQLKRRRYTGWGRLSRKLINGIRDKQSGKTILDFLKSDGFANRNFMQLIHDDSLTFKEDIQKAQVSGQGDSLHEHIANLAGSPAIKKGILQTVKVVDELVKVMGRHKPENIVIEMARENQTTQKGQKNSRERMKRIEEGIKELGSQILKEHPVENTQLQNEKLYLYYLQNGRDMYVDQELDINRLSDYDVDHIVPQSFLKDDSIDNKVLTRSDKARGKSDNVPSEEVVKKMKNYWRQLLNAKLITQRKFDNLTKAERGGLSELDKAGFIKRQLVETRQITKHVAQILDSRMNTKYDENDKLIREVKVITLKSKLVSDFRKDFQFYKVREINNYHHAHDAYLNAVVGTALIKKYPKLESEFVYGDYKVYDVRKMIAKSEQEIGKATAKYFFYSNIMNFFKTEITLANGEIRKRPLIETNGETGEIVWDKGRDFATVRKVLSMPQVNIVKKTEVQTGGFSKESILPKRNSDKLIARKKDWDPKKYGGFDSPTVAYSVLVVAKVEKGKSKKLKSVKELLGITIMERSSFEKNPIDFLEAKGYKEVKKDLIIKLPKYSLFELENGRKRMLASAGELQKGNELALPSKYVNFLYLASHYEKLKGSPEDNEQKQLFVEQHKHYLDEIIEQISEFSKRVILADANLDKVLSAYNKHRDKPIREQAENIIHLFTLTNLGAPAAFKYFDTTIDRKRYTSTKEVLDATLIHQSITGLYETRIDLSQLGGDGGGGSGGGGGTLQLEEEYRLFEPESTQKQEMDIWLKNFPQAWAETGGMGTAHCQAPVLIQLKATATPISIRQYPMPHEAYQGIKPHIRRMLDQGILKPCQSPWNTPLLPVKKPGTEDYRPVQDLREVNKRVEDIHPTVPNPYNLLSTLPPSHPWYTVLDLKDAFFCLRLHSESQLLFAFEWRDPEIGLSGQLTWTRLPQGFKNSPTLFNEALHSDLADFRVRYPALVLLQYVDDLLLAAATRTECLEGTKALLETLGNKGYRASAKKAQICLQEVTYLGYSLKDGQRWLTKARKEAILSIPVPKNSRQVREFLGTAGYCRLWIPGFAELAAPLYPLTRPGTLFQWGTEQQLAFEDIKKALLSSPALGLPDITKPFELFIDENSGFAKGVLVQKLGPWKRPVAYLSKKLDTVASGWPPCLRMVAAIAILVKDAGKLTLGQPLTILTSHPVEALVRQPPNKWLSNARMTHYQAMLLDAERVHFGPTVSLNPATLLPLPSGGNHHDCLQILAETHGTRPDLTDQPLPDADLTWYTDGSSFIRNGEREAGAAVTTESEVIWAAPLPPGTSAQRAELIALTQALKMAEGKKLTVYTDSRYAFATTHVHGEIYRRRGWLTSEGKEIKNKNEILALLEALFLPKRLSIIHCPGHQKGDSPQAKGNRLADDTAKKAATETHSSLTVLPAGKRTADGSEFEKRTADGSEFESPKKKAKVE

SEQ ID NO: 1185 - protein, 2095 aa, synthetic construct
  source 1..2095: note = Description of Artificial Sequence: Synthetic polypeptide
MPAAKRVKLDGGDKKYSIGLDIGTNSVGWAVITDEYKVPSKKFKVLGNTDRHSIKKNLIGALLFDSGETAEATRLKRTARRRYTRRKNRICYLQEIFSNEMAKVDDSFFHRLEESFLVEEDKKHERHPIFGNIVDEVAYHEKYPTIYHLRKKLVDSTDKADLRLIYLALAHMIKFRGHFLIEGDLNPDNSDVDKLFIQLVQTYNQLFEENPINASGVDAKAILSARLSKSRRLENLIAQLPGEKKNGLFGNLIALSLGLTPNFKSNFDLAEDAKLQLSKDTYDDDLDNLLAQIGDQYADLFLAAKNLSDAILLSDILRVNTEITKAPLSASMIKRYDEHHQDLTLLKALVRQQLPEKYKEIFFDQSKNGYAGYIDGGASQEEFYKFIKPILEKMDGTEELLVKLNREDLLRKQRTFDNGSIPHQIHLGELHAILRRQEDFYPFLKDNREKIEKILTFRIPYYVGPLARGNSRFAWMTRKSEETITPWNFEEVVDKGASAQSFIERMTNFDKNLPNEKVLPKHSLLYEYFTVYNELTKVKYVTEGMRKPAFLSGEQKKAIVDLLFKTNRKVTVKQLKEDYFKKIECFDSVEISGVEDRFNASLGTYHDLLKIIKDKDFLDNEENEDILEDIVLTLTLFEDREMIEERLKTYAHLFDDKVMKQLKRRRYTGWGRLSRKLINGIRDKQSGKTILDFLKSDGFANRNFMQLIHDDSLTFKEDIQKAQVSGQGDSLHEHIANLAGSPAIKKGILQTVKVVDELVKVMGRHKPENIVIEMARENQTTQKGQKNSRERMKRIEEGIKELGSQILKEHPVENTQLQNEKLYLYYLQNGRDMYVDQELDINRLSDYDVDHIVPQSFLKDDSIDNKVLTRSDKARGKSDNVPSEEVVKKMKNYWRQLLNAKLITQRKFDNLTKAERGGLSELDKAGFIKRQLVETRQITKHVAQILDSRMNTKYDENDKLIREVKVITLKSKLVSDFRKDFQFYKVREINNYHHAHDAYLNAVVGTALIKKYPKLESEFVYGDYKVYDVRKMIAKSEQEIGKATAKYFFYSNIMNFFKTEITLANGEIRKRPLIETNGETGEIVWDKGRDFATVRKVLSMPQVNIVKKTEVQTGGFSKESILPKRNSDKLIARKKDWDPKKYGGFDSPTVAYSVLVVAKVEKGKSKKLKSVKELLGITIMERSSFEKNPIDFLEAKGYKEVKKDLIIKLPKYSLFELENGRKRMLASAGELQKGNELALPSKYVNFLYLASHYEKLKGSPEDNEQKQLFVEQHKHYLDEIIEQISEFSKRVILADANLDKVLSAYNKHRDKPIREQAENIIHLFTLTNLGAPAAFKYFDTTIDRKRYTSTKEVLDATLIHQSITGLYETRIDLSQLGGDGGEAAAKPAPGGGGGTLQLEEEYRLFEPESTQKQEMDIWLKNFPQAWAETGGMGTAHCQAPVLIQLKATATPISIRQYPMPHEAYQGIKPHIRRMLDQGILKPCQSPWNTPLLPVKKPGTEDYRPVQDLREVNKRVEDIHPTVPNPYNLLSTLPPSHPWYTVLDLKDAFFCLRLHSESQLLFAFEWRDPEIGLSGQLTWTRLPQGFKNSPTLFNEALHSDLADFRVRYPALVLLQYVDDLLLAAATRTECLEGTKALLETLGNKGYRASAKKAQICLQEVTYLGYSLKDGQRWLTKARKEAILSIPVPKNSRQVREFLGTAGYCRLWIPGFAELAAPLYPLTRPGTLFQWGTEQQLAFEDIKKALLSSPALGLPDITKPFELFIDENSGFAKGVLVQKLGPWKRPVAYLSKKLDTVASGWPPCLRMVAAIAILVKDAGKLTLGQPLTILTSHPVEALVRQPPNKWLSNARMTHYQAMLLDAERVHFGPTVSLNPATLLPLPSGGNHHDCLQILAETHGTRPDLTDQPLPDADLTWYTDGSSFIRNGEREAGAAVTTESEVIWAAPLPPGTSAQRAELIALTQALKMAEGKKLTVYTDSRYAFATTHVHGEIYRRRGWLTSEGKEIKNKNEILALLEALFLPKRLSIIHCPGHQKGDSPQAKGNRLADDTAKKAATETHSSLTVLPAGKRTADGSEFEKRTADGSEFESPKKKAKVE

SEQ ID NO: 1186 - protein, 2095 aa, synthetic construct
  source 1..2095: note = Description of Artificial Sequence: Synthetic polypeptide
MPAAKRVKLDGGDKKYSIGLDIGTNSVGWAVITDEYKVPSKKFKVLGNTDRHSIKKNLIGALLFDSGETAEATRLKRTARRRYTRRKNRICYLQEIFSNEMAKVDDSFFHRLEESFLVEEDKKHERHPIFGNIVDEVAYHEKYPTIYHLRKKLVDSTDKADLRLIYLALAHMIKFRGHFLIEGDLNPDNSDVDKLFIQLVQTYNQLFEENPINASGVDAKAILSARLSKSRRLENLIAQLPGEKKNGLFGNLIALSLGLTPNFKSNFDLAEDAKLQLSKDTYDDDLDNLLAQIGDQYADLFLAAKNLSDAILLSDILRVNTEITKAPLSASMIKRYDEHHQDLTLLKALVRQQLPEKYKEIFFDQSKNGYAGYIDGGASQEEFYKFIKPILEKMDGTEELLVKLNREDLLRKQRTFDNGSIPHQIHLGELHAILRRQEDFYPFLKDNREKIEKILTFRIPYYVGPLARGNSRFAWMTRKSEETITPWNFEEVVDKGASAQSFIERMTNFDKNLPNEKVLPKHSLLYEYFTVYNELTKVKYVTEGMRKPAFLSGEQKKAIVDLLFKTNRKVTVKQLKEDYFKKIECFDSVEISGVEDRFNASLGTYHDLLKIIKDKDFLDNEENEDILEDIVLTLTLFEDREMIEERLKTYAHLFDDKVMKQLKRRRYTGWGRLSRKLINGIRDKQSGKTILDFLKSDGFANRNFMQLIHDDSLTFKEDIQKAQVSGQGDSLHEHIANLAGSPAIKKGILQTVKVVDELVKVMGRHKPENIVIEMARENQTTQKGQKNSRERMKRIEEGIKELGSQILKEHPVENTQLQNEKLYLYYLQNGRDMYVDQELDINRLSDYDVDHIVPQSFLKDDSIDNKVLTRSDKARGKSDNVPSEEVVKKMKNYWRQLLNAKLITQRKFDNLTKAERGGLSELDKAGFIKRQLVETRQITKHVAQILDSRMNTKYDENDKLIREVKVITLKSKLVSDFRKDFQFYKVREINNYHHAHDAYLNAVVGTALIKKYPKLESEFVYGDYKVYDVRKMIAKSEQEIGKATAKYFFYSNIMNFFKTEITLANGEIRKRPLIETNGETGEIVWDKGRDFATVRKVLSMPQVNIVKKTEVQTGGFSKESILPKRNSDKLIARKKDWDPKKYGGFDSPTVAYSVLVVAKVEKGKSKKLKSVKELLGITIMERSSFEKNPIDFLEAKGYKEVKKDLIIKLPKYSLFELENGRKRMLASAGELQKGNELALPSKYVNFLYLASHYEKLKGSPEDNEQKQLFVEQHKHYLDEIIEQISEFSKRVILADANLDKVLSAYNKHRDKPIREQAENIIHLFTLTNLGAPAAFKYFDTTIDRKRYTSTKEVLDATLIHQSITGLYETRIDLSQLGGDGGGGGPAPEAAAKGGTLQLEEEYRLFEPESTQKQEMDIWLKNFPQAWAETGGMGTAHCQAPVLIQLKATATPISIRQYPMPHEAYQGIKPHIRRMLDQGILKPCQSPWNTPLLPVKKPGTEDYRPVQDLREVNKRVEDIHPTVPNPYNLLSTLPPSHPWYTVLDLKDAFFCLRLHSESQLLFAFEWRDPEIGLSGQLTWTRLPQGFKNSPTLFNEALHSDLADFRVRYPALVLLQYVDDLLLAAATRTECLEGTKALLETLGNKGYRASAKKAQICLQEVTYLGYSLKDGQRWLTKARKEAILSIPVPKNSRQVREFLGTAGYCRLWIPGFAELAAPLYPLTRPGTLFQWGTEQQLAFEDIKKALLSSPALGLPDITKPFELFIDENSGFAKGVLVQKLGPWKRPVAYLSKKLDTVASGWPPCLRMVAAIAILVKDAGKLTLGQPLTILTSHPVEALVRQPPNKWLSNARMTHYQAMLLDAERVHFGPTVSLNPATLLPLPSGGNHHDCLQILAETHGTRPDLTDQPLPDADLTWYTDGSSFIRNGEREAGAAVTTESEVIWAAPLPPGTSAQRAELIALTQALKMAEGKKLTVYTDSRYAFATTHVHGEIYRRRGWLTSEGKEIKNKNEILALLEALFLPKRLSIIHCPGHQKGDSPQAKGNRLADDTAKKAATETHSSLTVLPAGKRTADGSEFEKRTADGSEFESPKKKAKVE

SEQ ID NO: 1187 - protein, 2095 aa, synthetic construct
  source 1..2095: note = Description of Artificial Sequence: Synthetic polypeptide
MPAAKRVKLDGGDKKYSIGLDIGTNSVGWAVITDEYKVPSKKFKVLGNTDRHSIKKNLIGALLFDSGETAEATRLKRTARRRYTRRKNRICYLQEIFSNEMAKVDDSFFHRLEESFLVEEDKKHERHPIFGNIVDEVAYHEKYPTIYHLRKKLVDSTDKADLRLIYLALAHMIKFRGHFLIEGDLNPDNSDVDKLFIQLVQTYNQLFEENPINASGVDAKAILSARLSKSRRLENLIAQLPGEKKNGLFGNLIALSLGLTPNFKSNFDLAEDAKLQLSKDTYDDDLDNLLAQIGDQYADLFLAAKNLSDAILLSDILRVNTEITKAPLSASMIKRYDEHHQDLTLLKALVRQQLPEKYKEIFFDQSKNGYAGYIDGGASQEEFYKFIKPILEKMDGTEELLVKLNREDLLRKQRTFDNGSIPHQIHLGELHAILRRQEDFYPFLKDNREKIEKILTFRIPYYVGPLARGNSRFAWMTRKSEETITPWNFEEVVDKGASAQSFIERMTNFDKNLPNEKVLPKHSLLYEYFTVYNELTKVKYVTEGMRKPAFLSGEQKKAIVDLLFKTNRKVTVKQLKEDYFKKIECFDSVEISGVEDRFNASLGTYHDLLKIIKDKDFLDNEENEDILEDIVLTLTLFEDREMIEERLKTYAHLFDDKVMKQLKRRRYTGWGRLSRKLINGIRDKQSGKTILDFLKSDGFANRNFMQLIHDDSLTFKEDIQKAQVSGQGDSLHEHIANLAGSPAIKKGILQTVKVVDELVKVMGRHKPENIVIEMARENQTTQKGQKNSRERMKRIEEGIKELGSQILKEHPVENTQLQNEKLYLYYLQNGRDMYVDQELDINRLSDYDVDHIVPQSFLKDDSIDNKVLTRSDKARGKSDNVPSEEVVKKMKNYWRQLLNAKLITQRKFDNLTKAERGGLSELDKAGFIKRQLVETRQITKHVAQILDSRMNTKYDENDKLIREVKVITLKSKLVSDFRKDFQFYKVREINNYHHAHDAYLNAVVGTALIKKYPKLESEFVYGDYKVYDVRKMIAKSEQEIGKATAKYFFYSNIMNFFKTEITLANGEIRKRPLIETNGETGEIVWDKGRDFATVRKVLSMPQVNIVKKTEVQTGGFSKESILPKRNSDKLIARKKDWDPKKYGGFDSPTVAYSVLVVAKVEKGKSKKLKSVKELLGITIMERSSFEKNPIDFLEAKGYKEVKKDLIIKLPKYSLFELENGRKRMLASAGELQKGNELALPSKYVNFLYLASHYEKLKGSPEDNEQKQLFVEQHKHYLDEIIEQISEFSKRVILADANLDKVLSAYNKHRDKPIREQAENIIHLFTLTNLGAPAAFKYFDTTIDRKRYTSTKEVLDATLIHQSITGLYETRIDLSQLGGDGGGGGGGSEAAAKGGTLQLEEEYRLFEPESTQKQEMDIWLKNFPQAWAETGGMGTAHCQAPVLIQLKATATPISIRQYPMPHEAYQGIKPHIRRMLDQGILKPCQSPWNTPLLPVKKPGTEDYRPVQDLREVNKRVEDIHPTVPNPYNLLSTLPPSHPWYTVLDLKDAFFCLRLHSESQLLFAFEWRDPEIGLSGQLTWTRLPQGFKNSPTLFNEALHSDLADFRVRYPALVLLQYVDDLLLAAATRTECLEGTKALLETLGNKGYRASAKKAQICLQEVTYLGYSLKDGQRWLTKARKEAILSIPVPKNSRQVREFLGTAGYCRLWIPGFAELAAPLYPLTRPGTLFQWGTEQQLAFEDIKKALLSSPALGLPDITKPFELFIDENSGFAKGVLVQKLGPWKRPVAYLSKKLDTVASGWPPCLRMVAAIAILVKDAGKLTLGQPLTILTSHPVEALVRQPPNKWLSNARMTHYQAMLLDAERVHFGPTVSLNPATLLPLPSGGNHHDCLQILAETHGTRPDLTDQPLPDADLTWYTDGSSFIRNGEREAGAAVTTESEVIWAAPLPPGTSAQRAELIALTQALKMAEGKKLTVYTDSRYAFATTHVHGEIYRRRGWLTSEGKEIKNKNEILALLEALFLPKRLSIIHCPGHQKGDSPQAKGNRLADDTAKKAATETHSSLTVLPAGKRTADGSEFEKRTADGSEFESPKKKAKVE

SEQ ID NO: 1188 - protein, 2090 aa, synthetic construct
  source 1..2090: note = Description of Artificial Sequence: Synthetic polypeptide
MPAAKRVKLDGGDKKYSIGLDIGTNSVGWAVITDEYKVPSKKFKVLGNTDRHSIKKNLIGALLFDSGETAEATRLKRTARRRYTRRKNRICYLQEIFSNEMAKVDDSFFHRLEESFLVEEDKKHERHPIFGNIVDEVAYHEKYPTIYHLRKKLVDSTDKADLRLIYLALAHMIKFRGHFLIEGDLNPDNSDVDKLFIQLVQTYNQLFEENPINASGVDAKAILSARLSKSRRLENLIAQLPGEKKNGLFGNLIALSLGLTPNFKSNFDLAEDAKLQLSKDTYDDDLDNLLAQIGDQYADLFLAAKNLSDAILLSDILRVNTEITKAPLSASMIKRYDEHHQDLTLLKALVRQQLPEKYKEIFFDQSKNGYAGYIDGGASQEEFYKFIKPILEKMDGTEELLVKLNREDLLRKQRTFDNGSIPHQIHLGELHAILRRQEDFYPFLKDNREKIEKILTFRIPYYVGPLARGNSRFAWMTRKSEETITPWNFEEVVDKGASAQSFIERMTNFDKNLPNEKVLPKHSLLYEYFTVYNELTKVKYVTEGMRKPAFLSGEQKKAIVDLLFKTNRKVTVKQLKEDYFKKIECFDSVEISGVEDRFNASLGTYHDLLKIIKDKDFLDNEENEDILEDIVLTLTLFEDREMIEERLKTYAHLFDDKVMKQLKRRRYTGWGRLSRKLINGIRDKQSGKTILDFLKSDGFANRNFMQLIHDDSLTFKEDIQKAQVSGQGDSLHEHIANLAGSPAIKKGILQTVKVVDELVKVMGRHKPENIVIEMARENQTTQKGQKNSRERMKRIEEGIKELGSQILKEHPVENTQLQNEKLYLYYLQNGRDMYVDQELDINRLSDYDVDHIVPQSFLKDDSIDNKVLTRSDKARGKSDNVPSEEVVKKMKNYWRQLLNAKLITQRKFDNLTKAERGGLSELDKAGFIKRQLVETRQITKHVAQILDSRMNTKYDENDKLIREVKVITLKSKLVSDFRKDFQFYKVREINNYHHAHDAYLNAVVGTALIKKYPKLESEFVYGDYKVYDVRKMIAKSEQEIGKATAKYFFYSNIMNFFKTEITLANGEIRKRPLIETNGETGEIVWDKGRDFATVRKVLSMPQVNIVKKTEVQTGGFSKESILPKRNSDKLIARKKDWDPKKYGGFDSPTVAYSVLVVAKVEKGKSKKLKSVKELLGITIMERSSFEKNPIDFLEAKGYKEVKKDLIIKLPKYSLFELENGRKRMLASAGELQKGNELALPSKYVNFLYLASHYEKLKGSPEDNEQKQLFVEQHKHYLDEIIEQISEFSKRVILADANLDKVLSAYNKHRDKPIREQAENIIHLFTLTNLGAPAAFKYFDTTIDRKRYTSTKEVLDATLIHQSITGLYETRIDLSQLGGDGGGGGGGGGGTLQLEEEYRLFEPESTQKQEMDIWLKNFPQAWAETGGMGTAHCQAPVLIQLKATATPISIRQYPMPHEAYQGIKPHIRRMLDQGILKPCQSPWNTPLLPVKKPGTEDYRPVQDLREVNKRVEDIHPTVPNPYNLLSTLPPSHPWYTVLDLKDAFFCLRLHSESQLLFAFEWRDPEIGLSGQLTWTRLPQGFKNSPTLFNEALHSDLADFRVRYPALVLLQYVDDLLLAAATRTECLEGTKALLETLGNKGYRASAKKAQICLQEVTYLGYSLKDGQRWLTKARKEAILSIPVPKNSRQVREFLGTAGYCRLWIPGFAELAAPLYPLTRPGTLFQWGTEQQLAFEDIKKALLSSPALGLPDITKPFELFIDENSGFAKGVLVQKLGPWKRPVAYLSKKLDTVASGWPPCLRMVAAIAILVKDAGKLTLGQPLTILTSHPVEALVRQPPNKWLSNARMTHYQAMLLDAERVHFGPTVSLNPATLLPLPSGGNHHDCLQILAETHGTRPDLTDQPLPDADLTWYTDGSSFIRNGEREAGAAVTTESEVIWAAPLPPGTSAQRAELIALTQALKMAEGKKLTVYTDSRYAFATTHVHGEIYRRRGWLTSEGKEIKNKNEILALLEALFLPKRLSIIHCPGHQKGDSPQAKGNRLADDTAKKAATETHSSLTVLPAGKRTADGSEFEKRTADGSEFESPKKKAKVE

SEQ ID NO: 1189 - protein, 2093 aa, synthetic construct
  source 1..2093: note = Description of Artificial Sequence: Synthetic polypeptide
MPAAKRVKLDGGDKKYSIGLDIGTNSVGWAVITDEYKVPSKKFKVLGNTDRHSIKKNLIGALLFDSGETAEATRLKRTARRRYTRRKNRICYLQEIFSNEMAKVDDSFFHRLEESFLVEEDKKHERHPIFGNIVDEVAYHEKYPTIYHLRKKLVDSTDKADLRLIYLALAHMIKFRGHFLIEGDLNPDNSDVDKLFIQLVQTYNQLFEENPINASGVDAKAILSARLSKSRRLENLIAQLPGEKKNGLFGNLIALSLGLTPNFKSNFDLAEDAKLQLSKDTYDDDLDNLLAQIGDQYADLFLAAKNLSDAILLSDILRVNTEITKAPLSASMIKRYDEHHQDLTLLKALVRQQLPEKYKEIFFDQSKNGYAGYIDGGASQEEFYKFIKPILEKMDGTEELLVKLNREDLLRKQRTFDNGSIPHQIHLGELHAILRRQEDFYPFLKDNREKIEKILTFRIPYYVGPLARGNSRFAWMTRKSEETITPWNFEEVVDKGASAQSFIERMTNFDKNLPNEKVLPKHSLLYEYFTVYNELTKVKYVTEGMRKPAFLSGEQKKAIVDLLFKTNRKVTVKQLKEDYFKKIECFDSVEISGVEDRFNASLGTYHDLLKIIKDKDFLDNEENEDILEDIVLTLTLFEDREMIEERLKTYAHLFDDKVMKQLKRRRYTGWGRLSRKLINGIRDKQSGKTILDFLKSDGFANRNFMQLIHDDSLTFKEDIQKAQVSGQGDSLHEHIANLAGSPAIKKGILQTVKVVDELVKVMGRHKPENIVIEMARENQTTQKGQKNSRERMKRIEEGIKELGSQILKEHPVENTQLQNEKLYLYYLQNGRDMYVDQELDINRLSDYDVDHIVPQSFLKDDSIDNKVLTRSDKARGKSDNVPSEEVVKKMKNYWRQLLNAKLITQRKFDNLTKAERGGLSELDKAGFIKRQLVETRQITKHVAQILDSRMNTKYDENDKLIREVKVITLKSKLVSDFRKDFQFYKVREINNYHHAHDAYLNAVVGTALIKKYPKLESEFVYGDYKVYDVRKMIAKSEQEIGKATAKYFFYSNIMNFFKTEITLANGEIRKRPLIETNGETGEIVWDKGRDFATVRKVLSMPQVNIVKKTEVQTGGFSKESILPKRNSDKLIARKKDWDPKKYGGFDSPTVAYSVLVVAKVEKGKSKKLKSVKELLGITIMERSSFEKNPIDFLEAKGYKEVKKDLIIKLPKYSLFELENGRKRMLASAGELQKGNELALPSKYVNFLYLASHYEKLKGSPEDNEQKQLFVEQHKHYLDEIIEQISEFSKRVILADANLDKVLSAYNKHRDKPIREQAENIIHLFTLTNLGAPAAFKYFDTTIDRKRYTSTKEVLDATLIHQSITGLYETRIDLSQLGGDGGGGGGSSPAPGGTLQLEEEYRLFEPESTQKQEMDIWLKNFPQAWAETGGMGTAHCQAPVLIQLKATATPISIRQYPMPHEAYQGIKPHIRRMLDQGILKPCQSPWNTPLLPVKKPGTEDYRPVQDLREVNKRVEDIHPTVPNPYNLLSTLPPSHPWYTVLDLKDAFFCLRLHSESQLLFAFEWRDPEIGLSGQLTWTRLPQGFKNSPTLFNEALHSDLADFRVRYPALVLLQYVDDLLLAAATRTECLEGTKALLETLGNKGYRASAKKAQICLQEVTYLGYSLKDGQRWLTKARKEAILSIPVPKNSRQVREFLGTAGYCRLWIPGFAELAAPLYPLTRPGTLFQWGTEQQLAFEDIKKALLSSPALGLPDITKPFELFIDENSGFAKGVLVQKLGPWKRPVAYLSKKLDTVASGWPPCLRMVAAIAILVKDAGKLTLGQPLTILTSHPVEALVRQPPNKWLSNARMTHYQAMLLDAERVHFGPTVSLNPATLLPLPSGGNHHDCLQILAETHGTRPDLTDQPLPDADLTWYTDGSSFIRNGEREAGAAVTTESEVIWAAPLPPGTSAQRAELIALTQALKMAEGKKLTVYTDSRYAFATTHVHGEIYRRRGWLTSEGKEIKNKNEILALLEALFLPKRLSIIHCPGHQKGDSPQAKGNRLADDTAKKAATETHSSLTVLPAGKRTADGSEFEKRTADGSEFESPKKKAKVE

SEQ ID NO: 1190 - protein, 2093 aa, synthetic construct
  source 1..2093: note = Description of Artificial Sequence: Synthetic polypeptide
MPAAKRVKLDGGDKKYSIGLDIGTNSVGWAVITDEYKVPSKKFKVLGNTDRHSIKKNLIGALLFDSGETAEATRLKRTARRRYTRRKNRICYLQEIFSNEMAKVDDSFFHRLEESFLVEEDKKHERHPIFGNIVDEVAYHEKYPTIYHLRKKLVDSTDKADLRLIYLALAHMIKFRGHFLIEGDLNPDNSDVDKLFIQLVQTYNQLFEENPINASGVDAKAILSARLSKSRRLENLIAQLPGEKKNGLFGNLIALSLGLTPNFKSNFDLAEDAKLQLSKDTYDDDLDNLLAQIGDQYADLFLAAKNLSDAILLSDILRVNTEITKAPLSASMIKRYDEHHQDLTLLKALVRQQLPEKYKEIFFDQSKNGYAGYIDGGASQEEFYKFIKPILEKMDGTEELLVKLNREDLLRKQRTFDNGSIPHQIHLGELHAILRRQEDFYPFLKDNREKIEKILTFRIPYYVGPLARGNSRFAWMTRKSEETITPWNFEEVVDKGASAQSFIERMTNFDKNLPNEKVLPKHSLLYEYFTVYNELTKVKYVTEGMRKPAFLSGEQKKAIVDLLFKTNRKVTVKQLKEDYFKKIECFDSVEISGVEDRFNASLGTYHDLLKIIKDKDFLDNEENEDILEDIVLTLTLFEDREMIEERLKTYAHLFDDKVMKQLKRRRYTGWGRLSRKLINGIRDKQSGKTILDFLKSDGFANRNFMQLIHDDSLTFKEDIQKAQVSGQGDSLHEHIANLAGSPAIKKGILQTVKVVDELVKVMGRHKPENIVIEMARENQTTQKGQKNSRERMKRIEEGIKELGSQILKEHPVENTQLQNEKLYLYYLQNGRDMYVDQELDINRLSDYDVDHIVPQSFLKDDSIDNKVLTRSDKARGKSDNVPSEEVVKKMKNYWRQLLNAKLITQRKFDNLTKAERGGLSELDKAGFIKRQLVETRQITKHVAQILDSRMNTKYDENDKLIREVKVITLKSKLVSDFRKDFQFYKVREINNYHHAHDAYLNAVVGTALIKKYPKLESEFVYGDYKVYDVRKMIAKSEQEIGKATAKYFFYSNIMNFFKTEITLANGEIRKRPLIETNGETGEIVWDKGRDFATVRKVLSMPQVNIVKKTEVQTGGFSKESILPKRNSDKLIARKKDWDPKKYGGFDSPTVAYSVLVVAKVEKGKSKKLKSVKELLGITIMERSSFEKNPIDFLEAKGYKEVKKDLIIKLPKYSLFELENGRKRMLASAGELQKGNELALPSKYVNFLYLASHYEKLKGSPEDNEQKQLFVEQHKHYLDEIIEQISEFSKRVILADANLDKVLSAYNKHRDKPIREQAENIIHLFTLTNLGAPAAFKYFDTTIDRKRYTSTKEVLDATLIHQSITGLYETRIDLSQLGGDGGGGSGGGPAPGGTLQLEEEYRLFEPESTQKQEMDIWLKNFPQAWAETGGMGTAHCQAPVLIQLKATATPISIRQYPMPHEAYQGIKPHIRRMLDQGILKPCQSPWNTPLLPVKKPGTEDYRPVQDLREVNKRVEDIHPTVPNPYNLLSTLPPSHPWYTVLDLKDAFFCLRLHSESQLLFAFEWRDPEIGLSGQLTWTRLPQGFKNSPTLFNEALHSDLADFRVRYPALVLLQYVDDLLLAAATRTECLEGTKALLETLGNKGYRASAKKAQICLQEVTYLGYSLKDGQRWLTKARKEAILSIPVPKNSRQVREFLGTAGYCRLWIPGFAELAAPLYPLTRPGTLFQWGTEQQLAFEDIKKALLSSPALGLPDITKPFELFIDENSGFAKGVLVQKLGPWKRPVAYLSKKLDTVASGWPPCLRMVAAIAILVKDAGKLTLGQPLTILTSHPVEALVRQPPNKWLSNARMTHYQAMLLDAERVHFGPTVSLNPATLLPLPSGGNHHDCLQILAETHGTRPDLTDQPLPDADLTWYTDGSSFIRNGEREAGAAVTTESEVIWAAPLPPGTSAQRAELIALTQALKMAEGKKLTVYTDSRYAFATTHVHGEIYRRRGWLTSEGKEIKNKNEILALLEALFLPKRLSIIHCPGHQKGDSPQAKGNRLADDTAKKAATETHSSLTVLPAGKRTADGSEFEKRTADGSEFESPKKKAKVE

SEQ ID NO: 1191 - protein, 2095 aa, synthetic construct
  source 1..2095: note = Description of Artificial Sequence: Synthetic polypeptide
MPAAKRVKLDGGDKKYSIGLDIGTNSVGWAVITDEYKVPSKKFKVLGNTDRHSIKKNLIGALLFDSGETAEATRLKRTARRRYTRRKNRICYLQEIFSNEMAKVDDSFFHRLEESFLVEEDKKHERHPIFGNIVDEVAYHEKYPTIYHLRKKLVDSTDKADLRLIYLALAHMIKFRGHFLIEGDLNPDNSDVDKLFIQLVQTYNQLFEENPINASGVDAKAILSARLSKSRRLENLIAQLPGEKKNGLFGNLIALSLGLTPNFKSNFDLAEDAKLQLSKDTYDDDLDNLLAQIGDQYADLFLAAKNLSDAILLSDILRVNTEITKAPLSASMIKRYDEHHQDLTLLKALVRQQLPEKYKEIFFDQSKNGYAGYIDGGASQEEFYKFIKPILEKMDGTEELLVKLNREDLLRKQRTFDNGSIPHQIHLGELHAILRRQEDFYPFLKDNREKIEKILTFRIPYYVGPLARGNSRFAWMTRKSEETITPWNFEEVVDKGASAQSFIERMTNFDKNLPNEKVLPKHSLLYEYFTVYNELTKVKYVTEGMRKPAFLSGEQKKAIVDLLFKTNRKVTVKQLKEDYFKKIECFDSVEISGVEDRFNASLGTYHDLLKIIKDKDFLDNEENEDILEDIVLTLTLFEDREMIEERLKTYAHLFDDKVMKQLKRRRYTGWGRLSRKLINGIRDKQSGKTILDFLKSDGFANRNFMQLIHDDSLTFKEDIQKAQVSGQGDSLHEHIANLAGSPAIKKGILQTVKVVDELVKVMGRHKPENIVIEMARENQTTQKGQKNSRERMKRIEEGIKELGSQILKEHPVENTQLQNEKLYLYYLQNGRDMYVDQELDINRLSDYDVDHIVPQSFLKDDSIDNKVLTRSDKARGKSDNVPSEEVVKKMKNYWRQLLNAKLITQRKFDNLTKAERGGLSELDKAGFIKRQLVETRQITKHVAQILDSRMNTKYDENDKLIREVKVITLKSKLVSDFRKDFQFYKVREINNYHHAHDAYLNAVVGTALIKKYPKLESEFVYGDYKVYDVRKMIAKSEQEIGKATAKYFFYSNIMNFFKTEITLANGEIRKRPLIETNGETGEIVWDKGRDFATVRKVLSMPQVNIVKKTEVQTGGFSKESILPKRNSDKLIARKKDWDPKKYGGFDSPTVAYSVLVVAKVEKGKSKKLKSVKELLGITIMERSSFEKNPIDFLEAKGYKEVKKDLIIKLPKYSLFELENGRKRMLASAGELQKGNELALPSKYVNFLYLASHYEKLKGSPEDNEQKQLFVEQHKHYLDEIIEQISEFSKRVILADANLDKVLSAYNKHRDKPIREQAENIIHLFTLTNLGAPAAFKYFDTTIDRKRYTSTKEVLDATLIHQSITGLYETRIDLSQLGGDGGGSSPAPEAAAKGGTLQLEEEYRLFEPESTQKQEMDIWLKNFPQAWAETGGMGTAHCQAPVLIQLKATATPISIRQYPMPHEAYQGIKPHIRRMLDQGILKPCQSPWNTPLLPVKKPGTEDYRPVQDLREVNKRVEDIHPTVPNPYNLLSTLPPSHPWYTVLDLKDAFFCLRLHSESQLLFAFEWRDPEIGLSGQLTWTRLPQGFKNSPTLFNEALHSDLADFRVRYPALVLLQYVDDLLLAAATRTECLEGTKALLETLGNKGYRASAKKAQICLQEVTYLGYSLKDGQRWLTKARKEAILSIPVPKNSRQVREFLGTAGYCRLWIPGFAELAAPLYPLTRPGTLFQWGTEQQLAFEDIKKALLSSPALGLPDITKPFELFIDENSGFAKGVLVQKLGPWKRPVAYLSKKLDTVASGWPPCLRMVAAIAILVKDAGKLTLGQPLTILTSHPVEALVRQPPNKWLSNARMTHYQAMLLDAERVHFGPTVSLNPATLLPLPSGGNHHDCLQILAETHGTRPDLTDQPLPDADLTWYTDGSSFIRNGEREAGAAVTTESEVIWAAPLPPGTSAQRAELIALTQALKMAEGKKLTVYTDSRYAFATTHVHGEIYRRRGWLTSEGKEIKNKNEILALLEALFLPKRLSIIHCPGHQKGDSPQAKGNRLADDTAKKAATETHSSLTVLPAGKRTADGSEFEKRTADGSEFESPKKKAKVE

SEQ ID NO: 1192 - protein, 2093 aa, synthetic construct
  source 1..2093: note = Description of Artificial Sequence: Synthetic polypeptide
MPAAKRVKLDGGDKKYSIGLDIGTNSVGWAVITDEYKVPSKKFKVLGNTDRHSIKKNLIGALLFDSGETAEATRLKRTARRRYTRRKNRICYLQEIFSNEMAKVDDSFFHRLEESFLVEEDKKHERHPIFGNIVDEVAYHEKYPTIYHLRKKLVDSTDKADLRLIYLALAHMIKFRGHFLIEGDLNPDNSDVDKLFIQLVQTYNQLFEENPINASGVDAKAILSARLSKSRRLENLIAQLPGEKKNGLFGNLIALSLGLTPNFKSNFDLAEDAKLQLSKDTYDDDLDNLLAQIGDQYADLFLAAKNLSDAILLSDILRVNTEITKAPLSASMIKRYDEHHQDLTLLKALVRQQLPEKYKEIFFDQSKNGYAGYIDGGASQEEFYKFIKPILEKMDGTEELLVKLNREDLLRKQRTFDNGSIPHQIHLGELHAILRRQEDFYPFLKDNREKIEKILTFRIPYYVGPLARGNSRFAWMTRKSEETITPWNFEEVVDKGASAQSFIERMTNFDKNLPNEKVLPKHSLLYEYFTVYNELTKVKYVTEGMRKPAFLSGEQKKAIVDLLFKTNRKVTVKQLKEDYFKKIECFDSVEISGVEDRFNASLGTYHDLLKIIKDKDFLDNEENEDILEDIVLTLTLFEDREMIEERLKTYAHLFDDKVMKQLKRRRYTGWGRLSRKLINGIRDKQSGKTILDFLKSDGFANRNFMQLIHDDSLTFKEDIQKAQVSGQGDSLHEHIANLAGSPAIKKGILQTVKVVDELVKVMGRHKPENIVIEMARENQTTQKGQKNSRERMKRIEEGIKELGSQILKEHPVENTQLQNEKLYLYYLQNGRDMYVDQELDINRLSDYDVDHIVPQSFLKDDSIDNKVLTRSDKARGKSDNVPSEEVVKKMKNYWRQLLNAKLITQRKFDNLTKAERGGLSELDKAGFIKRQLVETRQITKHVAQILDSRMNTKYDENDKLIREVKVITLKSKLVSDFRKDFQFYKVREINNYHHAHDAYLNAVVGTALIKKYPKLESEFVYGDYKVYDVRKMIAKSEQEIGKATAKYFFYSNIMNFFKTEITLANGEIRKRPLIETNGETGEIVWDKGRDFATVRKVLSMPQVNIVKKTEVQTGGFSKESILPKRNSDKLIARKKDWDPKKYGGFDSPTVAYSVLVVAKVEKGKSKKLKSVKELLGITIMERSSFEKNPIDFLEAKGYKEVKKDLIIKLPKYSLFELENGRKRMLASAGELQKGNELALPSKYVNFLYLASHYEKLKGSPEDNEQKQLFVEQHKHYLDEIIEQISEFSKRVILADANLDKVLSAYNKHRDKPIREQAENIIHLFTLTNLGAPAAFKYFDTTIDRKRYTSTKEVLDATLIHQSITGLYETRIDLSQLGGDGGPAPGSSGGGGGTLQLEEEYRLFEPESTQKQEMDIWLKNFPQAWAETGGMGTAHCQAPVLIQLKATATPISIRQYPMPHEAYQGIKPHIRRMLDQGILKPCQSPWNTPLLPVKKPGTEDYRPVQDLREVNKRVEDIHPTVPNPYNLLSTLPPSHPWYTVLDLKDAFFCLRLHSESQLLFAFEWRDPEIGLSGQLTWTRLPQGFKNSPTLFNEALHSDLADFRVRYPALVLLQYVDDLLLAAATRTECLEGTKALLETLGNKGYRASAKKAQICLQEVTYLGYSLKDGQRWLTKARKEAILSIPVPKNSRQVREFLGTAGYCRLWIPGFAELAAPLYPLTRPGTLFQWGTEQQLAFEDIKKALLSSPALGLPDITKPFELFIDENSGFAKGVLVQKLGPWKRPVAYLSKKLDTVASGWPPCLRMVAAIAILVKDAGKLTLGQPLTILTSHPVEALVRQPPNKWLSNARMTHYQAMLLDAERVHFGPTVSLNPATLLPLPSGGNHHDCLQILAETHGTRPDLTDQPLPDADLTWYTDGSSFIRNGEREAGAAVTTESEVIWAAPLPPGTSAQRAELIALTQALKMAEGKKLTVYTDSRYAFATTHVHGEIYRRRGWLTSEGKEIKNKNEILALLEALFLPKRLSIIHCPGHQKGDSPQAKGNRLADDTAKKAATETHSSLTVLPAGKRTADGSEFEKRTADGSEFESPKKKAKVE

SEQ ID NO: 1193 - protein, 2090 aa, synthetic construct
  source 1..2090: note = Description of Artificial Sequence: Synthetic polypeptide
MPAAKRVKLDGGDKKYSIGLDIGTNSVGWAVITDEYKVPSKKFKVLGNTDRHSIKKNLIGALLFDSGETAEATRLKRTARRRYTRRKNRICYLQEIFSNEMAKVDDSFFHRLEESFLVEEDKKHERHPIFGNIVDEVAYHEKYPTIYHLRKKLVDSTDKADLRLIYLALAHMIKFRGHFLIEGDLNPDNSDVDKLFIQLVQTYNQLFEENPINASGVDAKAILSARLSKSRRLENLIAQLPGEKKNGLFGNLIALSLGLTPNFKSNFDLAEDAKLQLSKDTYDDDLDNLLAQIGDQYADLFLAAKNLSDAILLSDILRVNTEITKAPLSASMIKRYDEHHQDLTLLKALVRQQLPEKYKEIFFDQSKNGYAGYIDGGASQEEFYKFIKPILEKMDGTEELLVKLNREDLLRKQRTFDNGSIPHQIHLGELHAILRRQEDFYPFLKDNREKIEKILTFRIPYYVGPLARGNSRFAWMTRKSEETITPWNFEEVVDKGASAQSFIERMTNFDKNLPNEKVLPKHSLLYEYFTVYNELTKVKYVTEGMRKPAFLSGEQKKAIVDLLFKTNRKVTVKQLKEDYFKKIECFDSVEISGVEDRFNASLGTYHDLLKIIKDKDFLDNEENEDILEDIVLTLTLFEDREMIEERLKTYAHLFDDKVMKQLKRRRYTGWGRLSRKLINGIRDKQSGKTILDFLKSDGFANRNFMQLIHDDSLTFKEDIQKAQVSGQGDSLHEHIANLAGSPAIKKGILQTVKVVDELVKVMGRHKPENIVIEMARENQTTQKGQKNSRERMKRIEEGIKELGSQILKEHPVENTQLQNEKLYLYYLQNGRDMYVDQELDINRLSDYDVDHIVPQSFLKDDSIDNKVLTRSDKARGKSDNVPSEEVVKKMKNYWRQLLNAKLITQRKFDNLTKAERGGLSELDKAGFIKRQLVETRQITKHVAQILDSRMNTKYDENDKLIREVKVITLKSKLVSDFRKDFQFYKVREINNYHHAHDAYLNAVVGTALIKKYPKLESEFVYGDYKVYDVRKMIAKSEQEIGKATAKYFFYSNIMNFFKTEITLANGEIRKRPLIETNGETGEIVWDKGRDFATVRKVLSMPQVNIVKKTEVQTGGFSKESILPKRNSDKLIARKKDWDPKKYGGFDSPTVAYSVLVVAKVEKGKSKKLKSVKELLGITIMERSSFEKNPIDFLEAKGYKEVKKDLIIKLPKYSLFELENGRKRMLASAGELQKGNELALPSKYVNFLYLASHYEKLKGSPEDNEQKQLFVEQHKHYLDEIIEQISEFSKRVILADANLDKVLSAYNKHRDKPIREQAENIIHLFTLTNLGAPAAFKYFDTTIDRKRYTSTKEVLDATLIHQSITGLYETRIDLSQLGGDGGGGSGGSGGTLQLEEEYRLFEPESTQKQEMDIWLKNFPQAWAETGGMGTAHCQAPVLIQLKATATPISIRQYPMPHEAYQGIKPHIRRMLDQGILKPCQSPWNTPLLPVKKPGTEDYRPVQDLREVNKRVEDIHPTVPNPYNLLSTLPPSHPWYTVLDLKDAFFCLRLHSESQLLFAFEWRDPEIGLSGQLTWTRLPQGFKNSPTLFNEALHSDLADFRVRYPALVLLQYVDDLLLAAATRTECLEGTKALLETLGNKGYRASAKKAQICLQEVTYLGYSLKDGQRWLTKARKEAILSIPVPKNSRQVREFLGTAGYCRLWIPGFAELAAPLYPLTRPGTLFQWGTEQQLAFEDIKKALLSSPALGLPDITKPFELFIDENSGFAKGVLVQKLGPWKRPVAYLSKKLDTVASGWPPCLRMVAAIAILVKDAGKLTLGQPLTILTSHPVEALVRQPPNKWLSNARMTHYQAMLLDAERVHFGPTVSLNPATLLPLPSGGNHHDCLQILAETHGTRPDLTDQPLPDADLTWYTDGSSFIRNGEREAGAAVTTESEVIWAAPLPPGTSAQRAELIALTQALKMAEGKKLTVYTDSRYAFATTHVHGEIYRRRGWLTSEGKEIKNKNEILALLEALFLPKRLSIIHCPGHQKGDSPQAKGNRLADDTAKKAATETHSSLTVLPAGKRTADGSEFEKRTADGSEFESPKKKAKVE

SEQ ID NO: 1194 - protein, 2093 aa, synthetic construct
  source 1..2093: note = Description of Artificial Sequence: Synthetic polypeptide
MPAAKRVKLDGGDKKYSIGLDIGTNSVGWAVITDEYKVPSKKFKVLGNTDRHSIKKNLIGALLFDSGETAEATRLKRTARRRYTRRKNRICYLQEIFSNEMAKVDDSFFHRLEESFLVEEDKKHERHPIFGNIVDEVAYHEKYPTIYHLRKKLVDSTDKADLRLIYLALAHMIKFRGHFLIEGDLNPDNSDVDKLFIQLVQTYNQLFEENPINASGVDAKAILSARLSKSRRLENLIAQLPGEKKNGLFGNLIALSLGLTPNFKSNFDLAEDAKLQLSKDTYDDDLDNLLAQIGDQYADLFLAAKNLSDAILLSDILRVNTEITKAPLSASMIKRYDEHHQDLTLLKALVRQQLPEKYKEIFFDQSKNGYAGYIDGGASQEEFYKFIKPILEKMDGTEELLVKLNREDLLRKQRTFDNGSIPHQIHLGELHAILRRQEDFYPFLKDNREKIEKILTFRIPYYVGPLARGNSRFAWMTRKSEETITPWNFEEVVDKGASAQSFIERMTNFDKNLPNEKVLPKHSLLYEYFTVYNELTKVKYVTEGMRKPAFLSGEQKKAIVDLLFKTNRKVTVKQLKEDYFKKIECFDSVEISGVEDRFNASLGTYHDLLKIIKDKDFLDNEENEDILEDIVLTLTLFEDREMIEERLKTYAHLFDDKVMKQLKRRRYTGWGRLSRKLINGIRDKQSGKTILDFLKSDGFANRNFMQLIHDDSLTFKEDIQKAQVSGQGDSLHEHIANLAGSPAIKKGILQTVKVVDELVKVMGRHKPENIVIEMARENQTTQKGQKNSRERMKRIEEGIKELGSQILKEHPVENTQLQNEKLYLYYLQNGRDMYVDQELDINRLSDYDVDHIVPQSFLKDDSIDNKVLTRSDKARGKSDNVPSEEVVKKMKNYWRQLLNAKLITQRKFDNLTKAERGGLSELDKAGFIKRQLVETRQITKHVAQILDSRMNTKYDENDKLIREVKVITLKSKLVSDFRKDFQFYKVREINNYHHAHDAYLNAVVGTALIKKYPKLESEFVYGDYKVYDVRKMIAKSEQEIGKATAKYFFYSNIMNFFKTEITLANGEIRKRPLIETNGETGEIVWDKGRDFATVRKVLSMPQVNIVKKTEVQTGGFSKESILPKRNSDKLIARKKDWDPKKYGGFDSPTVAYSVLVVAKVEKGKSKKLKSVKELLGITIMERSSFEKNPIDFLEAKGYKEVKKDLIIKLPKYSLFELENGRKRMLASAGELQKGNELALPSKYVNFLYLASHYEKLKGSPEDNEQKQLFVEQHKHYLDEIIEQISEFSKRVILADANLDKVLSAYNKHRDKPIREQAENIIHLFTLTNLGAPAAFKYFDTTIDRKRYTSTKEVLDATLIHQSITGLYETRIDLSQLGGDGGGGSPAPGGGGGTLQLEEEYRLFEPESTQKQEMDIWLKNFPQAWAETGGMGTAHCQAPVLIQLKATATPISIRQYPMPHEAYQGIKPHIRRMLDQGILKPCQSPWNTPLLPVKKPGTEDYRPVQDLREVNKRVEDIHPTVPNPYNLLSTLPPSHPWYTVLDLKDAFFCLRLHSESQLLFAFEWRDPEIGLSGQLTWTRLPQGFKNSPTLFNEALHSDLADFRVRYPALVLLQYVDDLLLAAATRTECLEGTKALLETLGNKGYRASAKKAQICLQEVTYLGYSLKDGQRWLTKARKEAILSIPVPKNSRQVREFLGTAGYCRLWIPGFAELAAPLYPLTRPGTLFQWGTEQQLAFEDIKKALLSSPALGLPDITKPFELFIDENSGFAKGVLVQKLGPWKRPVAYLSKKLDTVASGWPPCLRMVAAIAILVKDAGKLTLGQPLTILTSHPVEALVRQPPNKWLSNARMTHYQAMLLDAERVHFGPTVSLNPATLLPLPSGGNHHDCLQILAETHGTRPDLTDQPLPDADLTWYTDGSSFIRNGEREAGAAVTTESEVIWAAPLPPGTSAQRAELIALTQALKMAEGKKLTVYTDSRYAFATTHVHGEIYRRRGWLTSEGKEIKNKNEILALLEALFLPKRLSIIHCPGHQKGDSPQAKGNRLADDTAKKAATETHSSLTVLPAGKRTADGSEFEKRTADGSEFESPKKKAKVE

SEQ ID NO: 1195 - protein, 2089 aa, synthetic construct
  source 1..2089: note = Description of Artificial Sequence: Synthetic polypeptide
MPAAKRVKLDGGDKKYSIGLDIGTNSVGWAVITDEYKVPSKKFKVLGNTDRHSIKKNLIGALLFDSGETAEATRLKRTARRRYTRRKNRICYLQEIFSNEMAKVDDSFFHRLEESFLVEEDKKHERHPIFGNIVDEVAYHEKYPTIYHLRKKLVDSTDKADLRLIYLALAHMIKFRGHFLIEGDLNPDNSDVDKLFIQLVQTYNQLFEENPINASGVDAKAILSARLSKSRRLENLIAQLPGEKKNGLFGNLIALSLGLTPNFKSNFDLAEDAKLQLSKDTYDDDLDNLLAQIGDQYADLFLAAKNLSDAILLSDILRVNTEITKAPLSASMIKRYDEHHQDLTLLKALVRQQLPEKYKEIFFDQSKNGYAGYIDGGASQEEFYKFIKPILEKMDGTEELLVKLNREDLLRKQRTFDNGSIPHQIHLGELHAILRRQEDFYPFLKDNREKIEKILTFRIPYYVGPLARGNSRFAWMTRKSEETITPWNFEEVVDKGASAQSFIERMTNFDKNLPNEKVLPKHSLLYEYFTVYNELTKVKYVTEGMRKPAFLSGEQKKAIVDLLFKTNRKVTVKQLKEDYFKKIECFDSVEISGVEDRFNASLGTYHDLLKIIKDKDFLDNEENEDILEDIVLTLTLFEDREMIEERLKTYAHLFDDKVMKQLKRRRYTGWGRLSRKLINGIRDKQSGKTILDFLKSDGFANRNFMQLIHDDSLTFKEDIQKAQVSGQGDSLHEHIANLAGSPAIKKGILQTVKVVDELVKVMGRHKPENIVIEMARENQTTQKGQKNSRERMKRIEEGIKELGSQILKEHPVENTQLQNEKLYLYYLQNGRDMYVDQELDINRLSDYDVDHIVPQSFLKDDSIDNKVLTRSDKARGKSDNVPSEEVVKKMKNYWRQLLNAKLITQRKFDNLTKAERGGLSELDKAGFIKRQLVETRQITKHVAQILDSRMNTKYDENDKLIREVKVITLKSKLVSDFRKDFQFYKVREINNYHHAHDAYLNAVVGTALIKKYPKLESEFVYGDYKVYDVRKMIAKSEQEIGKATAKYFFYSNIMNFFKTEITLANGEIRKRPLIETNGETGEIVWDKGRDFATVRKVLSMPQVNIVKKTEVQTGGFSKESILPKRNSDKLIARKKDWDPKKYGGFDSPTVAYSVLVVAKVEKGKSKKLKSVKELLGITIMERSSFEKNPIDFLEAKGYKEVKKDLIIKLPKYSLFELENGRKRMLASAGELQKGNELALPSKYVNFLYLASHYEKLKGSPEDNEQKQLFVEQHKHYLDEIIEQISEFSKRVILADANLDKVLSAYNKHRDKPIREQAENIIHLFTLTNLGAPAAFKYFDTTIDRKRYTSTKEVLDATLIHQSITGLYETRIDLSQLGGDGGGGGGGGGTLQLEEEYRLFEPESTQKQEMDIWLKNFPQAWAETGGMGTAHCQAPVLIQLKATATPISIRQYPMPHEAYQGIKPHIRRMLDQGILKPCQSPWNTPLLPVKKPGTEDYRPVQDLREVNKRVEDIHPTVPNPYNLLSTLPPSHPWYTVLDLKDAFFCLRLHSESQLLFAFEWRDPEIGLSGQLTWTRLPQGFKNSPTLFNEALHSDLADFRVRYPALVLLQYVDDLLLAAATRTECLEGTKALLETLGNKGYRASAKKAQICLQEVTYLGYSLKDGQRWLTKARKEAILSIPVPKNSRQVREFLGTAGYCRLWIPGFAELAAPLYPLTRPGTLFQWGTEQQLAFEDIKKALLSSPALGLPDITKPFELFIDENSGFAKGVLVQKLGPWKRPVAYLSKKLDTVASGWPPCLRMVAAIAILVKDAGKLTLGQPLTILTSHPVEALVRQPPNKWLSNARMTHYQAMLLDAERVHFGPTVSLNPATLLPLPSGGNHHDCLQILAETHGTRPDLTDQPLPDADLTWYTDGSSFIRNGEREAGAAVTTESEVIWAAPLPPGTSAQRAELIALTQALKMAEGKKLTVYTDSRYAFATTHVHGEIYRRRGWLTSEGKEIKNKNEILALLEALFLPKRLSIIHCPGHQKGDSPQAKGNRLADDTAKKAATETHSSLTVLPAGKRTADGSEFEKRTADGSEFESPKKKAKVE

SEQ ID NO: 1196 - protein, 2093 aa, synthetic construct
  source 1..2093: note = Description of Artificial Sequence: Synthetic polypeptide
MPAAKRVKLDGGDKKYSIGLDIGTNSVGWAVITDEYKVPSKKFKVLGNTDRHSIKKNLIGALLFDSGETAEATRLKRTARRRYTRRKNRICYLQEIFSNEMAKVDDSFFHRLEESFLVEEDKKHERHPIFGNIVDEVAYHEKYPTIYHLRKKLVDSTDKADLRLIYLALAHMIKFRGHFLIEGDLNPDNSDVDKLFIQLVQTYNQLFEENPINASGVDAKAILSARLSKSRRLENLIAQLPGEKKNGLFGNLIALSLGLTPNFKSNFDLAEDAKLQLSKDTYDDDLDNLLAQIGDQYADLFLAAKNLSDAILLSDILRVNTEITKAPLSASMIKRYDEHHQDLTLLKALVRQQLPEKYKEIFFDQSKNGYAGYIDGGASQEEFYKFIKPILEKMDGTEELLVKLNREDLLRKQRTFDNGSIPHQIHLGELHAILRRQEDFYPFLKDNREKIEKILTFRIPYYVGPLARGNSRFAWMTRKSEETITPWNFEEVVDKGASAQSFIERMTNFDKNLPNEKVLPKHSLLYEYFTVYNELTKVKYVTEGMRKPAFLSGEQKKAIVDLLFKTNRKVTVKQLKEDYFKKIECFDSVEISGVEDRFNASLGTYHDLLKIIKDKDFLDNEENEDILEDIVLTLTLFEDREMIEERLKTYAHLFDDKVMKQLKRRRYTGWGRLSRKLINGIRDKQSGKTILDFLKSDGFANRNFMQLIHDDSLTFKEDIQKAQVSGQGDSLHEHIANLAGSPAIKKGILQTVKVVDELVKVMGRHKPENIVIEMARENQTTQKGQKNSRERMKRIEEGIKELGSQILKEHPVENTQLQNEKLYLYYLQNGRDMYVDQELDINRLSDYDVDHIVPQSFLKDDSIDNKVLTRSDKARGKSDNVPSEEVVKKMKNYWRQLLNAKLITQRKFDNLTKAERGGLSELDKAGFIKRQLVETRQITKHVAQILDSRMNTKYDENDKLIREVKVITLKSKLVSDFRKDFQFYKVREINNYHHAHDAYLNAVVGTALIKKYPKLESEFVYGDYKVYDVRKMIAKSEQEIGKATAKYFFYSNIMNFFKTEITLANGEIRKRPLIETNGETGEIVWDKGRDFATVRKVLSMPQVNIVKKTEVQTGGFSKESILPKRNSDKLIARKKDWDPKKYGGFDSPTVAYSVLVVAKVEKGKSKKLKSVKELLGITIMERSSFEKNPIDFLEAKGYKEVKKDLIIKLPKYSLFELENGRKRMLASAGELQKGNELALPSKYVNFLYLASHYEKLKGSPEDNEQKQLFVEQHKHYLDEIIEQISEFSKRVILADANLDKVLSAYNKHRDKPIREQAENIIHLFTLTNLGAPAAFKYFDTTIDRKRYTSTKEVLDATLIHQSITGLYETRIDLSQLGGDGGPAPGGSGGGGGTLQLEEEYRLFEPESTQKQEMDIWLKNFPQAWAETGGMGTAHCQAPVLIQLKATATPISIRQYPMPHEAYQGIKPHIRRMLDQGILKPCQSPWNTPLLPVKKPGTEDYRPVQDLREVNKRVEDIHPTVPNPYNLLSTLPPSHPWYTVLDLKDAFFCLRLHSESQLLFAFEWRDPEIGLSGQLTWTRLPQGFKNSPTLFNEALHSDLADFRVRYPALVLLQYVDDLLLAAATRTECLEGTKALLETLGNKGYRASAKKAQICLQEVTYLGYSLKDGQRWLTKARKEAILSIPVPKNSRQVREFLGTAGYCRLWIPGFAELAAPLYPLTRPGTLFQWGTEQQLAFEDIKKALLSSPALGLPDITKPFELFIDENSGFAKGVLVQKLGPWKRPVAYLSKKLDTVASGWPPCLRMVAAIAILVKDAGKLTLGQPLTILTSHPVEALVRQPPNKWLSNARMTHYQAMLLDAERVHFGPTVSLNPATLLPLPSGGNHHDCLQILAETHGTRPDLTDQPLPDADLTWYTDGSSFIRNGEREAGAAVTTESEVIWAAPLPPGTSAQRAELIALTQALKMAEGKKLTVYTDSRYAFATTHVHGEIYRRRGWLTSEGKEIKNKNEILALLEALFLPKRLSIIHCPGHQKGDSPQAKGNRLADDTAKKAATETHSSLTVLPAGKRTADGSEFEKRTADGSEFESPKKKAKVE

SEQ ID NO: 1197 - protein, 2130 aa, synthetic construct
  source 1..2130: note = Description of Artificial Sequence: Synthetic polypeptide
MPAAKRVKLDGGDKKYSIGLDIGTNSVGWAVITDEYKVPSKKFKVLGNTDRHSIKKNLIGALLFDSGETAEATRLKRTARRRYTRRKNRICYLQEIFSNEMAKVDDSFFHRLEESFLVEEDKKHERHPIFGNIVDEVAYHEKYPTIYHLRKKLVDSTDKADLRLIYLALAHMIKFRGHFLIEGDLNPDNSDVDKLFIQLVQTYNQLFEENPINASGVDAKAILSARLSKSRRLENLIAQLPGEKKNGLFGNLIALSLGLTPNFKSNFDLAEDAKLQLSKDTYDDDLDNLLAQIGDQYADLFLAAKNLSDAILLSDILRVNTEITKAPLSASMIKRYDEHHQDLTLLKALVRQQLPEKYKEIFFDQSKNGYAGYIDGGASQEEFYKFIKPILEKMDGTEELLVKLNREDLLRKQRTFDNGSIPHQIHLGELHAILRRQEDFYPFLKDNREKIEKILTFRIPYYVGPLARGNSRFAWMTRKSEETITPWNFEEVVDKGASAQSFIERMTNFDKNLPNEKVLPKHSLLYEYFTVYNELTKVKYVTEGMRKPAFLSGEQKKAIVDLLFKTNRKVTVKQLKEDYFKKIECFDSVEISGVEDRFNASLGTYHDLLKIIKDKDFLDNEENEDILEDIVLTLTLFEDREMIEERLKTYAHLFDDKVMKQLKRRRYTGWGRLSRKLINGIRDKQSGKTILDFLKSDGFANRNFMQLIHDDSLTFKEDIQKAQVSGQGDSLHEHIANLAGSPAIKKGILQTVKVVDELVKVMGRHKPENIVIEMARENQTTQKGQKNSRERMKRIEEGIKELGSQILKEHPVENTQLQNEKLYLYYLQNGRDMYVDQELDINRLSDYDVDHIVPQSFLKDDSIDNKVLTRSDKARGKSDNVPSEEVVKKMKNYWRQLLNAKLITQRKFDNLTKAERGGLSELDKAGFIKRQLVETRQITKHVAQILDSRMNTKYDENDKLIREVKVITLKSKLVSDFRKDFQFYKVREINNYHHAHDAYLNAVVGTALIKKYPKLESEFVYGDYKVYDVRKMIAKSEQEIGKATAKYFFYSNIMNFFKTEITLANGEIRKRPLIETNGETGEIVWDKGRDFATVRKVLSMPQVNIVKKTEVQTGGFSKESILPKRNSDKLIARKKDWDPKKYGGFDSPTVAYSVLVVAKVEKGKSKKLKSVKELLGITIMERSSFEKNPIDFLEAKGYKEVKKDLIIKLPKYSLFELENGRKRMLASAGELQKGNELALPSKYVNFLYLASHYEKLKGSPEDNEQKQLFVEQHKHYLDEIIEQISEFSKRVILADANLDKVLSAYNKHRDKPIREQAENIIHLFTLTNLGAPAAFKYFDTTIDRKRYTSTKEVLDATLIHQSITGLYETRIDLSQLGGDGGAEAAAKEAAAKEAAAKEAAAKALEAEAAAKEAAAKEAAAKEAAAKAGGTLQLEEEYRLFEPESTQKQEMDIWLKNFPQAWAETGGMGTAHCQAPVLIQLKATATPISIRQYPMPHEAYQGIKPHIRRMLDQGILKPCQSPWNTPLLPVKKPGTEDYRPVQDLREVNKRVEDIHPTVPNPYNLLSTLPPSHPWYTVLDLKDAFFCLRLHSESQLLFAFEWRDPEIGLSGQLTWTRLPQGFKNSPTLFNEALHSDLADFRVRYPALVLLQYVDDLLLAAATRTECLEGTKALLETLGNKGYRASAKKAQICLQEVTYLGYSLKDGQRWLTKARKEAILSIPVPKNSRQVREFLGKAGYCRLFIPGFAELAAPLYPLTRPGTLFQWGTEQQLAFEDIKKALLSSPALGLPDITKPFELFIDENSGFAKGVLVQKLGPWKRPVAYLSKKLDTVASGWPPCLRMVAAIAILVKDAGKLTLGQPLTILTSHPVEALVRQPPNKWLSNARMTHYQAMLLDAERVHFGPTVSLNPATLLPLPSGGNHHDCLQILAETHGTRPDLTDQPLPDADLTWYTDGSSFIRNGEREAGAAVTTESEVIWAAPLPPGTSAQRAELIALTQALKMAEGKKLTVYTDSRYAFATTHVHGEIYRRRGWLTSEGKEIKNKNEILALLEALFLPKRLSIIHCPGHQKGDSPQAKGNRLADDTAKKAATETHSSLTVLPAGKRTADGSEFEKRTADGSEFESPKKKAKVE

SEQ ID NO: 1198 - protein, 2104 aa, synthetic construct
  source 1..2104: note = Description of Artificial Sequence: Synthetic polypeptide
MPAAKRVKLDGGDKKYSIGLDIGTNSVGWAVITDEYKVPSKKFKVLGNTDRHSIKKNLIGALLFDSGETAEATRLKRTARRRYTRRKNRICYLQEIFSNEMAKVDDSFFHRLEESFLVEEDKKHERHPIFGNIVDEVAYHEKYPTIYHLRKKLVDSTDKADLRLIYLALAHMIKFRGHFLIEGDLNPDNSDVDKLFIQLVQTYNQLFEENPINASGVDAKAILSARLSKSRRLENLIAQLPGEKKNGLFGNLIALSLGLTPNFKSNFDLAEDAKLQLSKDTYDDDLDNLLAQIGDQYADLFLAAKNLSDAILLSDILRVNTEITKAPLSASMIKRYDEHHQDLTLLKALVRQQLPEKYKEIFFDQSKNGYAGYIDGGASQEEFYKFIKPILEKMDGTEELLVKLNREDLLRKQRTFDNGSIPHQIHLGELHAILRRQEDFYPFLKDNREKIEKILTFRIPYYVGPLARGNSRFAWMTRKSEETITPWNFEEVVDKGASAQSFIERMTNFDKNLPNEKVLPKHSLLYEYFTVYNELTKVKYVTEGMRKPAFLSGEQKKAIVDLLFKTNRKVTVKQLKEDYFKKIECFDSVEISGVEDRFNASLGTYHDLLKIIKDKDFLDNEENEDILEDIVLTLTLFEDREMIEERLKTYAHLFDDKVMKQLKRRRYTGWGRLSRKLINGIRDKQSGKTILDFLKSDGFANRNFMQLIHDDSLTFKEDIQKAQVSGQGDSLHEHIANLAGSPAIKKGILQTVKVVDELVKVMGRHKPENIVIEMARENQTTQKGQKNSRERMKRIEEGIKELGSQILKEHPVENTQLQNEKLYLYYLQNGRDMYVDQELDINRLSDYDVDHIVPQSFLKDDSIDNKVLTRSDKARGKSDNVPSEEVVKKMKNYWRQLLNAKLITQRKFDNLTKAERGGLSELDKAGFIKRQLVETRQITKHVAQILDSRMNTKYDENDKLIREVKVITLKSKLVSDFRKDFQFYKVREINNYHHAHDAYLNAVVGTALIKKYPKLESEFVYGDYKVYDVRKMIAKSEQEIGKATAKYFFYSNIMNFFKTEITLANGEIRKRPLIETNGETGEIVWDKGRDFATVRKVLSMPQVNIVKKTEVQTGGFSKESILPKRNSDKLIARKKDWDPKKYGGFDSPTVAYSVLVVAKVEKGKSKKLKSVKELLGITIMERSSFEKNPIDFLEAKGYKEVKKDLIIKLPKYSLFELENGRKRMLASAGELQKGNELALPSKYVNFLYLASHYEKLKGSPEDNEQKQLFVEQHKHYLDEIIEQISEFSKRVILADANLDKVLSAYNKHRDKPIREQAENIIHLFTLTNLGAPAAFKYFDTTIDRKRYTSTKEVLDATLIHQSITGLYETRIDLSQLGGDGGEAAAKEAAAKEAAAKEAAAKGGTLQLEEEYRLFEPESTQKQEMDIWLKNFPQAWAETGGMGTAHCQAPVLIQLKATATPISIRQYPMPHEAYQGIKPHIRRMLDQGILKPCQSPWNTPLLPVKKPGTEDYRPVQDLREVNKRVEDIHPTVPNPYNLLSTLPPSHPWYTVLDLKDAFFCLRLHSESQLLFAFEWRDPEIGLSGQLTWTRLPQGFKNSPTLFNEALHSDLADFRVRYPALVLLQYVDDLLLAAATRTECLEGTKALLETLGNKGYRASAKKAQICLQEVTYLGYSLKDGQRWLTKARKEAILSIPVPKNSRQVREFLGKAGYCRLFIPGFAELAAPLYPLTRPGTLFQWGTEQQLAFEDIKKALLSSPALGLPDITKPFELFIDENSGFAKGVLVQKLGPWKRPVAYLSKKLDTVASGWPPCLRMVAAIAILVKDAGKLTLGQPLTILTSHPVEALVRQPPNKWLSNARMTHYQAMLLDAERVHFGPTVSLNPATLLPLPSGGNHHDCLQILAETHGTRPDLTDQPLPDADLTWYTDGSSFIRNGEREAGAAVTTESEVIWAAPLPPGTSAQRAELIALTQALKMAEGKKLTVYTDSRYAFATTHVHGEIYRRRGWLTSEGKEIKNKNEILALLEALFLPKRLSIIHCPGHQKGDSPQAKGNRLADDTAKKAATETHSSLTVLPAGKRTADGSEFEKRTADGSEFESPKKKAKVE

SEQ ID NO: 1199 - protein, 2114 aa, synthetic construct
  source 1..2114: note = Description of Artificial Sequence: Synthetic polypeptide
MPAAKRVKLDGGDKKYSIGLDIGTNSVGWAVITDEYKVPSKKFKVLGNTDRHSIKKNLIGALLFDSGETAEATRLKRTARRRYTRRKNRICYLQEIFSNEMAKVDDSFFHRLEESFLVEEDKKHERHPIFGNIVDEVAYHEKYPTIYHLRKKLVDSTDKADLRLIYLALAHMIKFRGHFLIEGDLNPDNSDVDKLFIQLVQTYNQLFEENPINASGVDAKAILSARLSKSRRLENLIAQLPGEKKNGLFGNLIALSLGLTPNFKSNFDLAEDAKLQLSKDTYDDDLDNLLAQIGDQYADLFLAAKNLSDAILLSDILRVNTEITKAPLSASMIKRYDEHHQDLTLLKALVRQQLPEKYKEIFFDQSKNGYAGYIDGGASQEEFYKFIKPILEKMDGTEELLVKLNREDLLRKQRTFDNGSIPHQIHLGELHAILRRQEDFYPFLKDNREKIEKILTFRIPYYVGPLARGNSRFAWMTRKSEETITPWNFEEVVDKGASAQSFIERMTNFDKNLPNEKVLPKHSLLYEYFTVYNELTKVKYVTEGMRKPAFLSGEQKKAIVDLLFKTNRKVTVKQLKEDYFKKIECFDSVEISGVEDRFNASLGTYHDLLKIIKDKDFLDNEENEDILEDIVLTLTLFEDREMIEERLKTYAHLFDDKVMKQLKRRRYTGWGRLSRKLINGIRDKQSGKTILDFLKSDGFANRNFMQLIHDDSLTFKEDIQKAQVSGQGDSLHEHIANLAGSPAIKKGILQTVKVVDELVKVMGRHKPENIVIEMARENQTTQKGQKNSRERMKRIEEGIKELGSQILKEHPVENTQLQNEKLYLYYLQNGRDMYVDQELDINRLSDYDVDHIVPQSFLKDDSIDNKVLTRSDKARGKSDNVPSEEVVKKMKNYWRQLLNAKLITQRKFDNLTKAERGGLSELDKAGFIKRQLVETRQITKHVAQILDSRMNTKYDENDKLIREVKVITLKSKLVSDFRKDFQFYKVREINNYHHAHDAYLNAVVGTALIKKYPKLESEFVYGDYKVYDVRKMIAKSEQEIGKATAKYFFYSNIMNFFKTEITLANGEIRKRPLIETNGETGEIVWDKGRDFATVRKVLSMPQVNIVKKTEVQTGGFSKESILPKRNSDKLIARKKDWDPKKYGGFDSPTVAYSVLVVAKVEKGKSKKLKSVKELLGITIMERSSFEKNPIDFLEAKGYKEVKKDLIIKLPKYSLFELENGRKRMLASAGELQKGNELALPSKYVNFLYLASHYEKLKGSPEDNEQKQLFVEQHKHYLDEIIEQISEFSKRVILADANLDKVLSAYNKHRDKPIREQAENIIHLFTLTNLGAPAAFKYFDTTIDRKRYTSTKEVLDATLIHQSITGLYETRIDLSQLGGDGGEAAAKEAAAKEAAAKEAAAKEAAAKEAAAKGGTLQLEEEYRLFEPESTQKQEMDIWLKNFPQAWAETGGMGTAHCQAPVLIQLKATATPISIRQYPMPHEAYQGIKPHIRRMLDQGILKPCQSPWNTPLLPVKKPGTEDYRPVQDLREVNKRVEDIHPTVPNPYNLLSTLPPSHPWYTVLDLKDAFFCLRLHSESQLLFAFEWRDPEIGLSGQLTWTRLPQGFKNSPTLFNEALHSDLADFRVRYPALVLLQYVDDLLLAAATRTECLEGTKALLETLGNKGYRASAKKAQICLQEVTYLGYSLKDGQRWLTKARKEAILSIPVPKNSRQVREFLGKAGYCRLFIPGFAELAAPLYPLTRPGTLFQWGTEQQLAFEDIKKALLSSPALGLPDITKPFELFIDENSGFAKGVLVQKLGPWKRPVAYLSKKLDTVASGWPPCLRMVAAIAILVKDAGKLTLGQPLTILTSHPVEALVRQPPNKWLSNARMTHYQAMLLDAERVHFGPTVSLNPATLLPLPSGGNHHDCLQILAETHGTRPDLTDQPLPDADLTWYTDGSSFIRNGEREAGAAVTTESEVIWAAPLPPGTSAQRAELIALTQALKMAEGKKLTVYTDSRYAFATTHVHGEIYRRRGWLTSEGKEIKNKNEILALLEALFLPKRLSIIHCPGHQKGDSPQAKGNRLADDTAKKAATETHSSLTVLPAGKRTADGSEFEKRTADGSEFESPKKKAKVE

SEQ ID NO: 1200 - protein, 2095 aa, synthetic construct
  source 1..2095: note = Description of Artificial Sequence: Synthetic polypeptide
MPAAKRVKLDGGDKKYSIGLDIGTNSVGWAVITDEYKVPSKKFKVLGNTDRHSIKKNLIGALLFDSGETAEATRLKRTARRRYTRRKNRICYLQEIFSNEMAKVDDSFFHRLEESFLVEEDKKHERHPIFGNIVDEVAYHEKYPTIYHLRKKLVDSTDKADLRLIYLALAHMIKFRGHFLIEGDLNPDNSDVDKLFIQLVQTYNQLFEENPINASGVDAKAILSARLSKSRRLENLIAQLPGEKKNGLFGNLIALSLGLTPNFKSNFDLAEDAKLQLSKDTYDDDLDNLLAQIGDQYADLFLAAKNLSDAILLSDILRVNTEITKAPLSASMIKRYDEHHQDLTLLKALVRQQLPEKYKEIFFDQSKNGYAGYIDGGASQEEFYKFIKPILEKMDGTEELLVKLNREDLLRKQRTFDNGSIPHQIHLGELHAILRRQEDFYPFLKDNREKIEKILTFRIPYYVGPLARGNSRFAWMTRKSEETITPWNFEEVVDKGASAQSFIERMTNFDKNLPNEKVLPKHSLLYEYFTVYNELTKVKYVTEGMRKPAFLSGEQKKAIVDLLFKTNRKVTVKQLKEDYFKKIECFDSVEISGVEDRFNASLGTYHDLLKIIKDKDFLDNEENEDILEDIVLTLTLFEDREMIEERLKTYAHLFDDKVMKQLKRRRYTGWGRLSRKLINGIRDKQSGKTILDFLKSDGFANRNFMQLIHDDSLTFKEDIQKAQVSGQGDSLHEHIANLAGSPAIKKGILQTVKVVDELVKVMGRHKPENIVIEMARENQTTQKGQKNSRERMKRIEEGIKELGSQILKEHPVENTQLQNEKLYLYYLQNGRDMYVDQELDINRLSDYDVDHIVPQSFLKDDSIDNKVLTRSDKARGKSDNVPSEEVVKKMKNYWRQLLNAKLITQRKFDNLTKAERGGLSELDKAGFIKRQLVETRQITKHVAQILDSRMNTKYDENDKLIREVKVITLKSKLVSDFRKDFQFYKVREINNYHHAHDAYLNAVVGTALIKKYPKLESEFVYGDYKVYDVRKMIAKSEQEIGKATAKYFFYSNIMNFFKTEITLANGEIRKRPLIETNGETGEIVWDKGRDFATVRKVLSMPQVNIVKKTEVQTGGFSKESILPKRNSDKLIARKKDWDPKKYGGFDSPTVAYSVLVVAKVEKGKSKKLKSVKELLGITIMERSSFEKNPIDFLEAKGYKEVKKDLIIKLPKYSLFELENGRKRMLASAGELQKGNELALPSKYVNFLYLASHYEKLKGSPEDNEQKQLFVEQHKHYLDEIIEQISEFSKRVILADANLDKVLSAYNKHRDKPIREQAENIIHLFTLTNLGAPAAFKYFDTTIDRKRYTSTKEVLDATLIHQSITGLYETRIDLSQLGGDGGPAPEAAAKGGGGGTLQLEEEYRLFEPESTQKQEMDIWLKNFPQAWAETGGMGTAHCQAPVLIQLKATATPISIRQYPMPHEAYQGIKPHIRRMLDQGILKPCQSPWNTPLLPVKKPGTEDYRPVQDLREVNKRVEDIHPTVPNPYNLLSTLPPSHPWYTVLDLKDAFFCLRLHSESQLLFAFEWRDPEIGLSGQLTWTRLPQGFKNSPTLFNEALHSDLADFRVRYPALVLLQYVDDLLLAAATRTECLEGTKALLETLGNKGYRASAKKAQICLQEVTYLGYSLKDGQRWLTKARKEAILSIPVPKNSRQVREFLGKAGYCRLFIPGFAELAAPLYPLTRPGTLFQWGTEQQLAFEDIKKALLSSPALGLPDITKPFELFIDENSGFAKGVLVQKLGPWKRPVAYLSKKLDTVASGWPPCLRMVAAIAILVKDAGKLTLGQPLTILTSHPVEALVRQPPNKWLSNARMTHYQAMLLDAERVHFGPTVSLNPATLLPLPSGGNHHDCLQILAETHGTRPDLTDQPLPDADLTWYTDGSSFIRNGEREAGAAVTTESEVIWAAPLPPGTSAQRAELIALTQALKMAEGKKLTVYTDSRYAFATTHVHGEIYRRRGWLTSEGKEIKNKNEILALLEALFLPKRLSIIHCPGHQKGDSPQAKGNRLADDTAKKAATETHSSLTVLPAGKRTADGSEFEKRTADGSEFESPKKKAKVE

SEQ ID NO: 1201 - protein, 2095 aa, synthetic construct
  source 1..2095: note = Description of Artificial Sequence: Synthetic polypeptide
MPAAKRVKLDGGDKKYSIGLDIGTNSVGWAVITDEYKVPSKKFKVLGNTDRHSIKKNLIGALLFDSGETAEATRLKRTARRRYTRRKNRICYLQEIFSNEMAKVDDSFFHRLEESFLVEEDKKHERHPIFGNIVDEVAYHEKYPTIYHLRKKLVDSTDKADLRLIYLALAHMIKFRGHFLIEGDLNPDNSDVDKLFIQLVQTYNQLFEENPINASGVDAKAILSARLSKSRRLENLIAQLPGEKKNGLFGNLIALSLGLTPNFKSNFDLAEDAKLQLSKDTYDDDLDNLLAQIGDQYADLFLAAKNLSDAILLSDILRVNTEITKAPLSASMIKRYDEHHQDLTLLKALVRQQLPEKYKEIFFDQSKNGYAGYIDGGASQEEFYKFIKPILEKMDGTEELLVKLNREDLLRKQRTFDNGSIPHQIHLGELHAILRRQEDFYPFLKDNREKIEKILTFRIPYYVGPLARGNSRFAWMTRKSEETITPWNFEEVVDKGASAQSFIERMTNFDKNLPNEKVLPKHSLLYEYFTVYNELTKVKYVTEGMRKPAFLSGEQKKAIVDLLFKTNRKVTVKQLKEDYFKKIECFDSVEISGVEDRFNASLGTYHDLLKIIKDKDFLDNEENEDILEDIVLTLTLFEDREMIEERLKTYAHLFDDKVMKQLKRRRYTGWGRLSRKLINGIRDKQSGKTILDFLKSDGFANRNFMQLIHDDSLTFKEDIQKAQVSGQGDSLHEHIANLAGSPAIKKGILQTVKVVDELVKVMGRHKPENIVIEMARENQTTQKGQKNSRERMKRIEEGIKELGSQILKEHPVENTQLQNEKLYLYYLQNGRDMYVDQELDINRLSDYDVDHIVPQSFLKDDSIDNKVLTRSDKARGKSDNVPSEEVVKKMKNYWRQLLNAKLITQRKFDNLTKAERGGLSELDKAGFIKRQLVETRQITKHVAQILDSRMNTKYDENDKLIREVKVITLKSKLVSDFRKDFQFYKVREINNYHHAHDAYLNAVVGTALIKKYPKLESEFVYGDYKVYDVRKMIAKSEQEIGKATAKYFFYSNIMNFFKTEITLANGEIRKRPLIETNGETGEIVWDKGRDFATVRKVLSMPQVNIVKKTEVQTGGFSKESILPKRNSDKLIARKKDWDPKKYGGFDSPTVAYSVLVVAKVEKGKSKKLKSVKELLGITIMERSSFEKNPIDFLEAKGYKEVKKDLIIKLPKYSLFELENGRKRMLASAGELQKGNELALPSKYVNFLYLASHYEKLKGSPEDNEQKQLFVEQHKHYLDEIIEQISEFSKRVILADANLDKVLSAYNKHRDKPIREQAENIIHLFTLTNLGAPAAFKYFDTTIDRKRYTSTKEVLDATLIHQSITGLYETRIDLSQLGGDGGEAAAKGSSPAPGGTLQLEEEYRLFEPESTQKQEMDIWLKNFPQAWAETGGMGTAHCQAPVLIQLKATATPISIRQYPMPHEAYQGIKPHIRRMLDQGILKPCQSPWNTPLLPVKKPGTEDYRPVQDLREVNKRVEDIHPTVPNPYNLLSTLPPSHPWYTVLDLKDAFFCLRLHSESQLLFAFEWRDPEIGLSGQLTWTRLPQGFKNSPTLFNEALHSDLADFRVRYPALVLLQYVDDLLLAAATRTECLEGTKALLETLGNKGYRASAKKAQICLQEVTYLGYSLKDGQRWLTKARKEAILSIPVPKNSRQVREFLGKAGYCRLFIPGFAELAAPLYPLTRPGTLFQWGTEQQLAFEDIKKALLSSPALGLPDITKPFELFIDENSGFAKGVLVQKLGPWKRPVAYLSKKLDTVASGWPPCLRMVAAIAILVKDAGKLTLGQPLTILTSHPVEALVRQPPNKWLSNARMTHYQAMLLDAERVHFGPTVSLNPATLLPLPSGGNHHDCLQILAETHGTRPDLTDQPLPDADLTWYTDGSSFIRNGEREAGAAVTTESEVIWAAPLPPGTSAQRAELIALTQALKMAEGKKLTVYTDSRYAFATTHVHGEIYRRRGWLTSEGKEIKNKNEILALLEALFLPKRLSIIHCPGHQKGDSPQAKGNRLADDTAKKAATETHSSLTVLPAGKRTADGSEFEKRTADGSEFESPKKKAKVE

SEQ ID NO: 1202 - protein, 2109 aa, synthetic construct
  source 1..2109: note = Description of Artificial Sequence: Synthetic polypeptide
MPAAKRVKLDGGDKKYSIGLDIGTNSVGWAVITDEYKVPSKKFKVLGNTDRHSIKKNLIGALLFDSGETAEATRLKRTARRRYTRRKNRICYLQEIFSNEMAKVDDSFFHRLEESFLVEEDKKHERHPIFGNIVDEVAYHEKYPTIYHLRKKLVDSTDKADLRLIYLALAHMIKFRGHFLIEGDLNPDNSDVDKLFIQLVQTYNQLFEENPINASGVDAKAILSARLSKSRRLENLIAQLPGEKKNGLFGNLIALSLGLTPNFKSNFDLAEDAKLQLSKDTYDDDLDNLLAQIGDQYADLFLAAKNLSDAILLSDILRVNTEITKAPLSASMIKRYDEHHQDLTLLKALVRQQLPEKYKEIFFDQSKNGYAGYIDGGASQEEFYKFIKPILEKMDGTEELLVKLNREDLLRKQRTFDNGSIPHQIHLGELHAILRRQEDFYPFLKDNREKIEKILTFRIPYYVGPLARGNSRFAWMTRKSEETITPWNFEEVVDKGASAQSFIERMTNFDKNLPNEKVLPKHSLLYEYFTVYNELTKVKYVTEGMRKPAFLSGEQKKAIVDLLFKTNRKVTVKQLKEDYFKKIECFDSVEISGVEDRFNASLGTYHDLLKIIKDKDFLDNEENEDILEDIVLTLTLFEDREMIEERLKTYAHLFDDKVMKQLKRRRYTGWGRLSRKLINGIRDKQSGKTILDFLKSDGFANRNFMQLIHDDSLTFKEDIQKAQVSGQGDSLHEHIANLAGSPAIKKGILQTVKVVDELVKVMGRHKPENIVIEMARENQTTQKGQKNSRERMKRIEEGIKELGSQILKEHPVENTQLQNEKLYLYYLQNGRDMYVDQELDINRLSDYDVDHIVPQSFLKDDSIDNKVLTRSDKARGKSDNVPSEEVVKKMKNYWRQLLNAKLITQRKFDNLTKAERGGLSELDKAGFIKRQLVETRQITKHVAQILDSRMNTKYDENDKLIREVKVITLKSKLVSDFRKDFQFYKVREINNYHHAHDAYLNAVVGTALIKKYPKLESEFVYGDYKVYDVRKMIAKSEQEIGKATAKYFFYSNIMNFFKTEITLANGEIRKRPLIETNGETGEIVWDKGRDFATVRKVLSMPQVNIVKKTEVQTGGFSKESILPKRNSDKLIARKKDWDPKKYGGFDSPTVAYSVLVVAKVEKGKSKKLKSVKELLGITIMERSSFEKNPIDFLEAKGYKEVKKDLIIKLPKYSLFELENGRKRMLASAGELQKGNELALPSKYVNFLYLASHYEKLKGSPEDNEQKQLFVEQHKHYLDEIIEQISEFSKRVILADANLDKVLSAYNKHRDKPIREQAENIIHLFTLTNLGAPAAFKYFDTTIDRKRYTSTKEVLDATLIHQSITGLYETRIDLSQLGGDGGGGGGSGGGGSGGGGSGGGGSGGGGSGGTLQLEEEYRLFEPESTQKQEMDIWLKNFPQAWAETGGMGTAHCQAPVLIQLKATATPISIRQYPMPHEAYQGIKPHIRRMLDQGILKPCQSPWNTPLLPVKKPGTEDYRPVQDLREVNKRVEDIHPTVPNPYNLLSTLPPSHPWYTVLDLKDAFFCLRLHSESQLLFAFEWRDPEIGLSGQLTWTRLPQGFKNSPTLFNEALHSDLADFRVRYPALVLLQYVDDLLLAAATRTECLEGTKALLETLGNKGYRASAKKAQICLQEVTYLGYSLKDGQRWLTKARKEAILSIPVPKNSRQVREFLGKAGYCRLFIPGFAELAAPLYPLTRPGTLFQWGTEQQLAFEDIKKALLSSPALGLPDITKPFELFIDENSGFAKGVLVQKLGPWKRPVAYLSKKLDTVASGWPPCLRMVAAIAILVKDAGKLTLGQPLTILTSHPVEALVRQPPNKWLSNARMTHYQAMLLDAERVHFGPTVSLNPATLLPLPSGGNHHDCLQILAETHGTRPDLTDQPLPDADLTWYTDGSSFIRNGEREAGAAVTTESEVIWAAPLPPGTSAQRAELIALTQALKMAEGKKLTVYTDSRYAFATTHVHGEIYRRRGWLTSEGKEIKNKNEILALLEALFLPKRLSIIHCPGHQKGDSPQAKGNRLADDTAKKAATETHSSLTVLPAGKRTADGSEFEKRTADGSEFESPKKKAKVE

SEQ ID NO: 1203 - protein, 2099 aa, synthetic construct
  source 1..2099: note = Description of Artificial Sequence: Synthetic polypeptide
MPAAKRVKLDGGDKKYSIGLDIGTNSVGWAVITDEYKVPSKKFKVLGNTDRHSIKKNLIGALLFDSGETAEATRLKRTARRRYTRRKNRICYLQEIFSNEMAKVDDSFFHRLEESFLVEEDKKHERHPIFGNIVDEVAYHEKYPTIYHLRKKLVDSTDKADLRLIYLALAHMIKFRGHFLIEGDLNPDNSDVDKLFIQLVQTYNQLFEENPINASGVDAKAILSARLSKSRRLENLIAQLPGEKKNGLFGNLIALSLGLTPNFKSNFDLAEDAKLQLSKDTYDDDLDNLLAQIGDQYADLFLAAKNLSDAILLSDILRVNTEITKAPLSASMIKRYDEHHQDLTLLKALVRQQLPEKYKEIFFDQSKNGYAGYIDGGASQEEFYKFIKPILEKMDGTEELLVKLNREDLLRKQRTFDNGSIPHQIHLGELHAILRRQEDFYPFLKDNREKIEKILTFRIPYYVGPLARGNSRFAWMTRKSEETITPWNFEEVVDKGASAQSFIERMTNFDKNLPNEKVLPKHSLLYEYFTVYNELTKVKYVTEGMRKPAFLSGEQKKAIVDLLFKTNRKVTVKQLKEDYFKKIECFDSVEISGVEDRFNASLGTYHDLLKIIKDKDFLDNEENEDILEDIVLTLTLFEDREMIEERLKTYAHLFDDKVMKQLKRRRYTGWGRLSRKLINGIRDKQSGKTILDFLKSDGFANRNFMQLIHDDSLTFKEDIQKAQVSGQGDSLHEHIANLAGSPAIKKGILQTVKVVDELVKVMGRHKPENIVIEMARENQTTQKGQKNSRERMKRIEEGIKELGSQILKEHPVENTQLQNEKLYLYYLQNGRDMYVDQELDINRLSDYDVDHIVPQSFLKDDSIDNKVLTRSDKARGKSDNVPSEEVVKKMKNYWRQLLNAKLITQRKFDNLTKAERGGLSELDKAGFIKRQLVETRQITKHVAQILDSRMNTKYDENDKLIREVKVITLKSKLVSDFRKDFQFYKVREINNYHHAHDAYLNAVVGTALIKKYPKLESEFVYGDYKVYDVRKMIAKSEQEIGKATAKYFFYSNIMNFFKTEITLANGEIRKRPLIETNGETGEIVWDKGRDFATVRKVLSMPQVNIVKKTEVQTGGFSKESILPKRNSDKLIARKKDWDPKKYGGFDSPTVAYSVLVVAKVEKGKSKKLKSVKELLGITIMERSSFEKNPIDFLEAKGYKEVKKDLIIKLPKYSLFELENGRKRMLASAGELQKGNELALPSKYVNFLYLASHYEKLKGSPEDNEQKQLFVEQHKHYLDEIIEQISEFSKRVILADANLDKVLSAYNKHRDKPIREQAENIIHLFTLTNLGAPAAFKYFDTTIDRKRYTSTKEVLDATLIHQSITGLYETRIDLSQLGGDGGGGGGSEAAAKGGGGSGGTLQLEEEYRLFEPESTQKQEMDIWLKNFPQAWAETGGMGTAHCQAPVLIQLKATATPISIRQYPMPHEAYQGIKPHIRRMLDQGILKPCQSPWNTPLLPVKKPGTEDYRPVQDLREVNKRVEDIHPTVPNPYNLLSTLPPSHPWYTVLDLKDAFFCLRLHSESQLLFAFEWRDPEIGLSGQLTWTRLPQGFKNSPTLFNEALHSDLADFRVRYPALVLLQYVDDLLLAAATRTECLEGTKALLETLGNKGYRASAKKAQICLQEVTYLGYSLKDGQRWLTKARKEAILSIPVPKNSRQVREFLGKAGYCRLFIPGFAELAAPLYPLTRPGTLFQWGTEQQLAFEDIKKALLSSPALGLPDITKPFELFIDENSGFAKGVLVQKLGPWKRPVAYLSKKLDTVASGWPPCLRMVAAIAILVKDAGKLTLGQPLTILTSHPVEALVRQPPNKWLSNARMTHYQAMLLDAERVHFGPTVSLNPATLLPLPSGGNHHDCLQILAETHGTRPDLTDQPLPDADLTWYTDGSSFIRNGEREAGAAVTTESEVIWAAPLPPGTSAQRAELIALTQALKMAEGKKLTVYTDSRYAFATTHVHGEIYRRRGWLTSEGKEIKNKNEILALLEALFLPKRLSIIHCPGHQKGDSPQAKGNRLADDTAKKAATETHSSLTVLPAGKRTADGSEFEKRTADGSEFESPKKKAKVE

SEQ ID NO: 1204 - protein, 2092 aa, synthetic construct
  source 1..2092: note = Description of Artificial Sequence: Synthetic polypeptide
MPAAKRVKLDGGDKKYSIGLDIGTNSVGWAVITDEYKVPSKKFKVLGNTDRHSIKKNLIGALLFDSGETAEATRLKRTARRRYTRRKNRICYLQEIFSNEMAKVDDSFFHRLEESFLVEEDKKHERHPIFGNIVDEVAYHEKYPTIYHLRKKLVDSTDKADLRLIYLALAHMIKFRGHFLIEGDLNPDNSDVDKLFIQLVQTYNQLFEENPINASGVDAKAILSARLSKSRRLENLIAQLPGEKKNGLFGNLIALSLGLTPNFKSNFDLAEDAKLQLSKDTYDDDLDNLLAQIGDQYADLFLAAKNLSDAILLSDILRVNTEITKAPLSASMIKRYDEHHQDLTLLKALVRQQLPEKYKEIFFDQSKNGYAGYIDGGASQEEFYKFIKPILEKMDGTEELLVKLNREDLLRKQRTFDNGSIPHQIHLGELHAILRRQEDFYPFLKDNREKIEKILTFRIPYYVGPLARGNSRFAWMTRKSEETITPWNFEEVVDKGASAQSFIERMTNFDKNLPNEKVLPKHSLLYEYFTVYNELTKVKYVTEGMRKPAFLSGEQKKAIVDLLFKTNRKVTVKQLKEDYFKKIECFDSVEISGVEDRFNASLGTYHDLLKIIKDKDFLDNEENEDILEDIVLTLTLFEDREMIEERLKTYAHLFDDKVMKQLKRRRYTGWGRLSRKLINGIRDKQSGKTILDFLKSDGFANRNFMQLIHDDSLTFKEDIQKAQVSGQGDSLHEHIANLAGSPAIKKGILQTVKVVDELVKVMGRHKPENIVIEMARENQTTQKGQKNSRERMKRIEEGIKELGSQILKEHPVENTQLQNEKLYLYYLQNGRDMYVDQELDINRLSDYDVDHIVPQSFLKDDSIDNKVLTRSDKARGKSDNVPSEEVVKKMKNYWRQLLNAKLITQRKFDNLTKAERGGLSELDKAGFIKRQLVETRQITKHVAQILDSRMNTKYDENDKLIREVKVITLKSKLVSDFRKDFQFYKVREINNYHHAHDAYLNAVVGTALIKKYPKLESEFVYGDYKVYDVRKMIAKSEQEIGKATAKYFFYSNIMNFFKTEITLANGEIRKRPLIETNGETGEIVWDKGRDFATVRKVLSMPQVNIVKKTEVQTGGFSKESILPKRNSDKLIARKKDWDPKKYGGFDSPTVAYSVLVVAKVEKGKSKKLKSVKELLGITIMERSSFEKNPIDFLEAKGYKEVKKDLIIKLPKYSLFELENGRKRMLASAGELQKGNELALPSKYVNFLYLASHYEKLKGSPEDNEQKQLFVEQHKHYLDEIIEQISEFSKRVILADANLDKVLSAYNKHRDKPIREQAENIIHLFTLTNLGAPAAFKYFDTTIDRKRYTSTKEVLDATLIHQSITGLYETRIDLSQLGGDGGGGSEAAAKGGTLQLEEEYRLFEPESTQKQEMDIWLKNFPQAWAETGGMGTAHCQAPVLIQLKATATPISIRQYPMPHEAYQGIKPHIRRMLDQGILKPCQSPWNTPLLPVKKPGTEDYRPVQDLREVNKRVEDIHPTVPNPYNLLSTLPPSHPWYTVLDLKDAFFCLRLHSESQLLFAFEWRDPEIGLSGQLTWTRLPQGFKNSPTLFNEALHSDLADFRVRYPALVLLQYVDDLLLAAATRTECLEGTKALLETLGNKGYRASAKKAQICLQEVTYLGYSLKDGQRWLTKARKEAILSIPVPKNSRQVREFLGKAGYCRLFIPGFAELAAPLYPLTRPGTLFQWGTEQQLAFEDIKKALLSSPALGLPDITKPFELFIDENSGFAKGVLVQKLGPWKRPVAYLSKKLDTVASGWPPCLRMVAAIAILVKDAGKLTLGQPLTILTSHPVEALVRQPPNKWLSNARMTHYQAMLLDAERVHFGPTVSLNPATLLPLPSGGNHHDCLQILAETHGTRPDLTDQPLPDADLTWYTDGSSFIRNGEREAGAAVTTESEVIWAAPLPPGTSAQRAELIALTQALKMAEGKKLTVYTDSRYAFATTHVHGEIYRRRGWLTSEGKEIKNKNEILALLEALFLPKRLSIIHCPGHQKGDSPQAKGNRLADDTAKKAATETHSSLTVLPAGKRTADGSEFEKRTADGSEFESPKKKAKVE

SEQ ID NO: 1205 - protein, 2100 aa, synthetic construct
  source 1..2100: note = Description of Artificial Sequence: Synthetic polypeptide
MPAAKRVKLDGGDKKYSIGLDIGTNSVGWAVITDEYKVPSKKFKVLGNTDRHSIKKNLIGALLFDSGETAEATRLKRTARRRYTRRKNRICYLQEIFSNEMAKVDDSFFHRLEESFLVEEDKKHERHPIFGNIVDEVAYHEKYPTIYHLRKKLVDSTDKADLRLIYLALAHMIKFRGHFLIEGDLNPDNSDVDKLFIQLVQTYNQLFEENPINASGVDAKAILSARLSKSRRLENLIAQLPGEKKNGLFGNLIALSLGLTPNFKSNFDLAEDAKLQLSKDTYDDDLDNLLAQIGDQYADLFLAAKNLSDAILLSDILRVNTEITKAPLSASMIKRYDEHHQDLTLLKALVRQQLPEKYKEIFFDQSKNGYAGYIDGGASQEEFYKFIKPILEKMDGTEELLVKLNREDLLRKQRTFDNGSIPHQIHLGELHAILRRQEDFYPFLKDNREKIEKILTFRIPYYVGPLARGNSRFAWMTRKSEETITPWNFEEVVDKGASAQSFIERMTNFDKNLPNEKVLPKHSLLYEYFTVYNELTKVKYVTEGMRKPAFLSGEQKKAIVDLLFKTNRKVTVKQLKEDYFKKIECFDSVEISGVEDRFNASLGTYHDLLKIIKDKDFLDNEENEDILEDIVLTLTLFEDREMIEERLKTYAHLFDDKVMKQLKRRRYTGWGRLSRKLINGIRDKQSGKTILDFLKSDGFANRNFMQLIHDDSLTFKEDIQKAQVSGQGDSLHEHIANLAGSPAIKKGILQTVKVVDELVKVMGRHKPENIVIEMARENQTTQKGQKNSRERMKRIEEGIKELGSQILKEHPVENTQLQNEKLYLYYLQNGRDMYVDQELDINRLSDYDVDHIVPQSFLKDDSIDNKVLTRSDKARGKSDNVPSEEVVKKMKNYWRQLLNAKLITQRKFDNLTKAERGGLSELDKAGFIKRQLVETRQITKHVAQILDSRMNTKYDENDKLIREVKVITLKSKLVSDFRKDFQFYKVREINNYHHAHDAYLNAVVGTALIKKYPKLESEFVYGDYKVYDVRKMIAKSEQEIGKATAKYFFYSNIMNFFKTEITLANGEIRKRPLIETNGETGEIVWDKGRDFATVRKVLSMPQVNIVKKTEVQTGGFSKESILPKRNSDKLIARKKDWDPKKYGGFDSPTVAYSVLVVAKVEKGKSKKLKSVKELLGITIMERSSFEKNPIDFLEAKGYKEVKKDLIIKLPKYSLFELENGRKRMLASAGELQKGNELALPSKYVNFLYLASHYEKLKGSPEDNEQKQLFVEQHKHYLDEIIEQISEFSKRVILADANLDKVLSAYNKHRDKPIREQAENIIHLFTLTNLGAPAAFKYFDTTIDRKRYTSTKEVLDATLIHQSITGLYETRIDLSQLGGDGGSGSETPGTSESATPESGGTLQLEEEYRLFEPESTQKQEMDIWLKNFPQAWAETGGMGTAHCQAPVLIQLKATATPISIRQYPMPHEAYQGIKPHIRRMLDQGILKPCQSPWNTPLLPVKKPGTEDYRPVQDLREVNKRVEDIHPTVPNPYNLLSTLPPSHPWYTVLDLKDAFFCLRLHSESQLLFAFEWRDPEIGLSGQLTWTRLPQGFKNSPTLFNEALHSDLADFRVRYPALVLLQYVDDLLLAAATRTECLEGTKALLETLGNKGYRASAKKAQICLQEVTYLGYSLKDGQRWLTKARKEAILSIPVPKNSRQVREFLGKAGYCRLFIPGFAELAAPLYPLTRPGTLFQWGTEQQLAFEDIKKALLSSPALGLPDITKPFELFIDENSGFAKGVLVQKLGPWKRPVAYLSKKLDTVASGWPPCLRMVAAIAILVKDAGKLTLGQPLTILTSHPVEALVRQPPNKWLSNARMTHYQAMLLDAERVHFGPTVSLNPATLLPLPSGGNHHDCLQILAETHGTRPDLTDQPLPDADLTWYTDGSSFIRNGEREAGAAVTTESEVIWAAPLPPGTSAQRAELIALTQALKMAEGKKLTVYTDSRYAFATTHVHGEIYRRRGWLTSEGKEIKNKNEILALLEALFLPKRLSIIHCPGHQKGDSPQAKGNRLADDTAKKAATETHSSLTVLPAGKRTADGSEFEKRTADGSEFESPKKKAKVE

SEQ ID NO: 1206 - protein, 2094 aa, synthetic construct
  source 1..2094: note = Description of Artificial Sequence: Synthetic polypeptide
MPAAKRVKLDGGDKKYSIGLDIGTNSVGWAVITDEYKVPSKKFKVLGNTDRHSIKKNLIGALLFDSGETAEATRLKRTARRRYTRRKNRICYLQEIFSNEMAKVDDSFFHRLEESFLVEEDKKHERHPIFGNIVDEVAYHEKYPTIYHLRKKLVDSTDKADLRLIYLALAHMIKFRGHFLIEGDLNPDNSDVDKLFIQLVQTYNQLFEENPINASGVDAKAILSARLSKSRRLENLIAQLPGEKKNGLFGNLIALSLGLTPNFKSNFDLAEDAKLQLSKDTYDDDLDNLLAQIGDQYADLFLAAKNLSDAILLSDILRVNTEITKAPLSASMIKRYDEHHQDLTLLKALVRQQLPEKYKEIFFDQSKNGYAGYIDGGASQEEFYKFIKPILEKMDGTEELLVKLNREDLLRKQRTFDNGSIPHQIHLGELHAILRRQEDFYPFLKDNREKIEKILTFRIPYYVGPLARGNSRFAWMTRKSEETITPWNFEEVVDKGASAQSFIERMTNFDKNLPNEKVLPKHSLLYEYFTVYNELTKVKYVTEGMRKPAFLSGEQKKAIVDLLFKTNRKVTVKQLKEDYFKKIECFDSVEISGVEDRFNASLGTYHDLLKIIKDKDFLDNEENEDILEDIVLTLTLFEDREMIEERLKTYAHLFDDKVMKQLKRRRYTGWGRLSRKLINGIRDKQSGKTILDFLKSDGFANRNFMQLIHDDSLTFKEDIQKAQVSGQGDSLHEHIANLAGSPAIKKGILQTVKVVDELVKVMGRHKPENIVIEMARENQTTQKGQKNSRERMKRIEEGIKELGSQILKEHPVENTQLQNEKLYLYYLQNGRDMYVDQELDINRLSDYDVDHIVPQSFLKDDSIDNKVLTRSDKARGKSDNVPSEEVVKKMKNYWRQLLNAKLITQRKFDNLTKAERGGLSELDKAGFIKRQLVETRQITKHVAQILDSRMNTKYDENDKLIREVKVITLKSKLVSDFRKDFQFYKVREINNYHHAHDAYLNAVVGTALIKKYPKLESEFVYGDYKVYDVRKMIAKSEQEIGKATAKYFFYSNIMNFFKTEITLANGEIRKRPLIETNGETGEIVWDKGRDFATVRKVLSMPQVNIVKKTEVQTGGFSKESILPKRNSDKLIARKKDWDPKKYGGFDSPTVAYSVLVVAKVEKGKSKKLKSVKELLGITIMERSSFEKNPIDFLEAKGYKEVKKDLIIKLPKYSLFELENGRKRMLASAGELQKGNELALPSKYVNFLYLASHYEKLKGSPEDNEQKQLFVEQHKHYLDEIIEQISEFSKRVILADANLDKVLSAYNKHRDKPIREQAENIIHLFTLTNLGAPAAFKYFDTTIDRKRYTSTKEVLDATLIHQSITGLYETRIDLSQLGGDGGEAAAKEAAAKGGTLQLEEEYRLFEPESTQKQEMDIWLKNFPQAWAETGGMGTAHCQAPVLIQLKATATPISIRQYPMPHEAYQGIKPHIRRMLDQGILKPCQSPWNTPLLPVKKPGTEDYRPVQDLREVNKRVEDIHPTVPNPYNLLSTLPPSHPWYTVLDLKDAFFCLRLHSESQLLFAFEWRDPEIGLSGQLTWTRLPQGFKNSPTLFNEALHSDLADFRVRYPALVLLQYVDDLLLAAATRTECLEGTKALLETLGNKGYRASAKKAQICLQEVTYLGYSLKDGQRWLTKARKEAILSIPVPKNSRQVREFLGKAGYCRLFIPGFAELAAPLYPLTRPGTLFQWGTEQQLAFEDIKKALLSSPALGLPDITKPFELFIDENSGFAKGVLVQKLGPWKRPVAYLSKKLDTVASGWPPCLRMVAAIAILVKDAGKLTLGQPLTILTSHPVEALVRQPPNKWLSNARMTHYQAMLLDAERVHFGPTVSLNPATLLPLPSGGNHHDCLQILAETHGTRPDLTDQPLPDADLTWYTDGSSFIRNGEREAGAAVTTESEVIWAAPLPPGTSAQRAELIALTQALKMAEGKKLTVYTDSRYAFATTHVHGEIYRRRGWLTSEGKEIKNKNEILALLEALFLPKRLSIIHCPGHQKGDSPQAKGNRLADDTAKKAATETHSSLTVLPAGKRTADGSEFEKRTADGSEFESPKKKAKVE

SEQ ID NO: 1207 - protein, 2096 aa, synthetic construct
  source 1..2096: note = Description of Artificial Sequence: Synthetic polypeptide
MPAAKRVKLDGGDKKYSIGLDIGTNSVGWAVITDEYKVPSKKFKVLGNTDRHSIKKNLIGALLFDSGETAEATRLKRTARRRYTRRKNRICYLQEIFSNEMAKVDDSFFHRLEESFLVEEDKKHERHPIFGNIVDEVAYHEKYPTIYHLRKKLVDSTDKADLRLIYLALAHMIKFRGHFLIEGDLNPDNSDVDKLFIQLVQTYNQLFEENPINASGVDAKAILSARLSKSRRLENLIAQLPGEKKNGLFGNLIALSLGLTPNFKSNFDLAEDAKLQLSKDTYDDDLDNLLAQIGDQYADLFLAAKNLSDAILLSDILRVNTEITKAPLSASMIKRYDEHHQDLTLLKALVRQQLPEKYKEIFFDQSKNGYAGYIDGGASQEEFYKFIKPILEKMDGTEELLVKLNREDLLRKQRTFDNGSIPHQIHLGELHAILRRQEDFYPFLKDNREKIEKILTFRIPYYVGPLARGNSRFAWMTRKSEETITPWNFEEVVDKGASAQSFIERMTNFDKNLPNEKVLPKHSLLYEYFTVYNELTKVKYVTEGMRKPAFLSGEQKKAIVDLLFKTNRKVTVKQLKEDYFKKIECFDSVEISGVEDRFNASLGTYHDLLKIIKDKDFLDNEENEDILEDIVLTLTLFEDREMIEERLKTYAHLFDDKVMKQLKRRRYTGWGRLSRKLINGIRDKQSGKTILDFLKSDGFANRNFMQLIHDDSLTFKEDIQKAQVSGQGDSLHEHIANLAGSPAIKKGILQTVKVVDELVKVMGRHKPENIVIEMARENQTTQKGQKNSRERMKRIEEGIKELGSQILKEHPVENTQLQNEKLYLYYLQNGRDMYVDQELDINRLSDYDVDHIVPQSFLKDDSIDNKVLTRSDKARGKSDNVPSEEVVKKMKNYWRQLLNAKLITQRKFDNLTKAERGGLSELDKAGFIKRQLVETRQITKHVAQILDSRMNTKYDENDKLIREVKVITLKSKLVSDFRKDFQFYKVREINNYHHAHDAYLNAVVGTALIKKYPKLESEFVYGDYKVYDVRKMIAKSEQEIGKATAKYFFYSNIMNFFKTEITLANGEIRKRPLIETNGETGEIVWDKGRDFATVRKVLSMPQVNIVKKTEVQTGGFSKESILPKRNSDKLIARKKDWDPKKYGGFDSPTVAYSVLVVAKVEKGKSKKLKSVKELLGITIMERSSFEKNPIDFLEAKGYKEVKKDLIIKLPKYSLFELENGRKRMLASAGELQKGNELALPSKYVNFLYLASHYEKLKGSPEDNEQKQLFVEQHKHYLDEIIEQISEFSKRVILADANLDKVLSAYNKHRDKPIREQAENIIHLFTLTNLGAPAAFKYFDTTIDRKRYTSTKEVLDATLIHQSITGLYETRIDLSQLGGDGGGGSGGSGGSGGSGGTLQLEEEYRLFEPESTQKQEMDIWLKNFPQAWAETGGMGTAHCQAPVLIQLKATATPISIRQYPMPHEAYQGIKPHIRRMLDQGILKPCQSPWNTPLLPVKKPGTEDYRPVQDLREVNKRVEDIHPTVPNPYNLLSTLPPSHPWYTVLDLKDAFFCLRLHSESQLLFAFEWRDPEIGLSGQLTWTRLPQGFKNSPTLFNEALHSDLADFRVRYPALVLLQYVDDLLLAAATRTECLEGTKALLETLGNKGYRASAKKAQICLQEVTYLGYSLKDGQRWLTKARKEAILSIPVPKNSRQVREFLGKAGYCRLFIPGFAELAAPLYPLTRPGTLFQWGTEQQLAFEDIKKALLSSPALGLPDITKPFELFIDENSGFAKGVLVQKLGPWKRPVAYLSKKLDTVASGWPPCLRMVAAIAILVKDAGKLTLGQPLTILTSHPVEALVRQPPNKWLSNARMTHYQAMLLDAERVHFGPTVSLNPATLLPLPSGGNHHDCLQILAETHGTRPDLTDQPLPDADLTWYTDGSSFIRNGEREAGAAVTTESEVIWAAPLPPGTSAQRAELIALTQALKMAEGKKLTVYTDSRYAFATTHVHGEIYRRRGWLTSEGKEIKNKNEILALLEALFLPKRLSIIHCPGHQKGDSPQAKGNRLADDTAKKAATETHSSLTVLPAGKRTADGSEFEKRTADGSEFESPKKKAKVE

SEQ ID NO: 1208 - protein, 2095 aa, synthetic construct
  source 1..2095: note = Description of Artificial Sequence: Synthetic polypeptide
MPAAKRVKLDGGDKKYSIGLDIGTNSVGWAVITDEYKVPSKKFKVLGNTDRHSIKKNLIGALLFDSGETAEATRLKRTARRRYTRRKNRICYLQEIFSNEMAKVDDSFFHRLEESFLVEEDKKHERHPIFGNIVDEVAYHEKYPTIYHLRKKLVDSTDKADLRLIYLALAHMIKFRGHFLIEGDLNPDNSDVDKLFIQLVQTYNQLFEENPINASGVDAKAILSARLSKSRRLENLIAQLPGEKKNGLFGNLIALSLGLTPNFKSNFDLAEDAKLQLSKDTYDDDLDNLLAQIGDQYADLFLAAKNLSDAILLSDILRVNTEITKAPLSASMIKRYDEHHQDLTLLKALVRQQLPEKYKEIFFDQSKNGYAGYIDGGASQEEFYKFIKPILEKMDGTEELLVKLNREDLLRKQRTFDNGSIPHQIHLGELHAILRRQEDFYPFLKDNREKIEKILTFRIPYYVGPLARGNSRFAWMTRKSEETITPWNFEEVVDKGASAQSFIERMTNFDKNLPNEKVLPKHSLLYEYFTVYNELTKVKYVTEGMRKPAFLSGEQKKAIVDLLFKTNRKVTVKQLKEDYFKKIECFDSVEISGVEDRFNASLGTYHDLLKIIKDKDFLDNEENEDILEDIVLTLTLFEDREMIEERLKTYAHLFDDKVMKQLKRRRYTGWGRLSRKLINGIRDKQSGKTILDFLKSDGFANRNFMQLIHDDSLTFKEDIQKAQVSGQGDSLHEHIANLAGSPAIKKGILQTVKVVDELVKVMGRHKPENIVIEMARENQTTQKGQKNSRERMKRIEEGIKELGSQILKEHPVENTQLQNEKLYLYYLQNGRDMYVDQELDINRLSDYDVDHIVPQSFLKDDSIDNKVLTRSDKARGKSDNVPSEEVVKKMKNYWRQLLNAKLITQRKFDNLTKAERGGLSELDKAGFIKRQLVETRQITKHVAQILDSRMNTKYDENDKLIREVKVITLKSKLVSDFRKDFQFYKVREINNYHHAHDAYLNAVVGTALIKKYPKLESEFVYGDYKVYDVRKMIAKSEQEIGKATAKYFFYSNIMNFFKTEITLANGEIRKRPLIETNGETGEIVWDKGRDFATVRKVLSMPQVNIVKKTEVQTGGFSKESILPKRNSDKLIARKKDWDPKKYGGFDSPTVAYSVLVVAKVEKGKSKKLKSVKELLGITIMERSSFEKNPIDFLEAKGYKEVKKDLIIKLPKYSLFELENGRKRMLASAGELQKGNELALPSKYVNFLYLASHYEKLKGSPEDNEQKQLFVEQHKHYLDEIIEQISEFSKRVILADANLDKVLSAYNKHRDKPIREQAENIIHLFTLTNLGAPAAFKYFDTTIDRKRYTSTKEVLDATLIHQSITGLYETRIDLSQLGGDGGPAPEAAAKGSSGGTLQLEEEYRLFEPESTQKQEMDIWLKNFPQAWAETGGMGTAHCQAPVLIQLKATATPISIRQYPMPHEAYQGIKPHIRRMLDQGILKPCQSPWNTPLLPVKKPGTEDYRPVQDLREVNKRVEDIHPTVPNPYNLLSTLPPSHPWYTVLDLKDAFFCLRLHSESQLLFAFEWRDPEIGLSGQLTWTRLPQGFKNSPTLFNEALHSDLADFRVRYPALVLLQYVDDLLLAAATRTECLEGTKALLETLGNKGYRASAKKAQICLQEVTYLGYSLKDGQRWLTKARKEAILSIPVPKNSRQVREFLGKAGYCRLFIPGFAELAAPLYPLTRPGTLFQWGTEQQLAFEDIKKALLSSPALGLPDITKPFELFIDENSGFAKGVLVQKLGPWKRPVAYLSKKLDTVASGWPPCLRMVAAIAILVKDAGKLTLGQPLTILTSHPVEALVRQPPNKWLSNARMTHYQAMLLDAERVHFGPTVSLNPATLLPLPSGGNHHDCLQILAETHGTRPDLTDQPLPDADLTWYTDGSSFIRNGEREAGAAVTTESEVIWAAPLPPGTSAQRAELIALTQALKMAEGKKLTVYTDSRYAFATTHVHGEIYRRRGWLTSEGKEIKNKNEILALLEALFLPKRLSIIHCPGHQKGDSPQAKGNRLADDTAKKAATETHSSLTVLPAGKRTADGSEFEKRTADGSEFESPKKKAKVE

SEQ ID NO: 1209 - protein, 2114 aa, synthetic construct
  source 1..2114: note = Description of Artificial Sequence: Synthetic polypeptide
MPAAKRVKLDGGDKKYSIGLDIGTNSVGWAVITDEYKVPSKKFKVLGNTDRHSIKKNLIGALLFDSGETAEATRLKRTARRRYTRRKNRICYLQEIFSNEMAKVDDSFFHRLEESFLVEEDKKHERHPIFGNIVDEVAYHEKYPTIYHLRKKLVDSTDKADLRLIYLALAHMIKFRGHFLIEGDLNPDNSDVDKLFIQLVQTYNQLFEENPINASGVDAKAILSARLSKSRRLENLIAQLPGEKKNGLFGNLIALSLGLTPNFKSNFDLAEDAKLQLSKDTYDDDLDNLLAQIGDQYADLFLAAKNLSDAILLSDILRVNTEITKAPLSASMIKRYDEHHQDLTLLKALVRQQLPEKYKEIFFDQSKNGYAGYIDGGASQEEFYKFIKPILEKMDGTEELLVKLNREDLLRKQRTFDNGSIPHQIHLGELHAILRRQEDFYPFLKDNREKIEKILTFRIPYYVGPLARGNSRFAWMTRKSEETITPWNFEEVVDKGASAQSFIERMTNFDKNLPNEKVLPKHSLLYEYFTVYNELTKVKYVTEGMRKPAFLSGEQKKAIVDLLFKTNRKVTVKQLKEDYFKKIECFDSVEISGVEDRFNASLGTYHDLLKIIKDKDFLDNEENEDILEDIVLTLTLFEDREMIEERLKTYAHLFDDKVMKQLKRRRYTGWGRLSRKLINGIRDKQSGKTILDFLKSDGFANRNFMQLIHDDSLTFKEDIQKAQVSGQGDSLHEHIANLAGSPAIKKGILQTVKVVDELVKVMGRHKPENIVIEMARENQTTQKGQKNSRERMKRIEEGIKELGSQILKEHPVENTQLQNEKLYLYYLQNGRDMYVDQELDINRLSDYDVDHIVPQSFLKDDSIDNKVLTRSDKARGKSDNVPSEEVVKKMKNYWRQLLNAKLITQRKFDNLTKAERGGLSELDKAGFIKRQLVETRQITKHVAQILDSRMNTKYDENDKLIREVKVITLKSKLVSDFRKDFQFYKVREINNYHHAHDAYLNAVVGTALIKKYPKLESEFVYGDYKVYDVRKMIAKSEQEIGKATAKYFFYSNIMNFFKTEITLANGEIRKRPLIETNGETGEIVWDKGRDFATVRKVLSMPQVNIVKKTEVQTGGFSKESILPKRNSDKLIARKKDWDPKKYGGFDSPTVAYSVLVVAKVEKGKSKKLKSVKELLGITIMERSSFEKNPIDFLEAKGYKEVKKDLIIKLPKYSLFELENGRKRMLASAGELQKGNELALPSKYVNFLYLASHYEKLKGSPEDNEQKQLFVEQHKHYLDEIIEQISEFSKRVILADANLDKVLSAYNKHRDKPIREQAENIIHLFTLTNLGAPAAFKYFDTTIDRKRYTSTKEVLDATLIHQSITGLYETRIDLSQLGGDGGGGGGSGGGGSGGGGSGGGGSGGGGSGGGGSGGTLQLEEEYRLFEPESTQKQEMDIWLKNFPQAWAETGGMGTAHCQAPVLIQLKATATPISIRQYPMPHEAYQGIKPHIRRMLDQGILKPCQSPWNTPLLPVKKPGTEDYRPVQDLREVNKRVEDIHPTVPNPYNLLSTLPPSHPWYTVLDLKDAFFCLRLHSESQLLFAFEWRDPEIGLSGQLTWTRLPQGFKNSPTLFNEALHSDLADFRVRYPALVLLQYVDDLLLAAATRTECLEGTKALLETLGNKGYRASAKKAQICLQEVTYLGYSLKDGQRWLTKARKEAILSIPVPKNSRQVREFLGKAGYCRLFIPGFAELAAPLYPLTRPGTLFQWGTEQQLAFEDIKKALLSSPALGLPDITKPFELFIDENSGFAKGVLVQKLGPWKRPVAYLSKKLDTVASGWPPCLRMVAAIAILVKDAGKLTLGQPLTILTSHPVEALVRQPPNKWLSNARMTHYQAMLLDAERVHFGPTVSLNPATLLPLPSGGNHHDCLQILAETHGTRPDLTDQPLPDADLTWYTDGSSFIRNGEREAGAAVTTESEVIWAAPLPPGTSAQRAELIALTQALKMAEGKKLTVYTDSRYAFATTHVHGEIYRRRGWLTSEGKEIKNKNEILALLEALFLPKRLSIIHCPGHQKGDSPQAKGNRLADDTAKKAATETHSSLTVLPAGKRTADGSEFEKRTADGSEFESPKKKAKVE

SEQ ID NO: 1210 - protein, 2095 aa, synthetic construct
  source 1..2095: note = Description of Artificial Sequence: Synthetic polypeptide
MPAAKRVKLDGGDKKYSIGLDIGTNSVGWAVITDEYKVPSKKFKVLGNTDRHSIKKNLIGALLFDSGETAEATRLKRTARRRYTRRKNRICYLQEIFSNEMAKVDDSFFHRLEESFLVEEDKKHERHPIFGNIVDEVAYHEKYPTIYHLRKKLVDSTDKADLRLIYLALAHMIKFRGHFLIEGDLNPDNSDVDKLFIQLVQTYNQLFEENPINASGVDAKAILSARLSKSRRLENLIAQLPGEKKNGLFGNLIALSLGLTPNFKSNFDLAEDAKLQLSKDTYDDDLDNLLAQIGDQYADLFLAAKNLSDAILLSDILRVNTEITKAPLSASMIKRYDEHHQDLTLLKALVRQQLPEKYKEIFFDQSKNGYAGYIDGGASQEEFYKFIKPILEKMDGTEELLVKLNREDLLRKQRTFDNGSIPHQIHLGELHAILRRQEDFYPFLKDNREKIEKILTFRIPYYVGPLARGNSRFAWMTRKSEETITPWNFEEVVDKGASAQSFIERMTNFDKNLPNEKVLPKHSLLYEYFTVYNELTKVKYVTEGMRKPAFLSGEQKKAIVDLLFKTNRKVTVKQLKEDYFKKIECFDSVEISGVEDRFNASLGTYHDLLKIIKDKDFLDNEENEDILEDIVLTLTLFEDREMIEERLKTYAHLFDDKVMKQLKRRRYTGWGRLSRKLINGIRDKQSGKTILDFLKSDGFANRNFMQLIHDDSLTFKEDIQKAQVSGQGDSLHEHIANLAGSPAIKKGILQTVKVVDELVKVMGRHKPENIVIEMARENQTTQKGQKNSRERMKRIEEGIKELGSQILKEHPVENTQLQNEKLYLYYLQNGRDMYVDQELDINRLSDYDVDHIVPQSFLKDDSIDNKVLTRSDKARGKSDNVPSEEVVKKMKNYWRQLLNAKLITQRKFDNLTKAERGGLSELDKAGFIKRQLVETRQITKHVAQILDSRMNTKYDENDKLIREVKVITLKSKLVSDFRKDFQFYKVREINNYHHAHDAYLNAVVGTALIKKYPKLESEFVYGDYKVYDVRKMIAKSEQEIGKATAKYFFYSNIMNFFKTEITLANGEIRKRPLIETNGETGEIVWDKGRDFATVRKVLSMPQVNIVKKTEVQTGGFSKESILPKRNSDKLIARKKDWDPKKYGGFDSPTVAYSVLVVAKVEKGKSKKLKSVKELLGITIMERSSFEKNPIDFLEAKGYKEVKKDLIIKLPKYSLFELENGRKRMLASAGELQKGNELALPSKYVNFLYLASHYEKLKGSPEDNEQKQLFVEQHKHYLDEIIEQISEFSKRVILADANLDKVLSAYNKHRDKPIREQAENIIHLFTLTNLGAPAAFKYFDTTIDRKRYTSTKEVLDATLIHQSITGLYETRIDLSQLGGDGGEAAAKGSSGGGGGTLQLEEEYRLFEPESTQKQEMDIWLKNFPQAWAETGGMGTAHCQAPVLIQLKATATPISIRQYPMPHEAYQGIKPHIRRMLDQGILKPCQSPWNTPLLPVKKPGTEDYRPVQDLREVNKRVEDIHPTVPNPYNLLSTLPPSHPWYTVLDLKDAFFCLRLHSESQLLFAFEWRDPEIGLSGQLTWTRLPQGFKNSPTLFNEALHSDLADFRVRYPALVLLQYVDDLLLAAATRTECLEGTKALLETLGNKGYRASAKKAQICLQEVTYLGYSLKDGQRWLTKARKEAILSIPVPKNSRQVREFLGKAGYCRLFIPGFAELAAPLYPLTRPGTLFQWGTEQQLAFEDIKKALLSSPALGLPDITKPFELFIDENSGFAKGVLVQKLGPWKRPVAYLSKKLDTVASGWPPCLRMVAAIAILVKDAGKLTLGQPLTILTSHPVEALVRQPPNKWLSNARMTHYQAMLLDAERVHFGPTVSLNPATLLPLPSGGNHHDCLQILAETHGTRPDLTDQPLPDADLTWYTDGSSFIRNGEREAGAAVTTESEVIWAAPLPPGTSAQRAELIALTQALKMAEGKKLTVYTDSRYAFATTHVHGEIYRRRGWLTSEGKEIKNKNEILALLEALFLPKRLSIIHCPGHQKGDSPQAKGNRLADDTAKKAATETHSSLTVLPAGKRTADGSEFEKRTADGSEFESPKKKAKVE

SEQ ID NO: 1211 - protein, 2090 aa, synthetic construct
  source 1..2090: note = Description of Artificial Sequence: Synthetic polypeptide
MPAAKRVKLDGGDKKYSIGLDIGTNSVGWAVITDEYKVPSKKFKVLGNTDRHSIKKNLIGALLFDSGETAEATRLKRTARRRYTRRKNRICYLQEIFSNEMAKVDDSFFHRLEESFLVEEDKKHERHPIFGNIVDEVAYHEKYPTIYHLRKKLVDSTDKADLRLIYLALAHMIKFRGHFLIEGDLNPDNSDVDKLFIQLVQTYNQLFEENPINASGVDAKAILSARLSKSRRLENLIAQLPGEKKNGLFGNLIALSLGLTPNFKSNFDLAEDAKLQLSKDTYDDDLDNLLAQIGDQYADLFLAAKNLSDAILLSDILRVNTEITKAPLSASMIKRYDEHHQDLTLLKALVRQQLPEKYKEIFFDQSKNGYAGYIDGGASQEEFYKFIKPILEKMDGTEELLVKLNREDLLRKQRTFDNGSIPHQIHLGELHAILRRQEDFYPFLKDNREKIEKILTFRIPYYVGPLARGNSRFAWMTRKSEETITPWNFEEVVDKGASAQSFIERMTNFDKNLPNEKVLPKHSLLYEYFTVYNELTKVKYVTEGMRKPAFLSGEQKKAIVDLLFKTNRKVTVKQLKEDYFKKIECFDSVEISGVEDRFNASLGTYHDLLKIIKDKDFLDNEENEDILEDIVLTLTLFEDREMIEERLKTYAHLFDDKVMKQLKRRRYTGWGRLSRKLINGIRDKQSGKTILDFLKSDGFANRNFMQLIHDDSLTFKEDIQKAQVSGQGDSLHEHIANLAGSPAIKKGILQTVKVVDELVKVMGRHKPENIVIEMARENQTTQKGQKNSRERMKRIEEGIKELGSQILKEHPVENTQLQNEKLYLYYLQNGRDMYVDQELDINRLSDYDVDHIVPQSFLKDDSIDNKVLTRSDKARGKSDNVPSEEVVKKMKNYWRQLLNAKLITQRKFDNLTKAERGGLSELDKAGFIKRQLVETRQITKHVAQILDSRMNTKYDENDKLIREVKVITLKSKLVSDFRKDFQFYKVREINNYHHAHDAYLNAVVGTALIKKYPKLESEFVYGDYKVYDVRKMIAKSEQEIGKATAKYFFYSNIMNFFKTEITLANGEIRKRPLIETNGETGEIVWDKGRDFATVRKVLSMPQVNIVKKTEVQTGGFSKESILPKRNSDKLIARKKDWDPKKYGGFDSPTVAYSVLVVAKVEKGKSKKLKSVKELLGITIMERSSFEKNPIDFLEAKGYKEVKKDLIIKLPKYSLFELENGRKRMLASAGELQKGNELALPSKYVNFLYLASHYEKLKGSPEDNEQKQLFVEQHKHYLDEIIEQISEFSKRVILADANLDKVLSAYNKHRDKPIREQAENIIHLFTLTNLGAPAAFKYFDTTIDRKRYTSTKEVLDATLIHQSITGLYETRIDLSQLGGDGGGGGGGGGGTLQLEEEYRLFEPESTQKQEMDIWLKNFPQAWAETGGMGTAHCQAPVLIQLKATATPISIRQYPMPHEAYQGIKPHIRRMLDQGILKPCQSPWNTPLLPVKKPGTEDYRPVQDLREVNKRVEDIHPTVPNPYNLLSTLPPSHPWYTVLDLKDAFFCLRLHSESQLLFAFEWRDPEIGLSGQLTWTRLPQGFKNSPTLFNEALHSDLADFRVRYPALVLLQYVDDLLLAAATRTECLEGTKALLETLGNKGYRASAKKAQICLQEVTYLGYSLKDGQRWLTKARKEAILSIPVPKNSRQVREFLGKAGYCRLFIPGFAELAAPLYPLTRPGTLFQWGTEQQLAFEDIKKALLSSPALGLPDITKPFELFIDENSGFAKGVLVQKLGPWKRPVAYLSKKLDTVASGWPPCLRMVAAIAILVKDAGKLTLGQPLTILTSHPVEALVRQPPNKWLSNARMTHYQAMLLDAERVHFGPTVSLNPATLLPLPSGGNHHDCLQILAETHGTRPDLTDQPLPDADLTWYTDGSSFIRNGEREAGAAVTTESEVIWAAPLPPGTSAQRAELIALTQALKMAEGKKLTVYTDSRYAFATTHVHGEIYRRRGWLTSEGKEIKNKNEILALLEALFLPKRLSIIHCPGHQKGDSPQAKGNRLADDTAKKAATETHSSLTVLPAGKRTADGSEFEKRTADGSEFESPKKKAKVE

SEQ ID NO: 1212 - protein, 2102 aa, synthetic construct
  source 1..2102: note = Description of Artificial Sequence: Synthetic polypeptide
MPAAKRVKLDGGDKKYSIGLDIGTNSVGWAVITDEYKVPSKKFKVLGNTDRHSIKKNLIGALLFDSGETAEATRLKRTARRRYTRRKNRICYLQEIFSNEMAKVDDSFFHRLEESFLVEEDKKHERHPIFGNIVDEVAYHEKYPTIYHLRKKLVDSTDKADLRLIYLALAHMIKFRGHFLIEGDLNPDNSDVDKLFIQLVQTYNQLFEENPINASGVDAKAILSARLSKSRRLENLIAQLPGEKKNGLFGNLIALSLGLTPNFKSNFDLAEDAKLQLSKDTYDDDLDNLLAQIGDQYADLFLAAKNLSDAILLSDILRVNTEITKAPLSASMIKRYDEHHQDLTLLKALVRQQLPEKYKEIFFDQSKNGYAGYIDGGASQEEFYKFIKPILEKMDGTEELLVKLNREDLLRKQRTFDNGSIPHQIHLGELHAILRRQEDFYPFLKDNREKIEKILTFRIPYYVGPLARGNSRFAWMTRKSEETITPWNFEEVVDKGASAQSFIERMTNFDKNLPNEKVLPKHSLLYEYFTVYNELTKVKYVTEGMRKPAFLSGEQKKAIVDLLFKTNRKVTVKQLKEDYFKKIECFDSVEISGVEDRFNASLGTYHDLLKIIKDKDFLDNEENEDILEDIVLTLTLFEDREMIEERLKTYAHLFDDKVMKQLKRRRYTGWGRLSRKLINGIRDKQSGKTILDFLKSDGFANRNFMQLIHDDSLTFKEDIQKAQVSGQGDSLHEHIANLAGSPAIKKGILQTVKVVDELVKVMGRHKPENIVIEMARENQTTQKGQKNSRERMKRIEEGIKELGSQILKEHPVENTQLQNEKLYLYYLQNGRDMYVDQELDINRLSDYDVDHIVPQSFLKDDSIDNKVLTRSDKARGKSDNVPSEEVVKKMKNYWRQLLNAKLITQRKFDNLTKAERGGLSELDKAGFIKRQLVETRQITKHVAQILDSRMNTKYDENDKLIREVKVITLKSKLVSDFRKDFQFYKVREINNYHHAHDAYLNAVVGTALIKKYPKLESEFVYGDYKVYDVRKMIAKSEQEIGKATAKYFFYSNIMNFFKTEITLANGEIRKRPLIETNGETGEIVWDKGRDFATVRKVLSMPQVNIVKKTEVQTGGFSKESILPKRNSDKLIARKKDWDPKKYGGFDSPTVAYSVLVVAKVEKGKSKKLKSVKELLGITIMERSSFEKNPIDFLEAKGYKEVKKDLIIKLPKYSLFELENGRKRMLASAGELQKGNELALPSKYVNFLYLASHYEKLKGSPEDNEQKQLFVEQHKHYLDEIIEQISEFSKRVILADANLDKVLSAYNKHRDKPIREQAENIIHLFTLTNLGAPAAFKYFDTTIDRKRYTSTKEVLDATLIHQSITGLYETRIDLSQLGGDGGGSSGSSGSSGSSGSSGSSGGTLQLEEEYRLFEPESTQKQEMDIWLKNFPQAWAETGGMGTAHCQAPVLIQLKATATPISIRQYPMPHEAYQGIKPHIRRMLDQGILKPCQSPWNTPLLPVKKPGTEDYRPVQDLREVNKRVEDIHPTVPNPYNLLSTLPPSHPWYTVLDLKDAFFCLRLHSESQLLFAFEWRDPEIGLSGQLTWTRLPQGFKNSPTLFNEALHSDLADFRVRYPALVLLQYVDDLLLAAATRTECLEGTKALLETLGNKGYRASAKKAQICLQEVTYLGYSLKDGQRWLTKARKEAILSIPVPKNSRQVREFLGKAGYCRLFIPGFAELAAPLYPLTRPGTLFQWGTEQQLAFEDIKKALLSSPALGLPDITKPFELFIDENSGFAKGVLVQKLGPWKRPVAYLSKKLDTVASGWPPCLRMVAAIAILVKDAGKLTLGQPLTILTSHPVEALVRQPPNKWLSNARMTHYQAMLLDAERVHFGPTVSLNPATLLPLPSGGNHHDCLQILAETHGTRPDLTDQPLPDADLTWYTDGSSFIRNGEREAGAAVTTESEVIWAAPLPPGTSAQRAELIALTQALKMAEGKKLTVYTDSRYAFATTHVHGEIYRRRGWLTSEGKEIKNKNEILALLEALFLPKRLSIIHCPGHQKGDSPQAKGNRLADDTAKKAATETHSSLTVLPAGKRTADGSEFEKRTADGSEFESPKKKAKVE

SEQ ID NO: 1213 - protein, 2099 aa, synthetic construct
  source 1..2099: note = Description of Artificial Sequence: Synthetic polypeptide
MPAAKRVKLDGGDKKYSIGLDIGTNSVGWAVITDEYKVPSKKFKVLGNTDRHSIKKNLIGALLFDSGETAEATRLKRTARRRYTRRKNRICYLQEIFSNEMAKVDDSFFHRLEESFLVEEDKKHERHPIFGNIVDEVAYHEKYPTIYHLRKKLVDSTDKADLRLIYLALAHMIKFRGHFLIEGDLNPDNSDVDKLFIQLVQTYNQLFEENPINASGVDAKAILSARLSKSRRLENLIAQLPGEKKNGLFGNLIALSLGLTPNFKSNFDLAEDAKLQLSKDTYDDDLDNLLAQIGDQYADLFLAAKNLSDAILLSDILRVNTEITKAPLSASMIKRYDEHHQDLTLLKALVRQQLPEKYKEIFFDQSKNGYAGYIDGGASQEEFYKFIKPILEKMDGTEELLVKLNREDLLRKQRTFDNGSIPHQIHLGELHAILRRQEDFYPFLKDNREKIEKILTFRIPYYVGPLARGNSRFAWMTRKSEETITPWNFEEVVDKGASAQSFIERMTNFDKNLPNEKVLPKHSLLYEYFTVYNELTKVKYVTEGMRKPAFLSGEQKKAIVDLLFKTNRKVTVKQLKEDYFKKIECFDSVEISGVEDRFNASLGTYHDLLKIIKDKDFLDNEENEDILEDIVLTLTLFEDREMIEERLKTYAHLFDDKVMKQLKRRRYTGWGRLSRKLINGIRDKQSGKTILDFLKSDGFANRNFMQLIHDDSLTFKEDIQKAQVSGQGDSLHEHIANLAGSPAIKKGILQTVKVVDELVKVMGRHKPENIVIEMARENQTTQKGQKNSRERMKRIEEGIKELGSQILKEHPVENTQLQNEKLYLYYLQNGRDMYVDQELDINRLSDYDVDHIVPQSFLKDDSIDNKVLTRSDKARGKSDNVPSEEVVKKMKNYWRQLLNAKLITQRKFDNLTKAERGGLSELDKAGFIKRQLVETRQITKHVAQILDSRMNTKYDENDKLIREVKVITLKSKLVSDFRKDFQFYKVREINNYHHAHDAYLNAVVGTALIKKYPKLESEFVYGDYKVYDVRKMIAKSEQEIGKATAKYFFYSNIMNFFKTEITLANGEIRKRPLIETNGETGEIVWDKGRDFATVRKVLSMPQVNIVKKTEVQTGGFSKESILPKRNSDKLIARKKDWDPKKYGGFDSPTVAYSVLVVAKVEKGKSKKLKSVKELLGITIMERSSFEKNPIDFLEAKGYKEVKKDLIIKLPKYSLFELENGRKRMLASAGELQKGNELALPSKYVNFLYLASHYEKLKGSPEDNEQKQLFVEQHKHYLDEIIEQISEFSKRVILADANLDKVLSAYNKHRDKPIREQAENIIHLFTLTNLGAPAAFKYFDTTIDRKRYTSTKEVLDATLIHQSITGLYETRIDLSQLGGDGGEAAAKEAAAKEAAAKGGTLQLEEEYRLFEPESTQKQEMDIWLKNFPQAWAETGGMGTAHCQAPVLIQLKATATPISIRQYPMPHEAYQGIKPHIRRMLDQGILKPCQSPWNTPLLPVKKPGTEDYRPVQDLREVNKRVEDIHPTVPNPYNLLSTLPPSHPWYTVLDLKDAFFCLRLHSESQLLFAFEWRDPEIGLSGQLTWTRLPQGFKNSPTLFNEALHSDLADFRVRYPALVLLQYVDDLLLAAATRTECLEGTKALLETLGNKGYRASAKKAQICLQEVTYLGYSLKDGQRWLTKARKEAILSIPVPKNSRQVREFLGKAGYCRLFIPGFAELAAPLYPLTRPGTLFQWGTEQQLAFEDIKKALLSSPALGLPDITKPFELFIDENSGFAKGVLVQKLGPWKRPVAYLSKKLDTVASGWPPCLRMVAAIAILVKDAGKLTLGQPLTILTSHPVEALVRQPPNKWLSNARMTHYQAMLLDAERVHFGPTVSLNPATLLPLPSGGNHHDCLQILAETHGTRPDLTDQPLPDADLTWYTDGSSFIRNGEREAGAAVTTESEVIWAAPLPPGTSAQRAELIALTQALKMAEGKKLTVYTDSRYAFATTHVHGEIYRRRGWLTSEGKEIKNKNEILALLEALFLPKRLSIIHCPGHQKGDSPQAKGNRLADDTAKKAATETHSSLTVLPAGKRTADGSEFEKRTADGSEFESPKKKAKVE

SEQ ID NO: 1214 - protein, 2095 aa, synthetic construct
  source 1..2095: note = Description of Artificial Sequence: Synthetic polypeptide
MPAAKRVKLDGGDKKYSIGLDIGTNSVGWAVITDEYKVPSKKFKVLGNTDRHSIKKNLIGALLFDSGETAEATRLKRTARRRYTRRKNRICYLQEIFSNEMAKVDDSFFHRLEESFLVEEDKKHERHPIFGNIVDEVAYHEKYPTIYHLRKKLVDSTDKADLRLIYLALAHMIKFRGHFLIEGDLNPDNSDVDKLFIQLVQTYNQLFEENPINASGVDAKAILSARLSKSRRLENLIAQLPGEKKNGLFGNLIALSLGLTPNFKSNFDLAEDAKLQLSKDTYDDDLDNLLAQIGDQYADLFLAAKNLSDAILLSDILRVNTEITKAPLSASMIKRYDEHHQDLTLLKALVRQQLPEKYKEIFFDQSKNGYAGYIDGGASQEEFYKFIKPILEKMDGTEELLVKLNREDLLRKQRTFDNGSIPHQIHLGELHAILRRQEDFYPFLKDNREKIEKILTFRIPYYVGPLARGNSRFAWMTRKSEETITPWNFEEVVDKGASAQSFIERMTNFDKNLPNEKVLPKHSLLYEYFTVYNELTKVKYVTEGMRKPAFLSGEQKKAIVDLLFKTNRKVTVKQLKEDYFKKIECFDSVEISGVEDRFNASLGTYHDLLKIIKDKDFLDNEENEDILEDIVLTLTLFEDREMIEERLKTYAHLFDDKVMKQLKRRRYTGWGRLSRKLINGIRDKQSGKTILDFLKSDGFANRNFMQLIHDDSLTFKEDIQKAQVSGQGDSLHEHIANLAGSPAIKKGILQTVKVVDELVKVMGRHKPENIVIEMARENQTTQKGQKNSRERMKRIEEGIKELGSQILKEHPVENTQLQNEKLYLYYLQNGRDMYVDQELDINRLSDYDVDHIVPQSFLKDDSIDNKVLTRSDKARGKSDNVPSEEVVKKMKNYWRQLLNAKLITQRKFDNLTKAERGGLSELDKAGFIKRQLVETRQITKHVAQILDSRMNTKYDENDKLIREVKVITLKSKLVSDFRKDFQFYKVREINNYHHAHDAYLNAVVGTALIKKYPKLESEFVYGDYKVYDVRKMIAKSEQEIGKATAKYFFYSNIMNFFKTEITLANGEIRKRPLIETNGETGEIVWDKGRDFATVRKVLSMPQVNIVKKTEVQTGGFSKESILPKRNSDKLIARKKDWDPKKYGGFDSPTVAYSVLVVAKVEKGKSKKLKSVKELLGITIMERSSFEKNPIDFLEAKGYKEVKKDLIIKLPKYSLFELENGRKRMLASAGELQKGNELALPSKYVNFLYLASHYEKLKGSPEDNEQKQLFVEQHKHYLDEIIEQISEFSKRVILADANLDKVLSAYNKHRDKPIREQAENIIHLFTLTNLGAPAAFKYFDTTIDRKRYTSTKEVLDATLIHQSITGLYETRIDLSQLGGDGGPAPGSSEAAAKGGTLQLEEEYRLFEPESTQKQEMDIWLKNFPQAWAETGGMGTAHCQAPVLIQLKATATPISIRQYPMPHEAYQGIKPHIRRMLDQGILKPCQSPWNTPLLPVKKPGTEDYRPVQDLREVNKRVEDIHPTVPNPYNLLSTLPPSHPWYTVLDLKDAFFCLRLHSESQLLFAFEWRDPEIGLSGQLTWTRLPQGFKNSPTLFNEALHSDLADFRVRYPALVLLQYVDDLLLAAATRTECLEGTKALLETLGNKGYRASAKKAQICLQEVTYLGYSLKDGQRWLTKARKEAILSIPVPKNSRQVREFLGKAGYCRLFIPGFAELAAPLYPLTRPGTLFQWGTEQQLAFEDIKKALLSSPALGLPDITKPFELFIDENSGFAKGVLVQKLGPWKRPVAYLSKKLDTVASGWPPCLRMVAAIAILVKDAGKLTLGQPLTILTSHPVEALVRQPPNKWLSNARMTHYQAMLLDAERVHFGPTVSLNPATLLPLPSGGNHHDCLQILAETHGTRPDLTDQPLPDADLTWYTDGSSFIRNGEREAGAAVTTESEVIWAAPLPPGTSAQRAELIALTQALKMAEGKKLTVYTDSRYAFATTHVHGEIYRRRGWLTSEGKEIKNKNEILALLEALFLPKRLSIIHCPGHQKGDSPQAKGNRLADDTAKKAATETHSSLTVLPAGKRTADGSEFEKRTADGSEFESPKKKAKVE

SEQ ID NO: 1215 - protein, 2092 aa, synthetic construct
  source 1..2092: note = Description of Artificial Sequence: Synthetic polypeptide
MPAAKRVKLDGGDKKYSIGLDIGTNSVGWAVITDEYKVPSKKFKVLGNTDRHSIKKNLIGALLFDSGETAEATRLKRTARRRYTRRKNRICYLQEIFSNEMAKVDDSFFHRLEESFLVEEDKKHERHPIFGNIVDEVAYHEKYPTIYHLRKKLVDSTDKADLRLIYLALAHMIKFRGHFLIEGDLNPDNSDVDKLFIQLVQTYNQLFEENPINASGVDAKAILSARLSKSRRLENLIAQLPGEKKNGLFGNLIALSLGLTPNFKSNFDLAEDAKLQLSKDTYDDDLDNLLAQIGDQYADLFLAAKNLSDAILLSDILRVNTEITKAPLSASMIKRYDEHHQDLTLLKALVRQQLPEKYKEIFFDQSKNGYAGYIDGGASQEEFYKFIKPILEKMDGTEELLVKLNREDLLRKQRTFDNGSIPHQIHLGELHAILRRQEDFYPFLKDNREKIEKILTFRIPYYVGPLARGNSRFAWMTRKSEETITPWNFEEVVDKGASAQSFIERMTNFDKNLPNEKVLPKHSLLYEYFTVYNELTKVKYVTEGMRKPAFLSGEQKKAIVDLLFKTNRKVTVKQLKEDYFKKIECFDSVEISGVEDRFNASLGTYHDLLKIIKDKDFLDNEENEDILEDIVLTLTLFEDREMIEERLKTYAHLFDDKVMKQLKRRRYTGWGRLSRKLINGIRDKQSGKTILDFLKSDGFANRNFMQLIHDDSLTFKEDIQKAQVSGQGDSLHEHIANLAGSPAIKKGILQTVKVVDELVKVMGRHKPENIVIEMARENQTTQKGQKNSRERMKRIEEGIKELGSQILKEHPVENTQLQNEKLYLYYLQNGRDMYVDQELDINRLSDYDVDHIVPQSFLKDDSIDNKVLTRSDKARGKSDNVPSEEVVKKMKNYWRQLLNAKLITQRKFDNLTKAERGGLSELDKAGFIKRQLVETRQITKHVAQILDSRMNTKYDENDKLIREVKVITLKSKLVSDFRKDFQFYKVREINNYHHAHDAYLNAVVGTALIKKYPKLESEFVYGDYKVYDVRKMIAKSEQEIGKATAKYFFYSNIMNFFKTEITLANGEIRKRPLIETNGETGEIVWDKGRDFATVRKVLSMPQVNIVKKTEVQTGGFSKESILPKRNSDKLIARKKDWDPKKYGGFDSPTVAYSVLVVAKVEKGKSKKLKSVKELLGITIMERSSFEKNPIDFLEAKGYKEVKKDLIIKLPKYSLFELENGRKRMLASAGELQKGNELALPSKYVNFLYLASHYEKLKGSPEDNEQKQLFVEQHKHYLDEIIEQISEFSKRVILADANLDKVLSAYNKHRDKPIREQAENIIHLFTLTNLGAPAAFKYFDTTIDRKRYTSTKEVLDATLIHQSITGLYETRIDLSQLGGDGGGGGGGGGGGGTLQLEEEYRLFEPESTQKQEMDIWLKNFPQAWAETGGMGTAHCQAPVLIQLKATATPISIRQYPMPHEAYQGIKPHIRRMLDQGILKPCQSPWNTPLLPVKKPGTEDYRPVQDLREVNKRVEDIHPTVPNPYNLLSTLPPSHPWYTVLDLKDAFFCLRLHSESQLLFAFEWRDPEIGLSGQLTWTRLPQGFKNSPTLFNEALHSDLADFRVRYPALVLLQYVDDLLLAAATRTECLEGTKALLETLGNKGYRASAKKAQICLQEVTYLGYSLKDGQRWLTKARKEAILSIPVPKNSRQVREFLGKAGYCRLFIPGFAELAAPLYPLTRPGTLFQWGTEQQLAFEDIKKALLSSPALGLPDITKPFELFIDENSGFAKGVLVQKLGPWKRPVAYLSKKLDTVASGWPPCLRMVAAIAILVKDAGKLTLGQPLTILTSHPVEALVRQPPNKWLSNARMTHYQAMLLDAERVHFGPTVSLNPATLLPLPSGGNHHDCLQILAETHGTRPDLTDQPLPDADLTWYTDGSSFIRNGEREAGAAVTTESEVIWAAPLPPGTSAQRAELIALTQALKMAEGKKLTVYTDSRYAFATTHVHGEIYRRRGWLTSEGKEIKNKNEILALLEALFLPKRLSIIHCPGHQKGDSPQAKGNRLADDTAKKAATETHSSLTVLPAGKRTADGSEFEKRTADGSEFESPKKKAKVE

SEQ ID NO: 1216 - protein, 2093 aa, synthetic construct
  source 1..2093: note = Description of Artificial Sequence: Synthetic polypeptide
MPAAKRVKLDGGDKKYSIGLDIGTNSVGWAVITDEYKVPSKKFKVLGNTDRHSIKKNLIGALLFDSGETAEATRLKRTARRRYTRRKNRICYLQEIFSNEMAKVDDSFFHRLEESFLVEEDKKHERHPIFGNIVDEVAYHEKYPTIYHLRKKLVDSTDKADLRLIYLALAHMIKFRGHFLIEGDLNPDNSDVDKLFIQLVQTYNQLFEENPINASGVDAKAILSARLSKSRRLENLIAQLPGEKKNGLFGNLIALSLGLTPNFKSNFDLAEDAKLQLSKDTYDDDLDNLLAQIGDQYADLFLAAKNLSDAILLSDILRVNTEITKAPLSASMIKRYDEHHQDLTLLKALVRQQLPEKYKEIFFDQSKNGYAGYIDGGASQEEFYKFIKPILEKMDGTEELLVKLNREDLLRKQRTFDNGSIPHQIHLGELHAILRRQEDFYPFLKDNREKIEKILTFRIPYYVGPLARGNSRFAWMTRKSEETITPWNFEEVVDKGASAQSFIERMTNFDKNLPNEKVLPKHSLLYEYFTVYNELTKVKYVTEGMRKPAFLSGEQKKAIVDLLFKTNRKVTVKQLKEDYFKKIECFDSVEISGVEDRFNASLGTYHDLLKIIKDKDFLDNEENEDILEDIVLTLTLFEDREMIEERLKTYAHLFDDKVMKQLKRRRYTGWGRLSRKLINGIRDKQSGKTILDFLKSDGFANRNFMQLIHDDSLTFKEDIQKAQVSGQGDSLHEHIANLAGSPAIKKGILQTVKVVDELVKVMGRHKPENIVIEMARENQTTQKGQKNSRERMKRIEEGIKELGSQILKEHPVENTQLQNEKLYLYYLQNGRDMYVDQELDINRLSDYDVDHIVPQSFLKDDSIDNKVLTRSDKARGKSDNVPSEEVVKKMKNYWRQLLNAKLITQRKFDNLTKAERGGLSELDKAGFIKRQLVETRQITKHVAQILDSRMNTKYDENDKLIREVKVITLKSKLVSDFRKDFQFYKVREINNYHHAHDAYLNAVVGTALIKKYPKLESEFVYGDYKVYDVRKMIAKSEQEIGKATAKYFFYSNIMNFFKTEITLANGEIRKRPLIETNGETGEIVWDKGRDFATVRKVLSMPQVNIVKKTEVQTGGFSKESILPKRNSDKLIARKKDWDPKKYGGFDSPTVAYSVLVVAKVEKGKSKKLKSVKELLGITIMERSSFEKNPIDFLEAKGYKEVKKDLIIKLPKYSLFELENGRKRMLASAGELQKGNELALPSKYVNFLYLASHYEKLKGSPEDNEQKQLFVEQHKHYLDEIIEQISEFSKRVILADANLDKVLSAYNKHRDKPIREQAENIIHLFTLTNLGAPAAFKYFDTTIDRKRYTSTKEVLDATLIHQSITGLYETRIDLSQLGGDGGPAPAPAPAPGGTLQLEEEYRLFEPESTQKQEMDIWLKNFPQAWAETGGMGTAHCQAPVLIQLKATATPISIRQYPMPHEAYQGIKPHIRRMLDQGILKPCQSPWNTPLLPVKKPGTEDYRPVQDLREVNKRVEDIHPTVPNPYNLLSTLPPSHPWYTVLDLKDAFFCLRLHSESQLLFAFEWRDPEIGLSGQLTWTRLPQGFKNSPTLFNEALHSDLADFRVRYPALVLLQYVDDLLLAAATRTECLEGTKALLETLGNKGYRASAKKAQICLQEVTYLGYSLKDGQRWLTKARKEAILSIPVPKNSRQVREFLGKAGYCRLFIPGFAELAAPLYPLTRPGTLFQWGTEQQLAFEDIKKALLSSPALGLPDITKPFELFIDENSGFAKGVLVQKLGPWKRPVAYLSKKLDTVASGWPPCLRMVAAIAILVKDAGKLTLGQPLTILTSHPVEALVRQPPNKWLSNARMTHYQAMLLDAERVHFGPTVSLNPATLLPLPSGGNHHDCLQILAETHGTRPDLTDQPLPDADLTWYTDGSSFIRNGEREAGAAVTTESEVIWAAPLPPGTSAQRAELIALTQALKMAEGKKLTVYTDSRYAFATTHVHGEIYRRRGWLTSEGKEIKNKNEILALLEALFLPKRLSIIHCPGHQKGDSPQAKGNRLADDTAKKAATETHSSLTVLPAGKRTADGSEFEKRTADGSEFESPKKKAKVE

SEQ ID NO: 1217 - protein, 2089 aa, synthetic construct
  source 1..2089: note = Description of Artificial Sequence: Synthetic polypeptide
MPAAKRVKLDGGDKKYSIGLDIGTNSVGWAVITDEYKVPSKKFKVLGNTDRHSIKKNLIGALLFDSGETAEATRLKRTARRRYTRRKNRICYLQEIFSNEMAKVDDSFFHRLEESFLVEEDKKHERHPIFGNIVDEVAYHEKYPTIYHLRKKLVDSTDKADLRLIYLALAHMIKFRGHFLIEGDLNPDNSDVDKLFIQLVQTYNQLFEENPINASGVDAKAILSARLSKSRRLENLIAQLPGEKKNGLFGNLIALSLGLTPNFKSNFDLAEDAKLQLSKDTYDDDLDNLLAQIGDQYADLFLAAKNLSDAILLSDILRVNTEITKAPLSASMIKRYDEHHQDLTLLKALVRQQLPEKYKEIFFDQSKNGYAGYIDGGASQEEFYKFIKPILEKMDGTEELLVKLNREDLLRKQRTFDNGSIPHQIHLGELHAILRRQEDFYPFLKDNREKIEKILTFRIPYYVGPLARGNSRFAWMTRKSEETITPWNFEEVVDKGASAQSFIERMTNFDKNLPNEKVLPKHSLLYEYFTVYNELTKVKYVTEGMRKPAFLSGEQKKAIVDLLFKTNRKVTVKQLKEDYFKKIECFDSVEISGVEDRFNASLGTYHDLLKIIKDKDFLDNEENEDILEDIVLTLTLFEDREMIEERLKTYAHLFDDKVMKQLKRRRYTGWGRLSRKLINGIRDKQSGKTILDFLKSDGFANRNFMQLIHDDSLTFKEDIQKAQVSGQGDSLHEHIANLAGSPAIKKGILQTVKVVDELVKVMGRHKPENIVIEMARENQTTQKGQKNSRERMKRIEEGIKELGSQILKEHPVENTQLQNEKLYLYYLQNGRDMYVDQELDINRLSDYDVDHIVPQSFLKDDSIDNKVLTRSDKARGKSDNVPSEEVVKKMKNYWRQLLNAKLITQRKFDNLTKAERGGLSELDKAGFIKRQLVETRQITKHVAQILDSRMNTKYDENDKLIREVKVITLKSKLVSDFRKDFQFYKVREINNYHHAHDAYLNAVVGTALIKKYPKLESEFVYGDYKVYDVRKMIAKSEQEIGKATAKYFFYSNIMNFFKTEITLANGEIRKRPLIETNGETGEIVWDKGRDFATVRKVLSMPQVNIVKKTEVQTGGFSKESILPKRNSDKLIARKKDWDPKKYGGFDSPTVAYSVLVVAKVEKGKSKKLKSVKELLGITIMERSSFEKNPIDFLEAKGYKEVKKDLIIKLPKYSLFELENGRKRMLASAGELQKGNELALPSKYVNFLYLASHYEKLKGSPEDNEQKQLFVEQHKHYLDEIIEQISEFSKRVILADANLDKVLSAYNKHRDKPIREQAENIIHLFTLTNLGAPAAFKYFDTTIDRKRYTSTKEVLDATLIHQSITGLYETRIDLSQLGGDGGGGGGGGGTLQLEEEYRLFEPESTQKQEMDIWLKNFPQAWAETGGMGTAHCQAPVLIQLKATATPISIRQYPMPHEAYQGIKPHIRRMLDQGILKPCQSPWNTPLLPVKKPGTEDYRPVQDLREVNKRVEDIHPTVPNPYNLLSTLPPSHPWYTVLDLKDAFFCLRLHSESQLLFAFEWRDPEIGLSGQLTWTRLPQGFKNSPTLFNEALHSDLADFRVRYPALVLLQYVDDLLLAAATRTECLEGTKALLETLGNKGYRASAKKAQICLQEVTYLGYSLKDGQRWLTKARKEAILSIPVPKNSRQVREFLGKAGYCRLFIPGFAELAAPLYPLTRPGTLFQWGTEQQLAFEDIKKALLSSPALGLPDITKPFELFIDENSGFAKGVLVQKLGPWKRPVAYLSKKLDTVASGWPPCLRMVAAIAILVKDAGKLTLGQPLTILTSHPVEALVRQPPNKWLSNARMTHYQAMLLDAERVHFGPTVSLNPATLLPLPSGGNHHDCLQILAETHGTRPDLTDQPLPDADLTWYTDGSSFIRNGEREAGAAVTTESEVIWAAPLPPGTSAQRAELIALTQALKMAEGKKLTVYTDSRYAFATTHVHGEIYRRRGWLTSEGKEIKNKNEILALLEALFLPKRLSIIHCPGHQKGDSPQAKGNRLADDTAKKAATETHSSLTVLPAGKRTADGSEFEKRTADGSEFESPKKKAKVE

SEQ ID NO: 1218 - protein, 2095 aa, synthetic construct
  source 1..2095: note = Description of Artificial Sequence: Synthetic polypeptide
MPAAKRVKLDGGDKKYSIGLDIGTNSVGWAVITDEYKVPSKKFKVLGNTDRHSIKKNLIGALLFDSGETAEATRLKRTARRRYTRRKNRICYLQEIFSNEMAKVDDSFFHRLEESFLVEEDKKHERHPIFGNIVDEVAYHEKYPTIYHLRKKLVDSTDKADLRLIYLALAHMIKFRGHFLIEGDLNPDNSDVDKLFIQLVQTYNQLFEENPINASGVDAKAILSARLSKSRRLENLIAQLPGEKKNGLFGNLIALSLGLTPNFKSNFDLAEDAKLQLSKDTYDDDLDNLLAQIGDQYADLFLAAKNLSDAILLSDILRVNTEITKAPLSASMIKRYDEHHQDLTLLKALVRQQLPEKYKEIFFDQSKNGYAGYIDGGASQEEFYKFIKPILEKMDGTEELLVKLNREDLLRKQRTFDNGSIPHQIHLGELHAILRRQEDFYPFLKDNREKIEKILTFRIPYYVGPLARGNSRFAWMTRKSEETITPWNFEEVVDKGASAQSFIERMTNFDKNLPNEKVLPKHSLLYEYFTVYNELTKVKYVTEGMRKPAFLSGEQKKAIVDLLFKTNRKVTVKQLKEDYFKKIECFDSVEISGVEDRFNASLGTYHDLLKIIKDKDFLDNEENEDILEDIVLTLTLFEDREMIEERLKTYAHLFDDKVMKQLKRRRYTGWGRLSRKLINGIRDKQSGKTILDFLKSDGFANRNFMQLIHDDSLTFKEDIQKAQVSGQGDSLHEHIANLAGSPAIKKGILQTVKVVDELVKVMGRHKPENIVIEMARENQTTQKGQKNSRERMKRIEEGIKELGSQILKEHPVENTQLQNEKLYLYYLQNGRDMYVDQELDINRLSDYDVDHIVPQSFLKDDSIDNKVLTRSDKARGKSDNVPSEEVVKKMKNYWRQLLNAKLITQRKFDNLTKAERGGLSELDKAGFIKRQLVETRQITKHVAQILDSRMNTKYDENDKLIREVKVITLKSKLVSDFRKDFQFYKVREINNYHHAHDAYLNAVVGTALIKKYPKLESEFVYGDYKVYDVRKMIAKSEQEIGKATAKYFFYSNIMNFFKTEITLANGEIRKRPLIETNGETGEIVWDKGRDFATVRKVLSMPQVNIVKKTEVQTGGFSKESILPKRNSDKLIARKKDWDPKKYGGFDSPTVAYSVLVVAKVEKGKSKKLKSVKELLGITIMERSSFEKNPIDFLEAKGYKEVKKDLIIKLPKYSLFELENGRKRMLASAGELQKGNELALPSKYVNFLYLASHYEKLKGSPEDNEQKQLFVEQHKHYLDEIIEQISEFSKRVILADANLDKVLSAYNKHRDKPIREQAENIIHLFTLTNLGAPAAFKYFDTTIDRKRYTSTKEVLDATLIHQSITGLYETRIDLSQLGGDGGGSSEAAAKPAPGGTLQLEEEYRLFEPESTQKQEMDIWLKNFPQAWAETGGMGTAHCQAPVLIQLKATATPISIRQYPMPHEAYQGIKPHIRRMLDQGILKPCQSPWNTPLLPVKKPGTEDYRPVQDLREVNKRVEDIHPTVPNPYNLLSTLPPSHPWYTVLDLKDAFFCLRLHSESQLLFAFEWRDPEIGLSGQLTWTRLPQGFKNSPTLFNEALHSDLADFRVRYPALVLLQYVDDLLLAAATRTECLEGTKALLETLGNKGYRASAKKAQICLQEVTYLGYSLKDGQRWLTKARKEAILSIPVPKNSRQVREFLGKAGYCRLFIPGFAELAAPLYPLTRPGTLFQWGTEQQLAFEDIKKALLSSPALGLPDITKPFELFIDENSGFAKGVLVQKLGPWKRPVAYLSKKLDTVASGWPPCLRMVAAIAILVKDAGKLTLGQPLTILTSHPVEALVRQPPNKWLSNARMTHYQAMLLDAERVHFGPTVSLNPATLLPLPSGGNHHDCLQILAETHGTRPDLTDQPLPDADLTWYTDGSSFIRNGEREAGAAVTTESEVIWAAPLPPGTSAQRAELIALTQALKMAEGKKLTVYTDSRYAFATTHVHGEIYRRRGWLTSEGKEIKNKNEILALLEALFLPKRLSIIHCPGHQKGDSPQAKGNRLADDTAKKAATETHSSLTVLPAGKRTADGSEFEKRTADGSEFESPKKKAKVE

SEQ ID NO: 1219 - protein, 2097 aa, synthetic construct
  source 1..2097: note = Description of Artificial Sequence: Synthetic polypeptide
MPAAKRVKLDGGDKKYSIGLDIGTNSVGWAVITDEYKVPSKKFKVLGNTDRHSIKKNLIGALLFDSGETAEATRLKRTARRRYTRRKNRICYLQEIFSNEMAKVDDSFFHRLEESFLVEEDKKHERHPIFGNIVDEVAYHEKYPTIYHLRKKLVDSTDKADLRLIYLALAHMIKFRGHFLIEGDLNPDNSDVDKLFIQLVQTYNQLFEENPINASGVDAKAILSARLSKSRRLENLIAQLPGEKKNGLFGNLIALSLGLTPNFKSNFDLAEDAKLQLSKDTYDDDLDNLLAQIGDQYADLFLAAKNLSDAILLSDILRVNTEITKAPLSASMIKRYDEHHQDLTLLKALVRQQLPEKYKEIFFDQSKNGYAGYIDGGASQEEFYKFIKPILEKMDGTEELLVKLNREDLLRKQRTFDNGSIPHQIHLGELHAILRRQEDFYPFLKDNREKIEKILTFRIPYYVGPLARGNSRFAWMTRKSEETITPWNFEEVVDKGASAQSFIERMTNFDKNLPNEKVLPKHSLLYEYFTVYNELTKVKYVTEGMRKPAFLSGEQKKAIVDLLFKTNRKVTVKQLKEDYFKKIECFDSVEISGVEDRFNASLGTYHDLLKIIKDKDFLDNEENEDILEDIVLTLTLFEDREMIEERLKTYAHLFDDKVMKQLKRRRYTGWGRLSRKLINGIRDKQSGKTILDFLKSDGFANRNFMQLIHDDSLTFKEDIQKAQVSGQGDSLHEHIANLAGSPAIKKGILQTVKVVDELVKVMGRHKPENIVIEMARENQTTQKGQKNSRERMKRIEEGIKELGSQILKEHPVENTQLQNEKLYLYYLQNGRDMYVDQELDINRLSDYDVDHIVPQSFLKDDSIDNKVLTRSDKARGKSDNVPSEEVVKKMKNYWRQLLNAKLITQRKFDNLTKAERGGLSELDKAGFIKRQLVETRQITKHVAQILDSRMNTKYDENDKLIREVKVITLKSKLVSDFRKDFQFYKVREINNYHHAHDAYLNAVVGTALIKKYPKLESEFVYGDYKVYDVRKMIAKSEQEIGKATAKYFFYSNIMNFFKTEITLANGEIRKRPLIETNGETGEIVWDKGRDFATVRKVLSMPQVNIVKKTEVQTGGFSKESILPKRNSDKLIARKKDWDPKKYGGFDSPTVAYSVLVVAKVEKGKSKKLKSVKELLGITIMERSSFEKNPIDFLEAKGYKEVKKDLIIKLPKYSLFELENGRKRMLASAGELQKGNELALPSKYVNFLYLASHYEKLKGSPEDNEQKQLFVEQHKHYLDEIIEQISEFSKRVILADANLDKVLSAYNKHRDKPIREQAENIIHLFTLTNLGAPAAFKYFDTTIDRKRYTSTKEVLDATLIHQSITGLYETRIDLSQLGGDGGPAPAPAPAPAPAPGGTLQLEEEYRLFEPESTQKQEMDIWLKNFPQAWAETGGMGTAHCQAPVLIQLKATATPISIRQYPMPHEAYQGIKPHIRRMLDQGILKPCQSPWNTPLLPVKKPGTEDYRPVQDLREVNKRVEDIHPTVPNPYNLLSTLPPSHPWYTVLDLKDAFFCLRLHSESQLLFAFEWRDPEIGLSGQLTWTRLPQGFKNSPTLFNEALHSDLADFRVRYPALVLLQYVDDLLLAAATRTECLEGTKALLETLGNKGYRASAKKAQICLQEVTYLGYSLKDGQRWLTKARKEAILSIPVPKNSRQVREFLGKAGYCRLFIPGFAELAAPLYPLTRPGTLFQWGTEQQLAFEDIKKALLSSPALGLPDITKPFELFIDENSGFAKGVLVQKLGPWKRPVAYLSKKLDTVASGWPPCLRMVAAIAILVKDAGKLTLGQPLTILTSHPVEALVRQPPNKWLSNARMTHYQAMLLDAERVHFGPTVSLNPATLLPLPSGGNHHDCLQILAETHGTRPDLTDQPLPDADLTWYTDGSSFIRNGEREAGAAVTTESEVIWAAPLPPGTSAQRAELIALTQALKMAEGKKLTVYTDSRYAFATTHVHGEIYRRRGWLTSEGKEIKNKNEILALLEALFLPKRLSIIHCPGHQKGDSPQAKGNRLADDTAKKAATETHSSLTVLPAGKRTADGSEFEKRTADGSEFESPKKKAKVE

SEQ ID NO: 1220 - protein, 2095 aa, synthetic construct
  source 1..2095: note = Description of Artificial Sequence: Synthetic polypeptide
MPAAKRVKLDGGDKKYSIGLDIGTNSVGWAVITDEYKVPSKKFKVLGNTDRHSIKKNLIGALLFDSGETAEATRLKRTARRRYTRRKNRICYLQEIFSNEMAKVDDSFFHRLEESFLVEEDKKHERHPIFGNIVDEVAYHEKYPTIYHLRKKLVDSTDKADLRLIYLALAHMIKFRGHFLIEGDLNPDNSDVDKLFIQLVQTYNQLFEENPINASGVDAKAILSARLSKSRRLENLIAQLPGEKKNGLFGNLIALSLGLTPNFKSNFDLAEDAKLQLSKDTYDDDLDNLLAQIGDQYADLFLAAKNLSDAILLSDILRVNTEITKAPLSASMIKRYDEHHQDLTLLKALVRQQLPEKYKEIFFDQSKNGYAGYIDGGASQEEFYKFIKPILEKMDGTEELLVKLNREDLLRKQRTFDNGSIPHQIHLGELHAILRRQEDFYPFLKDNREKIEKILTFRIPYYVGPLARGNSRFAWMTRKSEETITPWNFEEVVDKGASAQSFIERMTNFDKNLPNEKVLPKHSLLYEYFTVYNELTKVKYVTEGMRKPAFLSGEQKKAIVDLLFKTNRKVTVKQLKEDYFKKIECFDSVEISGVEDRFNASLGTYHDLLKIIKDKDFLDNEENEDILEDIVLTLTLFEDREMIEERLKTYAHLFDDKVMKQLKRRRYTGWGRLSRKLINGIRDKQSGKTILDFLKSDGFANRNFMQLIHDDSLTFKEDIQKAQVSGQGDSLHEHIANLAGSPAIKKGILQTVKVVDELVKVMGRHKPENIVIEMARENQTTQKGQKNSRERMKRIEEGIKELGSQILKEHPVENTQLQNEKLYLYYLQNGRDMYVDQELDINRLSDYDVDHIVPQSFLKDDSIDNKVLTRSDKARGKSDNVPSEEVVKKMKNYWRQLLNAKLITQRKFDNLTKAERGGLSELDKAGFIKRQLVETRQITKHVAQILDSRMNTKYDENDKLIREVKVITLKSKLVSDFRKDFQFYKVREINNYHHAHDAYLNAVVGTALIKKYPKLESEFVYGDYKVYDVRKMIAKSEQEIGKATAKYFFYSNIMNFFKTEITLANGEIRKRPLIETNGETGEIVWDKGRDFATVRKVLSMPQVNIVKKTEVQTGGFSKESILPKRNSDKLIARKKDWDPKKYGGFDSPTVAYSVLVVAKVEKGKSKKLKSVKELLGITIMERSSFEKNPIDFLEAKGYKEVKKDLIIKLPKYSLFELENGRKRMLASAGELQKGNELALPSKYVNFLYLASHYEKLKGSPEDNEQKQLFVEQHKHYLDEIIEQISEFSKRVILADANLDKVLSAYNKHRDKPIREQAENIIHLFTLTNLGAPAAFKYFDTTIDRKRYTSTKEVLDATLIHQSITGLYETRIDLSQLGGDGGGGSGSSEAAAKGGTLQLEEEYRLFEPESTQKQEMDIWLKNFPQAWAETGGMGTAHCQAPVLIQLKATATPISIRQYPMPHEAYQGIKPHIRRMLDQGILKPCQSPWNTPLLPVKKPGTEDYRPVQDLREVNKRVEDIHPTVPNPYNLLSTLPPSHPWYTVLDLKDAFFCLRLHSESQLLFAFEWRDPEIGLSGQLTWTRLPQGFKNSPTLFNEALHSDLADFRVRYPALVLLQYVDDLLLAAATRTECLEGTKALLETLGNKGYRASAKKAQICLQEVTYLGYSLKDGQRWLTKARKEAILSIPVPKNSRQVREFLGKAGYCRLFIPGFAELAAPLYPLTRPGTLFQWGTEQQLAFEDIKKALLSSPALGLPDITKPFELFIDENSGFAKGVLVQKLGPWKRPVAYLSKKLDTVASGWPPCLRMVAAIAILVKDAGKLTLGQPLTILTSHPVEALVRQPPNKWLSNARMTHYQAMLLDAERVHFGPTVSLNPATLLPLPSGGNHHDCLQILAETHGTRPDLTDQPLPDADLTWYTDGSSFIRNGEREAGAAVTTESEVIWAAPLPPGTSAQRAELIALTQALKMAEGKKLTVYTDSRYAFATTHVHGEIYRRRGWLTSEGKEIKNKNEILALLEALFLPKRLSIIHCPGHQKGDSPQAKGNRLADDTAKKAATETHSSLTVLPAGKRTADGSEFEKRTADGSEFESPKKKAKVE

SEQ ID NO: 1221 - protein, 2095 aa, synthetic construct
  source 1..2095: note = Description of Artificial Sequence: Synthetic polypeptide
MPAAKRVKLDGGDKKYSIGLDIGTNSVGWAVITDEYKVPSKKFKVLGNTDRHSIKKNLIGALLFDSGETAEATRLKRTARRRYTRRKNRICYLQEIFSNEMAKVDDSFFHRLEESFLVEEDKKHERHPIFGNIVDEVAYHEKYPTIYHLRKKLVDSTDKADLRLIYLALAHMIKFRGHFLIEGDLNPDNSDVDKLFIQLVQTYNQLFEENPINASGVDAKAILSARLSKSRRLENLIAQLPGEKKNGLFGNLIALSLGLTPNFKSNFDLAEDAKLQLSKDTYDDDLDNLLAQIGDQYADLFLAAKNLSDAILLSDILRVNTEITKAPLSASMIKRYDEHHQDLTLLKALVRQQLPEKYKEIFFDQSKNGYAGYIDGGASQEEFYKFIKPILEKMDGTEELLVKLNREDLLRKQRTFDNGSIPHQIHLGELHAILRRQEDFYPFLKDNREKIEKILTFRIPYYVGPLARGNSRFAWMTRKSEETITPWNFEEVVDKGASAQSFIERMTNFDKNLPNEKVLPKHSLLYEYFTVYNELTKVKYVTEGMRKPAFLSGEQKKAIVDLLFKTNRKVTVKQLKEDYFKKIECFDSVEISGVEDRFNASLGTYHDLLKIIKDKDFLDNEENEDILEDIVLTLTLFEDREMIEERLKTYAHLFDDKVMKQLKRRRYTGWGRLSRKLINGIRDKQSGKTILDFLKSDGFANRNFMQLIHDDSLTFKEDIQKAQVSGQGDSLHEHIANLAGSPAIKKGILQTVKVVDELVKVMGRHKPENIVIEMARENQTTQKGQKNSRERMKRIEEGIKELGSQILKEHPVENTQLQNEKLYLYYLQNGRDMYVDQELDINRLSDYDVDHIVPQSFLKDDSIDNKVLTRSDKARGKSDNVPSEEVVKKMKNYWRQLLNAKLITQRKFDNLTKAERGGLSELDKAGFIKRQLVETRQITKHVAQILDSRMNTKYDENDKLIREVKVITLKSKLVSDFRKDFQFYKVREINNYHHAHDAYLNAVVGTALIKKYPKLESEFVYGDYKVYDVRKMIAKSEQEIGKATAKYFFYSNIMNFFKTEITLANGEIRKRPLIETNGETGEIVWDKGRDFATVRKVLSMPQVNIVKKTEVQTGGFSKESILPKRNSDKLIARKKDWDPKKYGGFDSPTVAYSVLVVAKVEKGKSKKLKSVKELLGITIMERSSFEKNPIDFLEAKGYKEVKKDLIIKLPKYSLFELENGRKRMLASAGELQKGNELALPSKYVNFLYLASHYEKLKGSPEDNEQKQLFVEQHKHYLDEIIEQISEFSKRVILADANLDKVLSAYNKHRDKPIREQAENIIHLFTLTNLGAPAAFKYFDTTIDRKRYTSTKEVLDATLIHQSITGLYETRIDLSQLGGDGGGGGPAPEAAAKGGTLQLEEEYRLFEPESTQKQEMDIWLKNFPQAWAETGGMGTAHCQAPVLIQLKATATPISIRQYPMPHEAYQGIKPHIRRMLDQGILKPCQSPWNTPLLPVKKPGTEDYRPVQDLREVNKRVEDIHPTVPNPYNLLSTLPPSHPWYTVLDLKDAFFCLRLHSESQLLFAFEWRDPEIGLSGQLTWTRLPQGFKNSPTLFNEALHSDLADFRVRYPALVLLQYVDDLLLAAATRTECLEGTKALLETLGNKGYRASAKKAQICLQEVTYLGYSLKDGQRWLTKARKEAILSIPVPKNSRQVREFLGKAGYCRLFIPGFAELAAPLYPLTRPGTLFQWGTEQQLAFEDIKKALLSSPALGLPDITKPFELFIDENSGFAKGVLVQKLGPWKRPVAYLSKKLDTVASGWPPCLRMVAAIAILVKDAGKLTLGQPLTILTSHPVEALVRQPPNKWLSNARMTHYQAMLLDAERVHFGPTVSLNPATLLPLPSGGNHHDCLQILAETHGTRPDLTDQPLPDADLTWYTDGSSFIRNGEREAGAAVTTESEVIWAAPLPPGTSAQRAELIALTQALKMAEGKKLTVYTDSRYAFATTHVHGEIYRRRGWLTSEGKEIKNKNEILALLEALFLPKRLSIIHCPGHQKGDSPQAKGNRLADDTAKKAATETHSSLTVLPAGKRTADGSEFEKRTADGSEFESPKKKAKVE

SEQ ID NO: 1222 - protein, 2117 aa, synthetic construct
  source 1..2117: note = Description of Artificial Sequence: Synthetic polypeptide
MPAAKRVKLDGGDKKYSIGLDIGTNSVGWAVITDEYKVPSKKFKVLGNTDRHSIKKNLIGALLFDSGETAEATRLKRTARRRYTRRKNRICYLQEIFSNEMAKVDDSFFHRLEESFLVEEDKKHERHPIFGNIVDEVAYHEKYPTIYHLRKKLVDSTDKADLRLIYLALAHMIKFRGHFLIEGDLNPDNSDVDKLFIQLVQTYNQLFEENPINASGVDAKAILSARLSKSRRLENLIAQLPGEKKNGLFGNLIALSLGLTPNFKSNFDLAEDAKLQLSKDTYDDDLDNLLAQIGDQYADLFLAAKNLSDAILLSDILRVNTEITKAPLSASMIKRYDEHHQDLTLLKALVRQQLPEKYKEIFFDQSKNGYAGYIDGGASQEEFYKFIKPILEKMDGTEELLVKLNREDLLRKQRTFDNGSIPHQIHLGELHAILRRQEDFYPFLKDNREKIEKILTFRIPYYVGPLARGNSRFAWMTRKSEETITPWNFEEVVDKGASAQSFIERMTNFDKNLPNEKVLPKHSLLYEYFTVYNELTKVKYVTEGMRKPAFLSGEQKKAIVDLLFKTNRKVTVKQLKEDYFKKIECFDSVEISGVEDRFNASLGTYHDLLKIIKDKDFLDNEENEDILEDIVLTLTLFEDREMIEERLKTYAHLFDDKVMKQLKRRRYTGWGRLSRKLINGIRDKQSGKTILDFLKSDGFANRNFMQLIHDDSLTFKEDIQKAQVSGQGDSLHEHIANLAGSPAIKKGILQTVKVVDELVKVMGRHKPENIVIEMARENQTTQKGQKNSRERMKRIEEGIKELGSQILKEHPVENTQLQNEKLYLYYLQNGRDMYVDQELDINRLSDYDVDHIVPQSFLKDDSIDNKVLTRSDKARGKSDNVPSEEVVKKMKNYWRQLLNAKLITQRKFDNLTKAERGGLSELDKAGFIKRQLVETRQITKHVAQILDSRMNTKYDENDKLIREVKVITLKSKLVSDFRKDFQFYKVREINNYHHAHDAYLNAVVGTALIKKYPKLESEFVYGDYKVYDVRKMIAKSEQEIGKATAKYFFYSNIMNFFKTEITLANGEIRKRPLIETNGETGEIVWDKGRDFATVRKVLSMPQVNIVKKTEVQTGGFSKESILPKRNSDKLIARKKDWDPKKYGGFDSPTVAYSVLVVAKVEKGKSKKLKSVKELLGITIMERSSFEKNPIDFLEAKGYKEVKKDLIIKLPKYSLFELENGRKRMLASAGELQKGNELALPSKYVNFLYLASHYEKLKGSPEDNEQKQLFVEQHKHYLDEIIEQISEFSKRVILADANLDKVLSAYNKHRDKPIREQAENIIHLFTLTNLGAPAAFKYFDTTIDRKRYTSTKEVLDATLIHQSITGLYETRIDLSQLGGDGGSGGSSGGSSGSETPGTSESATPESSGGSSGGSSGGTLQLEEEYRLFEPESTQKQEMDIWLKNFPQAWAETGGMGTAHCQAPVLIQLKATATPISIRQYPMPHEAYQGIKPHIRRMLDQGILKPCQSPWNTPLLPVKKPGTEDYRPVQDLREVNKRVEDIHPTVPNPYNLLSTLPPSHPWYTVLDLKDAFFCLRLHSESQLLFAFEWRDPEIGLSGQLTWTRLPQGFKNSPTLFNEALHSDLADFRVRYPALVLLQYVDDLLLAAATRTECLEGTKALLETLGNKGYRASAKKAQICLQEVTYLGYSLKDGQRWLTKARKEAILSIPVPKNSRQVREFLGKAGYCRLFIPGFAELAAPLYPLTRPGTLFQWGTEQQLAFEDIKKALLSSPALGLPDITKPFELFIDENSGFAKGVLVQKLGPWKRPVAYLSKKLDTVASGWPPCLRMVAAIAILVKDAGKLTLGQPLTILTSHPVEALVRQPPNKWLSNARMTHYQAMLLDAERVHFGPTVSLNPATLLPLPSGGNHHDCLQILAETHGTRPDLTDQPLPDADLTWYTDGSSFIRNGEREAGAAVTTESEVIWAAPLPPGTSAQRAELIALTQALKMAEGKKLTVYTDSRYAFATTHVHGEIYRRRGWLTSEGKEIKNKNEILALLEALFLPKRLSIIHCPGHQKGDSPQAKGNRLADDTAKKAATETHSSLTVLPAGKRTADGSEFEKRTADGSEFESPKKKAKVE

SEQ ID NO: 1223 - protein, 2087 aa, synthetic construct
  source 1..2087: note = Description of Artificial Sequence: Synthetic polypeptide
MPAAKRVKLDGGDKKYSIGLDIGTNSVGWAVITDEYKVPSKKFKVLGNTDRHSIKKNLIGALLFDSGETAEATRLKRTARRRYTRRKNRICYLQEIFSNEMAKVDDSFFHRLEESFLVEEDKKHERHPIFGNIVDEVAYHEKYPTIYHLRKKLVDSTDKADLRLIYLALAHMIKFRGHFLIEGDLNPDNSDVDKLFIQLVQTYNQLFEENPINASGVDAKAILSARLSKSRRLENLIAQLPGEKKNGLFGNLIALSLGLTPNFKSNFDLAEDAKLQLSKDTYDDDLDNLLAQIGDQYADLFLAAKNLSDAILLSDILRVNTEITKAPLSASMIKRYDEHHQDLTLLKALVRQQLPEKYKEIFFDQSKNGYAGYIDGGASQEEFYKFIKPILEKMDGTEELLVKLNREDLLRKQRTFDNGSIPHQIHLGELHAILRRQEDFYPFLKDNREKIEKILTFRIPYYVGPLARGNSRFAWMTRKSEETITPWNFEEVVDKGASAQSFIERMTNFDKNLPNEKVLPKHSLLYEYFTVYNELTKVKYVTEGMRKPAFLSGEQKKAIVDLLFKTNRKVTVKQLKEDYFKKIECFDSVEISGVEDRFNASLGTYHDLLKIIKDKDFLDNEENEDILEDIVLTLTLFEDREMIEERLKTYAHLFDDKVMKQLKRRRYTGWGRLSRKLINGIRDKQSGKTILDFLKSDGFANRNFMQLIHDDSLTFKEDIQKAQVSGQGDSLHEHIANLAGSPAIKKGILQTVKVVDELVKVMGRHKPENIVIEMARENQTTQKGQKNSRERMKRIEEGIKELGSQILKEHPVENTQLQNEKLYLYYLQNGRDMYVDQELDINRLSDYDVDHIVPQSFLKDDSIDNKVLTRSDKARGKSDNVPSEEVVKKMKNYWRQLLNAKLITQRKFDNLTKAERGGLSELDKAGFIKRQLVETRQITKHVAQILDSRMNTKYDENDKLIREVKVITLKSKLVSDFRKDFQFYKVREINNYHHAHDAYLNAVVGTALIKKYPKLESEFVYGDYKVYDVRKMIAKSEQEIGKATAKYFFYSNIMNFFKTEITLANGEIRKRPLIETNGETGEIVWDKGRDFATVRKVLSMPQVNIVKKTEVQTGGFSKESILPKRNSDKLIARKKDWDPKKYGGFDSPTVAYSVLVVAKVEKGKSKKLKSVKELLGITIMERSSFEKNPIDFLEAKGYKEVKKDLIIKLPKYSLFELENGRKRMLASAGELQKGNELALPSKYVNFLYLASHYEKLKGSPEDNEQKQLFVEQHKHYLDEIIEQISEFSKRVILADANLDKVLSAYNKHRDKPIREQAENIIHLFTLTNLGAPAAFKYFDTTIDRKRYTSTKEVLDATLIHQSITGLYETRIDLSQLGGDGGPAPGGTLQLEEEYRLFEPESTQKQEMDIWLKNFPQAWAETGGMGTAHCQAPVLIQLKATATPISIRQYPMPHEAYQGIKPHIRRMLDQGILKPCQSPWNTPLLPVKKPGTEDYRPVQDLREVNKRVEDIHPTVPNPYNLLSTLPPSHPWYTVLDLKDAFFCLRLHSESQLLFAFEWRDPEIGLSGQLTWTRLPQGFKNSPTLFNEALHSDLADFRVRYPALVLLQYVDDLLLAAATRTECLEGTKALLETLGNKGYRASAKKAQICLQEVTYLGYSLKDGQRWLTKARKEAILSIPVPKNSRQVREFLGKAGYCRLFIPGFAELAAPLYPLTRPGTLFQWGTEQQLAFEDIKKALLSSPALGLPDITKPFELFIDENSGFAKGVLVQKLGPWKRPVAYLSKKLDTVASGWPPCLRMVAAIAILVKDAGKLTLGQPLTILTSHPVEALVRQPPNKWLSNARMTHYQAMLLDAERVHFGPTVSLNPATLLPLPSGGNHHDCLQILAETHGTRPDLTDQPLPDADLTWYTDGSSFIRNGEREAGAAVTTESEVIWAAPLPPGTSAQRAELIALTQALKMAEGKKLTVYTDSRYAFATTHVHGEIYRRRGWLTSEGKEIKNKNEILALLEALFLPKRLSIIHCPGHQKGDSPQAKGNRLADDTAKKAATETHSSLTVLPAGKRTADGSEFEKRTADGSEFESPKKKAKVE

SEQ ID NO: 1224 - protein, 2093 aa, synthetic construct
  source 1..2093: note = Description of Artificial Sequence: Synthetic polypeptide
MPAAKRVKLDGGDKKYSIGLDIGTNSVGWAVITDEYKVPSKKFKVLGNTDRHSIKKNLIGALLFDSGETAEATRLKRTARRRYTRRKNRICYLQEIFSNEMAKVDDSFFHRLEESFLVEEDKKHERHPIFGNIVDEVAYHEKYPTIYHLRKKLVDSTDKADLRLIYLALAHMIKFRGHFLIEGDLNPDNSDVDKLFIQLVQTYNQLFEENPINASGVDAKAILSARLSKSRRLENLIAQLPGEKKNGLFGNLIALSLGLTPNFKSNFDLAEDAKLQLSKDTYDDDLDNLLAQIGDQYADLFLAAKNLSDAILLSDILRVNTEITKAPLSASMIKRYDEHHQDLTLLKALVRQQLPEKYKEIFFDQSKNGYAGYIDGGASQEEFYKFIKPILEKMDGTEELLVKLNREDLLRKQRTFDNGSIPHQIHLGELHAILRRQEDFYPFLKDNREKIEKILTFRIPYYVGPLARGNSRFAWMTRKSEETITPWNFEEVVDKGASAQSFIERMTNFDKNLPNEKVLPKHSLLYEYFTVYNELTKVKYVTEGMRKPAFLSGEQKKAIVDLLFKTNRKVTVKQLKEDYFKKIECFDSVEISGVEDRFNASLGTYHDLLKIIKDKDFLDNEENEDILEDIVLTLTLFEDREMIEERLKTYAHLFDDKVMKQLKRRRYTGWGRLSRKLINGIRDKQSGKTILDFLKSDGFANRNFMQLIHDDSLTFKEDIQKAQVSGQGDSLHEHIANLAGSPAIKKGILQTVKVVDELVKVMGRHKPENIVIEMARENQTTQKGQKNSRERMKRIEEGIKELGSQILKEHPVENTQLQNEKLYLYYLQNGRDMYVDQELDINRLSDYDVDHIVPQSFLKDDSIDNKVLTRSDKARGKSDNVPSEEVVKKMKNYWRQLLNAKLITQRKFDNLTKAERGGLSELDKAGFIKRQLVETRQITKHVAQILDSRMNTKYDENDKLIREVKVITLKSKLVSDFRKDFQFYKVREINNYHHAHDAYLNAVVGTALIKKYPKLESEFVYGDYKVYDVRKMIAKSEQEIGKATAKYFFYSNIMNFFKTEITLANGEIRKRPLIETNGETGEIVWDKGRDFATVRKVLSMPQVNIVKKTEVQTGGFSKESILPKRNSDKLIARKKDWDPKKYGGFDSPTVAYSVLVVAKVEKGKSKKLKSVKELLGITIMERSSFEKNPIDFLEAKGYKEVKKDLIIKLPKYSLFELENGRKRMLASAGELQKGNELALPSKYVNFLYLASHYEKLKGSPEDNEQKQLFVEQHKHYLDEIIEQISEFSKRVILADANLDKVLSAYNKHRDKPIREQAENIIHLFTLTNLGAPAAFKYFDTTIDRKRYTSTKEVLDATLIHQSITGLYETRIDLSQLGGDGGGSSPAPGGGGGTLQLEEEYRLFEPESTQKQEMDIWLKNFPQAWAETGGMGTAHCQAPVLIQLKATATPISIRQYPMPHEAYQGIKPHIRRMLDQGILKPCQSPWNTPLLPVKKPGTEDYRPVQDLREVNKRVEDIHPTVPNPYNLLSTLPPSHPWYTVLDLKDAFFCLRLHSESQLLFAFEWRDPEIGLSGQLTWTRLPQGFKNSPTLFNEALHSDLADFRVRYPALVLLQYVDDLLLAAATRTECLEGTKALLETLGNKGYRASAKKAQICLQEVTYLGYSLKDGQRWLTKARKEAILSIPVPKNSRQVREFLGKAGYCRLFIPGFAELAAPLYPLTRPGTLFQWGTEQQLAFEDIKKALLSSPALGLPDITKPFELFIDENSGFAKGVLVQKLGPWKRPVAYLSKKLDTVASGWPPCLRMVAAIAILVKDAGKLTLGQPLTILTSHPVEALVRQPPNKWLSNARMTHYQAMLLDAERVHFGPTVSLNPATLLPLPSGGNHHDCLQILAETHGTRPDLTDQPLPDADLTWYTDGSSFIRNGEREAGAAVTTESEVIWAAPLPPGTSAQRAELIALTQALKMAEGKKLTVYTDSRYAFATTHVHGEIYRRRGWLTSEGKEIKNKNEILALLEALFLPKRLSIIHCPGHQKGDSPQAKGNRLADDTAKKAATETHSSLTVLPAGKRTADGSEFEKRTADGSEFESPKKKAKVE

SEQ ID NO: 1225 - protein, 2095 aa, synthetic construct
  source 1..2095: note = Description of Artificial Sequence: Synthetic polypeptide
MPAAKRVKLDGGDKKYSIGLDIGTNSVGWAVITDEYKVPSKKFKVLGNTDRHSIKKNLIGALLFDSGETAEATRLKRTARRRYTRRKNRICYLQEIFSNEMAKVDDSFFHRLEESFLVEEDKKHERHPIFGNIVDEVAYHEKYPTIYHLRKKLVDSTDKADLRLIYLALAHMIKFRGHFLIEGDLNPDNSDVDKLFIQLVQTYNQLFEENPINASGVDAKAILSARLSKSRRLENLIAQLPGEKKNGLFGNLIALSLGLTPNFKSNFDLAEDAKLQLSKDTYDDDLDNLLAQIGDQYADLFLAAKNLSDAILLSDILRVNTEITKAPLSASMIKRYDEHHQDLTLLKALVRQQLPEKYKEIFFDQSKNGYAGYIDGGASQEEFYKFIKPILEKMDGTEELLVKLNREDLLRKQRTFDNGSIPHQIHLGELHAILRRQEDFYPFLKDNREKIEKILTFRIPYYVGPLARGNSRFAWMTRKSEETITPWNFEEVVDKGASAQSFIERMTNFDKNLPNEKVLPKHSLLYEYFTVYNELTKVKYVTEGMRKPAFLSGEQKKAIVDLLFKTNRKVTVKQLKEDYFKKIECFDSVEISGVEDRFNASLGTYHDLLKIIKDKDFLDNEENEDILEDIVLTLTLFEDREMIEERLKTYAHLFDDKVMKQLKRRRYTGWGRLSRKLINGIRDKQSGKTILDFLKSDGFANRNFMQLIHDDSLTFKEDIQKAQVSGQGDSLHEHIANLAGSPAIKKGILQTVKVVDELVKVMGRHKPENIVIEMARENQTTQKGQKNSRERMKRIEEGIKELGSQILKEHPVENTQLQNEKLYLYYLQNGRDMYVDQELDINRLSDYDVDHIVPQSFLKDDSIDNKVLTRSDKARGKSDNVPSEEVVKKMKNYWRQLLNAKLITQRKFDNLTKAERGGLSELDKAGFIKRQLVETRQITKHVAQILDSRMNTKYDENDKLIREVKVITLKSKLVSDFRKDFQFYKVREINNYHHAHDAYLNAVVGTALIKKYPKLESEFVYGDYKVYDVRKMIAKSEQEIGKATAKYFFYSNIMNFFKTEITLANGEIRKRPLIETNGETGEIVWDKGRDFATVRKVLSMPQVNIVKKTEVQTGGFSKESILPKRNSDKLIARKKDWDPKKYGGFDSPTVAYSVLVVAKVEKGKSKKLKSVKELLGITIMERSSFEKNPIDFLEAKGYKEVKKDLIIKLPKYSLFELENGRKRMLASAGELQKGNELALPSKYVNFLYLASHYEKLKGSPEDNEQKQLFVEQHKHYLDEIIEQISEFSKRVILADANLDKVLSAYNKHRDKPIREQAENIIHLFTLTNLGAPAAFKYFDTTIDRKRYTSTKEVLDATLIHQSITGLYETRIDLSQLGGDGGGSSPAPEAAAKGGTLQLEEEYRLFEPESTQKQEMDIWLKNFPQAWAETGGMGTAHCQAPVLIQLKATATPISIRQYPMPHEAYQGIKPHIRRMLDQGILKPCQSPWNTPLLPVKKPGTEDYRPVQDLREVNKRVEDIHPTVPNPYNLLSTLPPSHPWYTVLDLKDAFFCLRLHSESQLLFAFEWRDPEIGLSGQLTWTRLPQGFKNSPTLFNEALHSDLADFRVRYPALVLLQYVDDLLLAAATRTECLEGTKALLETLGNKGYRASAKKAQICLQEVTYLGYSLKDGQRWLTKARKEAILSIPVPKNSRQVREFLGKAGYCRLFIPGFAELAAPLYPLTRPGTLFQWGTEQQLAFEDIKKALLSSPALGLPDITKPFELFIDENSGFAKGVLVQKLGPWKRPVAYLSKKLDTVASGWPPCLRMVAAIAILVKDAGKLTLGQPLTILTSHPVEALVRQPPNKWLSNARMTHYQAMLLDAERVHFGPTVSLNPATLLPLPSGGNHHDCLQILAETHGTRPDLTDQPLPDADLTWYTDGSSFIRNGEREAGAAVTTESEVIWAAPLPPGTSAQRAELIALTQALKMAEGKKLTVYTDSRYAFATTHVHGEIYRRRGWLTSEGKEIKNKNEILALLEALFLPKRLSIIHCPGHQKGDSPQAKGNRLADDTAKKAATETHSSLTVLPAGKRTADGSEFEKRTADGSEFESPKKKAKVE

SEQ ID NO: 1226 - protein, 2087 aa, synthetic construct
  source 1..2087: note = Description of Artificial Sequence: Synthetic polypeptide
MPAAKRVKLDGGDKKYSIGLDIGTNSVGWAVITDEYKVPSKKFKVLGNTDRHSIKKNLIGALLFDSGETAEATRLKRTARRRYTRRKNRICYLQEIFSNEMAKVDDSFFHRLEESFLVEEDKKHERHPIFGNIVDEVAYHEKYPTIYHLRKKLVDSTDKADLRLIYLALAHMIKFRGHFLIEGDLNPDNSDVDKLFIQLVQTYNQLFEENPINASGVDAKAILSARLSKSRRLENLIAQLPGEKKNGLFGNLIALSLGLTPNFKSNFDLAEDAKLQLSKDTYDDDLDNLLAQIGDQYADLFLAAKNLSDAILLSDILRVNTEITKAPLSASMIKRYDEHHQDLTLLKALVRQQLPEKYKEIFFDQSKNGYAGYIDGGASQEEFYKFIKPILEKMDGTEELLVKLNREDLLRKQRTFDNGSIPHQIHLGELHAILRRQEDFYPFLKDNREKIEKILTFRIPYYVGPLARGNSRFAWMTRKSEETITPWNFEEVVDKGASAQSFIERMTNFDKNLPNEKVLPKHSLLYEYFTVYNELTKVKYVTEGMRKPAFLSGEQKKAIVDLLFKTNRKVTVKQLKEDYFKKIECFDSVEISGVEDRFNASLGTYHDLLKIIKDKDFLDNEENEDILEDIVLTLTLFEDREMIEERLKTYAHLFDDKVMKQLKRRRYTGWGRLSRKLINGIRDKQSGKTILDFLKSDGFANRNFMQLIHDDSLTFKEDIQKAQVSGQGDSLHEHIANLAGSPAIKKGILQTVKVVDELVKVMGRHKPENIVIEMARENQTTQKGQKNSRERMKRIEEGIKELGSQILKEHPVENTQLQNEKLYLYYLQNGRDMYVDQELDINRLSDYDVDHIVPQSFLKDDSIDNKVLTRSDKARGKSDNVPSEEVVKKMKNYWRQLLNAKLITQRKFDNLTKAERGGLSELDKAGFIKRQLVETRQITKHVAQILDSRMNTKYDENDKLIREVKVITLKSKLVSDFRKDFQFYKVREINNYHHAHDAYLNAVVGTALIKKYPKLESEFVYGDYKVYDVRKMIAKSEQEIGKATAKYFFYSNIMNFFKTEITLANGEIRKRPLIETNGETGEIVWDKGRDFATVRKVLSMPQVNIVKKTEVQTGGFSKESILPKRNSDKLIARKKDWDPKKYGGFDSPTVAYSVLVVAKVEKGKSKKLKSVKELLGITIMERSSFEKNPIDFLEAKGYKEVKKDLIIKLPKYSLFELENGRKRMLASAGELQKGNELALPSKYVNFLYLASHYEKLKGSPEDNEQKQLFVEQHKHYLDEIIEQISEFSKRVILADANLDKVLSAYNKHRDKPIREQAENIIHLFTLTNLGAPAAFKYFDTTIDRKRYTSTKEVLDATLIHQSITGLYETRIDLSQLGGDGGGSSGGTLQLEEEYRLFEPESTQKQEMDIWLKNFPQAWAETGGMGTAHCQAPVLIQLKATATPISIRQYPMPHEAYQGIKPHIRRMLDQGILKPCQSPWNTPLLPVKKPGTEDYRPVQDLREVNKRVEDIHPTVPNPYNLLSTLPPSHPWYTVLDLKDAFFCLRLHSESQLLFAFEWRDPEIGLSGQLTWTRLPQGFKNSPTLFNEALHSDLADFRVRYPALVLLQYVDDLLLAAATRTECLEGTKALLETLGNKGYRASAKKAQICLQEVTYLGYSLKDGQRWLTKARKEAILSIPVPKNSRQVREFLGKAGYCRLFIPGFAELAAPLYPLTRPGTLFQWGTEQQLAFEDIKKALLSSPALGLPDITKPFELFIDENSGFAKGVLVQKLGPWKRPVAYLSKKLDTVASGWPPCLRMVAAIAILVKDAGKLTLGQPLTILTSHPVEALVRQPPNKWLSNARMTHYQAMLLDAERVHFGPTVSLNPATLLPLPSGGNHHDCLQILAETHGTRPDLTDQPLPDADLTWYTDGSSFIRNGEREAGAAVTTESEVIWAAPLPPGTSAQRAELIALTQALKMAEGKKLTVYTDSRYAFATTHVHGEIYRRRGWLTSEGKEIKNKNEILALLEALFLPKRLSIIHCPGHQKGDSPQAKGNRLADDTAKKAATETHSSLTVLPAGKRTADGSEFEKRTADGSEFESPKKKAKVE

SEQ ID NO: 1227 - protein, 2095 aa, synthetic construct
  source 1..2095: note = Description of Artificial Sequence: Synthetic polypeptide
MPAAKRVKLDGGDKKYSIGLDIGTNSVGWAVITDEYKVPSKKFKVLGNTDRHSIKKNLIGALLFDSGETAEATRLKRTARRRYTRRKNRICYLQEIFSNEMAKVDDSFFHRLEESFLVEEDKKHERHPIFGNIVDEVAYHEKYPTIYHLRKKLVDSTDKADLRLIYLALAHMIKFRGHFLIEGDLNPDNSDVDKLFIQLVQTYNQLFEENPINASGVDAKAILSARLSKSRRLENLIAQLPGEKKNGLFGNLIALSLGLTPNFKSNFDLAEDAKLQLSKDTYDDDLDNLLAQIGDQYADLFLAAKNLSDAILLSDILRVNTEITKAPLSASMIKRYDEHHQDLTLLKALVRQQLPEKYKEIFFDQSKNGYAGYIDGGASQEEFYKFIKPILEKMDGTEELLVKLNREDLLRKQRTFDNGSIPHQIHLGELHAILRRQEDFYPFLKDNREKIEKILTFRIPYYVGPLARGNSRFAWMTRKSEETITPWNFEEVVDKGASAQSFIERMTNFDKNLPNEKVLPKHSLLYEYFTVYNELTKVKYVTEGMRKPAFLSGEQKKAIVDLLFKTNRKVTVKQLKEDYFKKIECFDSVEISGVEDRFNASLGTYHDLLKIIKDKDFLDNEENEDILEDIVLTLTLFEDREMIEERLKTYAHLFDDKVMKQLKRRRYTGWGRLSRKLINGIRDKQSGKTILDFLKSDGFANRNFMQLIHDDSLTFKEDIQKAQVSGQGDSLHEHIANLAGSPAIKKGILQTVKVVDELVKVMGRHKPENIVIEMARENQTTQKGQKNSRERMKRIEEGIKELGSQILKEHPVENTQLQNEKLYLYYLQNGRDMYVDQELDINRLSDYDVDHIVPQSFLKDDSIDNKVLTRSDKARGKSDNVPSEEVVKKMKNYWRQLLNAKLITQRKFDNLTKAERGGLSELDKAGFIKRQLVETRQITKHVAQILDSRMNTKYDENDKLIREVKVITLKSKLVSDFRKDFQFYKVREINNYHHAHDAYLNAVVGTALIKKYPKLESEFVYGDYKVYDVRKMIAKSEQEIGKATAKYFFYSNIMNFFKTEITLANGEIRKRPLIETNGETGEIVWDKGRDFATVRKVLSMPQVNIVKKTEVQTGGFSKESILPKRNSDKLIARKKDWDPKKYGGFDSPTVAYSVLVVAKVEKGKSKKLKSVKELLGITIMERSSFEKNPIDFLEAKGYKEVKKDLIIKLPKYSLFELENGRKRMLASAGELQKGNELALPSKYVNFLYLASHYEKLKGSPEDNEQKQLFVEQHKHYLDEIIEQISEFSKRVILADANLDKVLSAYNKHRDKPIREQAENIIHLFTLTNLGAPAAFKYFDTTIDRKRYTSTKEVLDATLIHQSITGLYETRIDLSQLGGDGGGSSGGGEAAAKGGTLQLEEEYRLFEPESTQKQEMDIWLKNFPQAWAETGGMGTAHCQAPVLIQLKATATPISIRQYPMPHEAYQGIKPHIRRMLDQGILKPCQSPWNTPLLPVKKPGTEDYRPVQDLREVNKRVEDIHPTVPNPYNLLSTLPPSHPWYTVLDLKDAFFCLRLHSESQLLFAFEWRDPEIGLSGQLTWTRLPQGFKNSPTLFNEALHSDLADFRVRYPALVLLQYVDDLLLAAATRTECLEGTKALLETLGNKGYRASAKKAQICLQEVTYLGYSLKDGQRWLTKARKEAILSIPVPKNSRQVREFLGKAGYCRLFIPGFAELAAPLYPLTRPGTLFQWGTEQQLAFEDIKKALLSSPALGLPDITKPFELFIDENSGFAKGVLVQKLGPWKRPVAYLSKKLDTVASGWPPCLRMVAAIAILVKDAGKLTLGQPLTILTSHPVEALVRQPPNKWLSNARMTHYQAMLLDAERVHFGPTVSLNPATLLPLPSGGNHHDCLQILAETHGTRPDLTDQPLPDADLTWYTDGSSFIRNGEREAGAAVTTESEVIWAAPLPPGTSAQRAELIALTQALKMAEGKKLTVYTDSRYAFATTHVHGEIYRRRGWLTSEGKEIKNKNEILALLEALFLPKRLSIIHCPGHQKGDSPQAKGNRLADDTAKKAATETHSSLTVLPAGKRTADGSEFEKRTADGSEFESPKKKAKVE

SEQ ID NO: 1228 - protein, 2090 aa, synthetic construct
  source 1..2090: note = Description of Artificial Sequence: Synthetic polypeptide
MPAAKRVKLDGGDKKYSIGLDIGTNSVGWAVITDEYKVPSKKFKVLGNTDRHSIKKNLIGALLFDSGETAEATRLKRTARRRYTRRKNRICYLQEIFSNEMAKVDDSFFHRLEESFLVEEDKKHERHPIFGNIVDEVAYHEKYPTIYHLRKKLVDSTDKADLRLIYLALAHMIKFRGHFLIEGDLNPDNSDVDKLFIQLVQTYNQLFEENPINASGVDAKAILSARLSKSRRLENLIAQLPGEKKNGLFGNLIALSLGLTPNFKSNFDLAEDAKLQLSKDTYDDDLDNLLAQIGDQYADLFLAAKNLSDAILLSDILRVNTEITKAPLSASMIKRYDEHHQDLTLLKALVRQQLPEKYKEIFFDQSKNGYAGYIDGGASQEEFYKFIKPILEKMDGTEELLVKLNREDLLRKQRTFDNGSIPHQIHLGELHAILRRQEDFYPFLKDNREKIEKILTFRIPYYVGPLARGNSRFAWMTRKSEETITPWNFEEVVDKGASAQSFIERMTNFDKNLPNEKVLPKHSLLYEYFTVYNELTKVKYVTEGMRKPAFLSGEQKKAIVDLLFKTNRKVTVKQLKEDYFKKIECFDSVEISGVEDRFNASLGTYHDLLKIIKDKDFLDNEENEDILEDIVLTLTLFEDREMIEERLKTYAHLFDDKVMKQLKRRRYTGWGRLSRKLINGIRDKQSGKTILDFLKSDGFANRNFMQLIHDDSLTFKEDIQKAQVSGQGDSLHEHIANLAGSPAIKKGILQTVKVVDELVKVMGRHKPENIVIEMARENQTTQKGQKNSRERMKRIEEGIKELGSQILKEHPVENTQLQNEKLYLYYLQNGRDMYVDQELDINRLSDYDVDHIVPQSFLKDDSIDNKVLTRSDKARGKSDNVPSEEVVKKMKNYWRQLLNAKLITQRKFDNLTKAERGGLSELDKAGFIKRQLVETRQITKHVAQILDSRMNTKYDENDKLIREVKVITLKSKLVSDFRKDFQFYKVREINNYHHAHDAYLNAVVGTALIKKYPKLESEFVYGDYKVYDVRKMIAKSEQEIGKATAKYFFYSNIMNFFKTEITLANGEIRKRPLIETNGETGEIVWDKGRDFATVRKVLSMPQVNIVKKTEVQTGGFSKESILPKRNSDKLIARKKDWDPKKYGGFDSPTVAYSVLVVAKVEKGKSKKLKSVKELLGITIMERSSFEKNPIDFLEAKGYKEVKKDLIIKLPKYSLFELENGRKRMLASAGELQKGNELALPSKYVNFLYLASHYEKLKGSPEDNEQKQLFVEQHKHYLDEIIEQISEFSKRVILADANLDKVLSAYNKHRDKPIREQAENIIHLFTLTNLGAPAAFKYFDTTIDRKRYTSTKEVLDATLIHQSITGLYETRIDLSQLGGDGGPAPGGSGGTLQLEEEYRLFEPESTQKQEMDIWLKNFPQAWAETGGMGTAHCQAPVLIQLKATATPISIRQYPMPHEAYQGIKPHIRRMLDQGILKPCQSPWNTPLLPVKKPGTEDYRPVQDLREVNKRVEDIHPTVPNPYNLLSTLPPSHPWYTVLDLKDAFFCLRLHSESQLLFAFEWRDPEIGLSGQLTWTRLPQGFKNSPTLFNEALHSDLADFRVRYPALVLLQYVDDLLLAAATRTECLEGTKALLETLGNKGYRASAKKAQICLQEVTYLGYSLKDGQRWLTKARKEAILSIPVPKNSRQVREFLGKAGYCRLFIPGFAELAAPLYPLTRPGTLFQWGTEQQLAFEDIKKALLSSPALGLPDITKPFELFIDENSGFAKGVLVQKLGPWKRPVAYLSKKLDTVASGWPPCLRMVAAIAILVKDAGKLTLGQPLTILTSHPVEALVRQPPNKWLSNARMTHYQAMLLDAERVHFGPTVSLNPATLLPLPSGGNHHDCLQILAETHGTRPDLTDQPLPDADLTWYTDGSSFIRNGEREAGAAVTTESEVIWAAPLPPGTSAQRAELIALTQALKMAEGKKLTVYTDSRYAFATTHVHGEIYRRRGWLTSEGKEIKNKNEILALLEALFLPKRLSIIHCPGHQKGDSPQAKGNRLADDTAKKAATETHSSLTVLPAGKRTADGSEFEKRTADGSEFESPKKKAKVE

SEQ ID NO: 1229 - protein, 2090 aa, synthetic construct
  source 1..2090: note = Description of Artificial Sequence: Synthetic polypeptide
MPAAKRVKLDGGDKKYSIGLDIGTNSVGWAVITDEYKVPSKKFKVLGNTDRHSIKKNLIGALLFDSGETAEATRLKRTARRRYTRRKNRICYLQEIFSNEMAKVDDSFFHRLEESFLVEEDKKHERHPIFGNIVDEVAYHEKYPTIYHLRKKLVDSTDKADLRLIYLALAHMIKFRGHFLIEGDLNPDNSDVDKLFIQLVQTYNQLFEENPINASGVDAKAILSARLSKSRRLENLIAQLPGEKKNGLFGNLIALSLGLTPNFKSNFDLAEDAKLQLSKDTYDDDLDNLLAQIGDQYADLFLAAKNLSDAILLSDILRVNTEITKAPLSASMIKRYDEHHQDLTLLKALVRQQLPEKYKEIFFDQSKNGYAGYIDGGASQEEFYKFIKPILEKMDGTEELLVKLNREDLLRKQRTFDNGSIPHQIHLGELHAILRRQEDFYPFLKDNREKIEKILTFRIPYYVGPLARGNSRFAWMTRKSEETITPWNFEEVVDKGASAQSFIERMTNFDKNLPNEKVLPKHSLLYEYFTVYNELTKVKYVTEGMRKPAFLSGEQKKAIVDLLFKTNRKVTVKQLKEDYFKKIECFDSVEISGVEDRFNASLGTYHDLLKIIKDKDFLDNEENEDILEDIVLTLTLFEDREMIEERLKTYAHLFDDKVMKQLKRRRYTGWGRLSRKLINGIRDKQSGKTILDFLKSDGFANRNFMQLIHDDSLTFKEDIQKAQVSGQGDSLHEHIANLAGSPAIKKGILQTVKVVDELVKVMGRHKPENIVIEMARENQTTQKGQKNSRERMKRIEEGIKELGSQILKEHPVENTQLQNEKLYLYYLQNGRDMYVDQELDINRLSDYDVDHIVPQSFLKDDSIDNKVLTRSDKARGKSDNVPSEEVVKKMKNYWRQLLNAKLITQRKFDNLTKAERGGLSELDKAGFIKRQLVETRQITKHVAQILDSRMNTKYDENDKLIREVKVITLKSKLVSDFRKDFQFYKVREINNYHHAHDAYLNAVVGTALIKKYPKLESEFVYGDYKVYDVRKMIAKSEQEIGKATAKYFFYSNIMNFFKTEITLANGEIRKRPLIETNGETGEIVWDKGRDFATVRKVLSMPQVNIVKKTEVQTGGFSKESILPKRNSDKLIARKKDWDPKKYGGFDSPTVAYSVLVVAKVEKGKSKKLKSVKELLGITIMERSSFEKNPIDFLEAKGYKEVKKDLIIKLPKYSLFELENGRKRMLASAGELQKGNELALPSKYVNFLYLASHYEKLKGSPEDNEQKQLFVEQHKHYLDEIIEQISEFSKRVILADANLDKVLSAYNKHRDKPIREQAENIIHLFTLTNLGAPAAFKYFDTTIDRKRYTSTKEVLDATLIHQSITGLYETRIDLSQLGGDGGGGGPAPGGTLQLEEEYRLFEPESTQKQEMDIWLKNFPQAWAETGGMGTAHCQAPVLIQLKATATPISIRQYPMPHEAYQGIKPHIRRMLDQGILKPCQSPWNTPLLPVKKPGTEDYRPVQDLREVNKRVEDIHPTVPNPYNLLSTLPPSHPWYTVLDLKDAFFCLRLHSESQLLFAFEWRDPEIGLSGQLTWTRLPQGFKNSPTLFNEALHSDLADFRVRYPALVLLQYVDDLLLAAATRTECLEGTKALLETLGNKGYRASAKKAQICLQEVTYLGYSLKDGQRWLTKARKEAILSIPVPKNSRQVREFLGKAGYCRLFIPGFAELAAPLYPLTRPGTLFQWGTEQQLAFEDIKKALLSSPALGLPDITKPFELFIDENSGFAKGVLVQKLGPWKRPVAYLSKKLDTVASGWPPCLRMVAAIAILVKDAGKLTLGQPLTILTSHPVEALVRQPPNKWLSNARMTHYQAMLLDAERVHFGPTVSLNPATLLPLPSGGNHHDCLQILAETHGTRPDLTDQPLPDADLTWYTDGSSFIRNGEREAGAAVTTESEVIWAAPLPPGTSAQRAELIALTQALKMAEGKKLTVYTDSRYAFATTHVHGEIYRRRGWLTSEGKEIKNKNEILALLEALFLPKRLSIIHCPGHQKGDSPQAKGNRLADDTAKKAATETHSSLTVLPAGKRTADGSEFEKRTADGSEFESPKKKAKVE

SEQ ID NO: 1230 - protein, 2092 aa, synthetic construct
  source 1..2092: note = Description of Artificial Sequence: Synthetic polypeptide
MPAAKRVKLDGGDKKYSIGLDIGTNSVGWAVITDEYKVPSKKFKVLGNTDRHSIKKNLIGALLFDSGETAEATRLKRTARRRYTRRKNRICYLQEIFSNEMAKVDDSFFHRLEESFLVEEDKKHERHPIFGNIVDEVAYHEKYPTIYHLRKKLVDSTDKADLRLIYLALAHMIKFRGHFLIEGDLNPDNSDVDKLFIQLVQTYNQLFEENPINASGVDAKAILSARLSKSRRLENLIAQLPGEKKNGLFGNLIALSLGLTPNFKSNFDLAEDAKLQLSKDTYDDDLDNLLAQIGDQYADLFLAAKNLSDAILLSDILRVNTEITKAPLSASMIKRYDEHHQDLTLLKALVRQQLPEKYKEIFFDQSKNGYAGYIDGGASQEEFYKFIKPILEKMDGTEELLVKLNREDLLRKQRTFDNGSIPHQIHLGELHAILRRQEDFYPFLKDNREKIEKILTFRIPYYVGPLARGNSRFAWMTRKSEETITPWNFEEVVDKGASAQSFIERMTNFDKNLPNEKVLPKHSLLYEYFTVYNELTKVKYVTEGMRKPAFLSGEQKKAIVDLLFKTNRKVTVKQLKEDYFKKIECFDSVEISGVEDRFNASLGTYHDLLKIIKDKDFLDNEENEDILEDIVLTLTLFEDREMIEERLKTYAHLFDDKVMKQLKRRRYTGWGRLSRKLINGIRDKQSGKTILDFLKSDGFANRNFMQLIHDDSLTFKEDIQKAQVSGQGDSLHEHIANLAGSPAIKKGILQTVKVVDELVKVMGRHKPENIVIEMARENQTTQKGQKNSRERMKRIEEGIKELGSQILKEHPVENTQLQNEKLYLYYLQNGRDMYVDQELDINRLSDYDVDHIVPQSFLKDDSIDNKVLTRSDKARGKSDNVPSEEVVKKMKNYWRQLLNAKLITQRKFDNLTKAERGGLSELDKAGFIKRQLVETRQITKHVAQILDSRMNTKYDENDKLIREVKVITLKSKLVSDFRKDFQFYKVREINNYHHAHDAYLNAVVGTALIKKYPKLESEFVYGDYKVYDVRKMIAKSEQEIGKATAKYFFYSNIMNFFKTEITLANGEIRKRPLIETNGETGEIVWDKGRDFATVRKVLSMPQVNIVKKTEVQTGGFSKESILPKRNSDKLIARKKDWDPKKYGGFDSPTVAYSVLVVAKVEKGKSKKLKSVKELLGITIMERSSFEKNPIDFLEAKGYKEVKKDLIIKLPKYSLFELENGRKRMLASAGELQKGNELALPSKYVNFLYLASHYEKLKGSPEDNEQKQLFVEQHKHYLDEIIEQISEFSKRVILADANLDKVLSAYNKHRDKPIREQAENIIHLFTLTNLGAPAAFKYFDTTIDRKRYTSTKEVLDATLIHQSITGLYETRIDLSQLGGDGGPAPEAAAKGGTLQLEEEYRLFEPESTQKQEMDIWLKNFPQAWAETGGMGTAHCQAPVLIQLKATATPISIRQYPMPHEAYQGIKPHIRRMLDQGILKPCQSPWNTPLLPVKKPGTEDYRPVQDLREVNKRVEDIHPTVPNPYNLLSTLPPSHPWYTVLDLKDAFFCLRLHSESQLLFAFEWRDPEIGLSGQLTWTRLPQGFKNSPTLFNEALHSDLADFRVRYPALVLLQYVDDLLLAAATRTECLEGTKALLETLGNKGYRASAKKAQICLQEVTYLGYSLKDGQRWLTKARKEAILSIPVPKNSRQVREFLGKAGYCRLFIPGFAELAAPLYPLTRPGTLFQWGTEQQLAFEDIKKALLSSPALGLPDITKPFELFIDENSGFAKGVLVQKLGPWKRPVAYLSKKLDTVASGWPPCLRMVAAIAILVKDAGKLTLGQPLTILTSHPVEALVRQPPNKWLSNARMTHYQAMLLDAERVHFGPTVSLNPATLLPLPSGGNHHDCLQILAETHGTRPDLTDQPLPDADLTWYTDGSSFIRNGEREAGAAVTTESEVIWAAPLPPGTSAQRAELIALTQALKMAEGKKLTVYTDSRYAFATTHVHGEIYRRRGWLTSEGKEIKNKNEILALLEALFLPKRLSIIHCPGHQKGDSPQAKGNRLADDTAKKAATETHSSLTVLPAGKRTADGSEFEKRTADGSEFESPKKKAKVE

SEQ ID NO: 1231 - protein, 2099 aa, synthetic construct
  source 1..2099: note = Description of Artificial Sequence: Synthetic polypeptide
MPAAKRVKLDGGDKKYSIGLDIGTNSVGWAVITDEYKVPSKKFKVLGNTDRHSIKKNLIGALLFDSGETAEATRLKRTARRRYTRRKNRICYLQEIFSNEMAKVDDSFFHRLEESFLVEEDKKHERHPIFGNIVDEVAYHEKYPTIYHLRKKLVDSTDKADLRLIYLALAHMIKFRGHFLIEGDLNPDNSDVDKLFIQLVQTYNQLFEENPINASGVDAKAILSARLSKSRRLENLIAQLPGEKKNGLFGNLIALSLGLTPNFKSNFDLAEDAKLQLSKDTYDDDLDNLLAQIGDQYADLFLAAKNLSDAILLSDILRVNTEITKAPLSASMIKRYDEHHQDLTLLKALVRQQLPEKYKEIFFDQSKNGYAGYIDGGASQEEFYKFIKPILEKMDGTEELLVKLNREDLLRKQRTFDNGSIPHQIHLGELHAILRRQEDFYPFLKDNREKIEKILTFRIPYYVGPLARGNSRFAWMTRKSEETITPWNFEEVVDKGASAQSFIERMTNFDKNLPNEKVLPKHSLLYEYFTVYNELTKVKYVTEGMRKPAFLSGEQKKAIVDLLFKTNRKVTVKQLKEDYFKKIECFDSVEISGVEDRFNASLGTYHDLLKIIKDKDFLDNEENEDILEDIVLTLTLFEDREMIEERLKTYAHLFDDKVMKQLKRRRYTGWGRLSRKLINGIRDKQSGKTILDFLKSDGFANRNFMQLIHDDSLTFKEDIQKAQVSGQGDSLHEHIANLAGSPAIKKGILQTVKVVDELVKVMGRHKPENIVIEMARENQTTQKGQKNSRERMKRIEEGIKELGSQILKEHPVENTQLQNEKLYLYYLQNGRDMYVDQELDINRLSDYDVDHIVPQSFLKDDSIDNKVLTRSDKARGKSDNVPSEEVVKKMKNYWRQLLNAKLITQRKFDNLTKAERGGLSELDKAGFIKRQLVETRQITKHVAQILDSRMNTKYDENDKLIREVKVITLKSKLVSDFRKDFQFYKVREINNYHHAHDAYLNAVVGTALIKKYPKLESEFVYGDYKVYDVRKMIAKSEQEIGKATAKYFFYSNIMNFFKTEITLANGEIRKRPLIETNGETGEIVWDKGRDFATVRKVLSMPQVNIVKKTEVQTGGFSKESILPKRNSDKLIARKKDWDPKKYGGFDSPTVAYSVLVVAKVEKGKSKKLKSVKELLGITIMERSSFEKNPIDFLEAKGYKEVKKDLIIKLPKYSLFELENGRKRMLASAGELQKGNELALPSKYVNFLYLASHYEKLKGSPEDNEQKQLFVEQHKHYLDEIIEQISEFSKRVILADANLDKVLSAYNKHRDKPIREQAENIIHLFTLTNLGAPAAFKYFDTTIDRKRYTSTKEVLDATLIHQSITGLYETRIDLSQLGGDGGGGGGSGGGGSGGGGSGGTLQLEEEYRLFEPESTQKQEMDIWLKNFPQAWAETGGMGTAHCQAPVLIQLKATATPISIRQYPMPHEAYQGIKPHIRRMLDQGILKPCQSPWNTPLLPVKKPGTEDYRPVQDLREVNKRVEDIHPTVPNPYNLLSTLPPSHPWYTVLDLKDAFFCLRLHSESQLLFAFEWRDPEIGLSGQLTWTRLPQGFKNSPTLFNEALHSDLADFRVRYPALVLLQYVDDLLLAAATRTECLEGTKALLETLGNKGYRASAKKAQICLQEVTYLGYSLKDGQRWLTKARKEAILSIPVPKNSRQVREFLGKAGYCRLFIPGFAELAAPLYPLTRPGTLFQWGTEQQLAFEDIKKALLSSPALGLPDITKPFELFIDENSGFAKGVLVQKLGPWKRPVAYLSKKLDTVASGWPPCLRMVAAIAILVKDAGKLTLGQPLTILTSHPVEALVRQPPNKWLSNARMTHYQAMLLDAERVHFGPTVSLNPATLLPLPSGGNHHDCLQILAETHGTRPDLTDQPLPDADLTWYTDGSSFIRNGEREAGAAVTTESEVIWAAPLPPGTSAQRAELIALTQALKMAEGKKLTVYTDSRYAFATTHVHGEIYRRRGWLTSEGKEIKNKNEILALLEALFLPKRLSIIHCPGHQKGDSPQAKGNRLADDTAKKAATETHSSLTVLPAGKRTADGSEFEKRTADGSEFESPKKKAKVE

SEQ ID NO: 1232 - protein, 2095 aa, synthetic construct
  source 1..2095: note = Description of Artificial Sequence: Synthetic polypeptide
MPAAKRVKLDGGDKKYSIGLDIGTNSVGWAVITDEYKVPSKKFKVLGNTDRHSIKKNLIGALLFDSGETAEATRLKRTARRRYTRRKNRICYLQEIFSNEMAKVDDSFFHRLEESFLVEEDKKHERHPIFGNIVDEVAYHEKYPTIYHLRKKLVDSTDKADLRLIYLALAHMIKFRGHFLIEGDLNPDNSDVDKLFIQLVQTYNQLFEENPINASGVDAKAILSARLSKSRRLENLIAQLPGEKKNGLFGNLIALSLGLTPNFKSNFDLAEDAKLQLSKDTYDDDLDNLLAQIGDQYADLFLAAKNLSDAILLSDILRVNTEITKAPLSASMIKRYDEHHQDLTLLKALVRQQLPEKYKEIFFDQSKNGYAGYIDGGASQEEFYKFIKPILEKMDGTEELLVKLNREDLLRKQRTFDNGSIPHQIHLGELHAILRRQEDFYPFLKDNREKIEKILTFRIPYYVGPLARGNSRFAWMTRKSEETITPWNFEEVVDKGASAQSFIERMTNFDKNLPNEKVLPKHSLLYEYFTVYNELTKVKYVTEGMRKPAFLSGEQKKAIVDLLFKTNRKVTVKQLKEDYFKKIECFDSVEISGVEDRFNASLGTYHDLLKIIKDKDFLDNEENEDILEDIVLTLTLFEDREMIEERLKTYAHLFDDKVMKQLKRRRYTGWGRLSRKLINGIRDKQSGKTILDFLKSDGFANRNFMQLIHDDSLTFKEDIQKAQVSGQGDSLHEHIANLAGSPAIKKGILQTVKVVDELVKVMGRHKPENIVIEMARENQTTQKGQKNSRERMKRIEEGIKELGSQILKEHPVENTQLQNEKLYLYYLQNGRDMYVDQELDINRLSDYDVDHIVPQSFLKDDSIDNKVLTRSDKARGKSDNVPSEEVVKKMKNYWRQLLNAKLITQRKFDNLTKAERGGLSELDKAGFIKRQLVETRQITKHVAQILDSRMNTKYDENDKLIREVKVITLKSKLVSDFRKDFQFYKVREINNYHHAHDAYLNAVVGTALIKKYPKLESEFVYGDYKVYDVRKMIAKSEQEIGKATAKYFFYSNIMNFFKTEITLANGEIRKRPLIETNGETGEIVWDKGRDFATVRKVLSMPQVNIVKKTEVQTGGFSKESILPKRNSDKLIARKKDWDPKKYGGFDSPTVAYSVLVVAKVEKGKSKKLKSVKELLGITIMERSSFEKNPIDFLEAKGYKEVKKDLIIKLPKYSLFELENGRKRMLASAGELQKGNELALPSKYVNFLYLASHYEKLKGSPEDNEQKQLFVEQHKHYLDEIIEQISEFSKRVILADANLDKVLSAYNKHRDKPIREQAENIIHLFTLTNLGAPAAFKYFDTTIDRKRYTSTKEVLDATLIHQSITGLYETRIDLSQLGGDGGPAPAPAPAPAPGGTLQLEEEYRLFEPESTQKQEMDIWLKNFPQAWAETGGMGTAHCQAPVLIQLKATATPISIRQYPMPHEAYQGIKPHIRRMLDQGILKPCQSPWNTPLLPVKKPGTEDYRPVQDLREVNKRVEDIHPTVPNPYNLLSTLPPSHPWYTVLDLKDAFFCLRLHSESQLLFAFEWRDPEIGLSGQLTWTRLPQGFKNSPTLFNEALHSDLADFRVRYPALVLLQYVDDLLLAAATRTECLEGTKALLETLGNKGYRASAKKAQICLQEVTYLGYSLKDGQRWLTKARKEAILSIPVPKNSRQVREFLGKAGYCRLFIPGFAELAAPLYPLTRPGTLFQWGTEQQLAFEDIKKALLSSPALGLPDITKPFELFIDENSGFAKGVLVQKLGPWKRPVAYLSKKLDTVASGWPPCLRMVAAIAILVKDAGKLTLGQPLTILTSHPVEALVRQPPNKWLSNARMTHYQAMLLDAERVHFGPTVSLNPATLLPLPSGGNHHDCLQILAETHGTRPDLTDQPLPDADLTWYTDGSSFIRNGEREAGAAVTTESEVIWAAPLPPGTSAQRAELIALTQALKMAEGKKLTVYTDSRYAFATTHVHGEIYRRRGWLTSEGKEIKNKNEILALLEALFLPKRLSIIHCPGHQKGDSPQAKGNRLADDTAKKAATETHSSLTVLPAGKRTADGSEFEKRTADGSEFESPKKKAKVE

SEQ ID NO: 1233 - protein, 2094 aa, synthetic construct
  source 1..2094: note = Description of Artificial Sequence: Synthetic polypeptide
MPAAKRVKLDGGDKKYSIGLDIGTNSVGWAVITDEYKVPSKKFKVLGNTDRHSIKKNLIGALLFDSGETAEATRLKRTARRRYTRRKNRICYLQEIFSNEMAKVDDSFFHRLEESFLVEEDKKHERHPIFGNIVDEVAYHEKYPTIYHLRKKLVDSTDKADLRLIYLALAHMIKFRGHFLIEGDLNPDNSDVDKLFIQLVQTYNQLFEENPINASGVDAKAILSARLSKSRRLENLIAQLPGEKKNGLFGNLIALSLGLTPNFKSNFDLAEDAKLQLSKDTYDDDLDNLLAQIGDQYADLFLAAKNLSDAILLSDILRVNTEITKAPLSASMIKRYDEHHQDLTLLKALVRQQLPEKYKEIFFDQSKNGYAGYIDGGASQEEFYKFIKPILEKMDGTEELLVKLNREDLLRKQRTFDNGSIPHQIHLGELHAILRRQEDFYPFLKDNREKIEKILTFRIPYYVGPLARGNSRFAWMTRKSEETITPWNFEEVVDKGASAQSFIERMTNFDKNLPNEKVLPKHSLLYEYFTVYNELTKVKYVTEGMRKPAFLSGEQKKAIVDLLFKTNRKVTVKQLKEDYFKKIECFDSVEISGVEDRFNASLGTYHDLLKIIKDKDFLDNEENEDILEDIVLTLTLFEDREMIEERLKTYAHLFDDKVMKQLKRRRYTGWGRLSRKLINGIRDKQSGKTILDFLKSDGFANRNFMQLIHDDSLTFKEDIQKAQVSGQGDSLHEHIANLAGSPAIKKGILQTVKVVDELVKVMGRHKPENIVIEMARENQTTQKGQKNSRERMKRIEEGIKELGSQILKEHPVENTQLQNEKLYLYYLQNGRDMYVDQELDINRLSDYDVDHIVPQSFLKDDSIDNKVLTRSDKARGKSDNVPSEEVVKKMKNYWRQLLNAKLITQRKFDNLTKAERGGLSELDKAGFIKRQLVETRQITKHVAQILDSRMNTKYDENDKLIREVKVITLKSKLVSDFRKDFQFYKVREINNYHHAHDAYLNAVVGTALIKKYPKLESEFVYGDYKVYDVRKMIAKSEQEIGKATAKYFFYSNIMNFFKTEITLANGEIRKRPLIETNGETGEIVWDKGRDFATVRKVLSMPQVNIVKKTEVQTGGFSKESILPKRNSDKLIARKKDWDPKKYGGFDSPTVAYSVLVVAKVEKGKSKKLKSVKELLGITIMERSSFEKNPIDFLEAKGYKEVKKDLIIKLPKYSLFELENGRKRMLASAGELQKGNELALPSKYVNFLYLASHYEKLKGSPEDNEQKQLFVEQHKHYLDEIIEQISEFSKRVILADANLDKVLSAYNKHRDKPIREQAENIIHLFTLTNLGAPAAFKYFDTTIDRKRYTSTKEVLDATLIHQSITGLYETRIDLSQLGGDGGGGGGSGGGGSGGTLQLEEEYRLFEPESTQKQEMDIWLKNFPQAWAETGGMGTAHCQAPVLIQLKATATPISIRQYPMPHEAYQGIKPHIRRMLDQGILKPCQSPWNTPLLPVKKPGTEDYRPVQDLREVNKRVEDIHPTVPNPYNLLSTLPPSHPWYTVLDLKDAFFCLRLHSESQLLFAFEWRDPEIGLSGQLTWTRLPQGFKNSPTLFNEALHSDLADFRVRYPALVLLQYVDDLLLAAATRTECLEGTKALLETLGNKGYRASAKKAQICLQEVTYLGYSLKDGQRWLTKARKEAILSIPVPKNSRQVREFLGKAGYCRLFIPGFAELAAPLYPLTRPGTLFQWGTEQQLAFEDIKKALLSSPALGLPDITKPFELFIDENSGFAKGVLVQKLGPWKRPVAYLSKKLDTVASGWPPCLRMVAAIAILVKDAGKLTLGQPLTILTSHPVEALVRQPPNKWLSNARMTHYQAMLLDAERVHFGPTVSLNPATLLPLPSGGNHHDCLQILAETHGTRPDLTDQPLPDADLTWYTDGSSFIRNGEREAGAAVTTESEVIWAAPLPPGTSAQRAELIALTQALKMAEGKKLTVYTDSRYAFATTHVHGEIYRRRGWLTSEGKEIKNKNEILALLEALFLPKRLSIIHCPGHQKGDSPQAKGNRLADDTAKKAATETHSSLTVLPAGKRTADGSEFEKRTADGSEFESPKKKAKVE

SEQ ID NO: 1234 - protein, 2095 aa, synthetic construct
  source 1..2095: note = Description of Artificial Sequence: Synthetic polypeptide
MPAAKRVKLDGGDKKYSIGLDIGTNSVGWAVITDEYKVPSKKFKVLGNTDRHSIKKNLIGALLFDSGETAEATRLKRTARRRYTRRKNRICYLQEIFSNEMAKVDDSFFHRLEESFLVEEDKKHERHPIFGNIVDEVAYHEKYPTIYHLRKKLVDSTDKADLRLIYLALAHMIKFRGHFLIEGDLNPDNSDVDKLFIQLVQTYNQLFEENPINASGVDAKAILSARLSKSRRLENLIAQLPGEKKNGLFGNLIALSLGLTPNFKSNFDLAEDAKLQLSKDTYDDDLDNLLAQIGDQYADLFLAAKNLSDAILLSDILRVNTEITKAPLSASMIKRYDEHHQDLTLLKALVRQQLPEKYKEIFFDQSKNGYAGYIDGGASQEEFYKFIKPILEKMDGTEELLVKLNREDLLRKQRTFDNGSIPHQIHLGELHAILRRQEDFYPFLKDNREKIEKILTFRIPYYVGPLARGNSRFAWMTRKSEETITPWNFEEVVDKGASAQSFIERMTNFDKNLPNEKVLPKHSLLYEYFTVYNELTKVKYVTEGMRKPAFLSGEQKKAIVDLLFKTNRKVTVKQLKEDYFKKIECFDSVEISGVEDRFNASLGTYHDLLKIIKDKDFLDNEENEDILEDIVLTLTLFEDREMIEERLKTYAHLFDDKVMKQLKRRRYTGWGRLSRKLINGIRDKQSGKTILDFLKSDGFANRNFMQLIHDDSLTFKEDIQKAQVSGQGDSLHEHIANLAGSPAIKKGILQTVKVVDELVKVMGRHKPENIVIEMARENQTTQKGQKNSRERMKRIEEGIKELGSQILKEHPVENTQLQNEKLYLYYLQNGRDMYVDQELDINRLSDYDVDHIVPQSFLKDDSIDNKVLTRSDKARGKSDNVPSEEVVKKMKNYWRQLLNAKLITQRKFDNLTKAERGGLSELDKAGFIKRQLVETRQITKHVAQILDSRMNTKYDENDKLIREVKVITLKSKLVSDFRKDFQFYKVREINNYHHAHDAYLNAVVGTALIKKYPKLESEFVYGDYKVYDVRKMIAKSEQEIGKATAKYFFYSNIMNFFKTEITLANGEIRKRPLIETNGETGEIVWDKGRDFATVRKVLSMPQVNIVKKTEVQTGGFSKESILPKRNSDKLIARKKDWDPKKYGGFDSPTVAYSVLVVAKVEKGKSKKLKSVKELLGITIMERSSFEKNPIDFLEAKGYKEVKKDLIIKLPKYSLFELENGRKRMLASAGELQKGNELALPSKYVNFLYLASHYEKLKGSPEDNEQKQLFVEQHKHYLDEIIEQISEFSKRVILADANLDKVLSAYNKHRDKPIREQAENIIHLFTLTNLGAPAAFKYFDTTIDRKRYTSTKEVLDATLIHQSITGLYETRIDLSQLGGDGGEAAAKGSSGGSGGTLQLEEEYRLFEPESTQKQEMDIWLKNFPQAWAETGGMGTAHCQAPVLIQLKATATPISIRQYPMPHEAYQGIKPHIRRMLDQGILKPCQSPWNTPLLPVKKPGTEDYRPVQDLREVNKRVEDIHPTVPNPYNLLSTLPPSHPWYTVLDLKDAFFCLRLHSESQLLFAFEWRDPEIGLSGQLTWTRLPQGFKNSPTLFNEALHSDLADFRVRYPALVLLQYVDDLLLAAATRTECLEGTKALLETLGNKGYRASAKKAQICLQEVTYLGYSLKDGQRWLTKARKEAILSIPVPKNSRQVREFLGKAGYCRLFIPGFAELAAPLYPLTRPGTLFQWGTEQQLAFEDIKKALLSSPALGLPDITKPFELFIDENSGFAKGVLVQKLGPWKRPVAYLSKKLDTVASGWPPCLRMVAAIAILVKDAGKLTLGQPLTILTSHPVEALVRQPPNKWLSNARMTHYQAMLLDAERVHFGPTVSLNPATLLPLPSGGNHHDCLQILAETHGTRPDLTDQPLPDADLTWYTDGSSFIRNGEREAGAAVTTESEVIWAAPLPPGTSAQRAELIALTQALKMAEGKKLTVYTDSRYAFATTHVHGEIYRRRGWLTSEGKEIKNKNEILALLEALFLPKRLSIIHCPGHQKGDSPQAKGNRLADDTAKKAATETHSSLTVLPAGKRTADGSEFEKRTADGSEFESPKKKAKVE

SEQ ID NO: 1235 - protein, 2095 aa, synthetic construct
  source 1..2095: note = Description of Artificial Sequence: Synthetic polypeptide
MPAAKRVKLDGGDKKYSIGLDIGTNSVGWAVITDEYKVPSKKFKVLGNTDRHSIKKNLIGALLFDSGETAEATRLKRTARRRYTRRKNRICYLQEIFSNEMAKVDDSFFHRLEESFLVEEDKKHERHPIFGNIVDEVAYHEKYPTIYHLRKKLVDSTDKADLRLIYLALAHMIKFRGHFLIEGDLNPDNSDVDKLFIQLVQTYNQLFEENPINASGVDAKAILSARLSKSRRLENLIAQLPGEKKNGLFGNLIALSLGLTPNFKSNFDLAEDAKLQLSKDTYDDDLDNLLAQIGDQYADLFLAAKNLSDAILLSDILRVNTEITKAPLSASMIKRYDEHHQDLTLLKALVRQQLPEKYKEIFFDQSKNGYAGYIDGGASQEEFYKFIKPILEKMDGTEELLVKLNREDLLRKQRTFDNGSIPHQIHLGELHAILRRQEDFYPFLKDNREKIEKILTFRIPYYVGPLARGNSRFAWMTRKSEETITPWNFEEVVDKGASAQSFIERMTNFDKNLPNEKVLPKHSLLYEYFTVYNELTKVKYVTEGMRKPAFLSGEQKKAIVDLLFKTNRKVTVKQLKEDYFKKIECFDSVEISGVEDRFNASLGTYHDLLKIIKDKDFLDNEENEDILEDIVLTLTLFEDREMIEERLKTYAHLFDDKVMKQLKRRRYTGWGRLSRKLINGIRDKQSGKTILDFLKSDGFANRNFMQLIHDDSLTFKEDIQKAQVSGQGDSLHEHIANLAGSPAIKKGILQTVKVVDELVKVMGRHKPENIVIEMARENQTTQKGQKNSRERMKRIEEGIKELGSQILKEHPVENTQLQNEKLYLYYLQNGRDMYVDQELDINRLSDYDVDHIVPQSFLKDDSIDNKVLTRSDKARGKSDNVPSEEVVKKMKNYWRQLLNAKLITQRKFDNLTKAERGGLSELDKAGFIKRQLVETRQITKHVAQILDSRMNTKYDENDKLIREVKVITLKSKLVSDFRKDFQFYKVREINNYHHAHDAYLNAVVGTALIKKYPKLESEFVYGDYKVYDVRKMIAKSEQEIGKATAKYFFYSNIMNFFKTEITLANGEIRKRPLIETNGETGEIVWDKGRDFATVRKVLSMPQVNIVKKTEVQTGGFSKESILPKRNSDKLIARKKDWDPKKYGGFDSPTVAYSVLVVAKVEKGKSKKLKSVKELLGITIMERSSFEKNPIDFLEAKGYKEVKKDLIIKLPKYSLFELENGRKRMLASAGELQKGNELALPSKYVNFLYLASHYEKLKGSPEDNEQKQLFVEQHKHYLDEIIEQISEFSKRVILADANLDKVLSAYNKHRDKPIREQAENIIHLFTLTNLGAPAAFKYFDTTIDRKRYTSTKEVLDATLIHQSITGLYETRIDLSQLGGDGGEAAAKGGGGGSGGTLQLEEEYRLFEPESTQKQEMDIWLKNFPQAWAETGGMGTAHCQAPVLIQLKATATPISIRQYPMPHEAYQGIKPHIRRMLDQGILKPCQSPWNTPLLPVKKPGTEDYRPVQDLREVNKRVEDIHPTVPNPYNLLSTLPPSHPWYTVLDLKDAFFCLRLHSESQLLFAFEWRDPEIGLSGQLTWTRLPQGFKNSPTLFNEALHSDLADFRVRYPALVLLQYVDDLLLAAATRTECLEGTKALLETLGNKGYRASAKKAQICLQEVTYLGYSLKDGQRWLTKARKEAILSIPVPKNSRQVREFLGKAGYCRLFIPGFAELAAPLYPLTRPGTLFQWGTEQQLAFEDIKKALLSSPALGLPDITKPFELFIDENSGFAKGVLVQKLGPWKRPVAYLSKKLDTVASGWPPCLRMVAAIAILVKDAGKLTLGQPLTILTSHPVEALVRQPPNKWLSNARMTHYQAMLLDAERVHFGPTVSLNPATLLPLPSGGNHHDCLQILAETHGTRPDLTDQPLPDADLTWYTDGSSFIRNGEREAGAAVTTESEVIWAAPLPPGTSAQRAELIALTQALKMAEGKKLTVYTDSRYAFATTHVHGEIYRRRGWLTSEGKEIKNKNEILALLEALFLPKRLSIIHCPGHQKGDSPQAKGNRLADDTAKKAATETHSSLTVLPAGKRTADGSEFEKRTADGSEFESPKKKAKVE

SEQ ID NO: 1236 - protein, 2092 aa, synthetic construct
  source 1..2092: note = Description of Artificial Sequence: Synthetic polypeptide
MPAAKRVKLDGGDKKYSIGLDIGTNSVGWAVITDEYKVPSKKFKVLGNTDRHSIKKNLIGALLFDSGETAEATRLKRTARRRYTRRKNRICYLQEIFSNEMAKVDDSFFHRLEESFLVEEDKKHERHPIFGNIVDEVAYHEKYPTIYHLRKKLVDSTDKADLRLIYLALAHMIKFRGHFLIEGDLNPDNSDVDKLFIQLVQTYNQLFEENPINASGVDAKAILSARLSKSRRLENLIAQLPGEKKNGLFGNLIALSLGLTPNFKSNFDLAEDAKLQLSKDTYDDDLDNLLAQIGDQYADLFLAAKNLSDAILLSDILRVNTEITKAPLSASMIKRYDEHHQDLTLLKALVRQQLPEKYKEIFFDQSKNGYAGYIDGGASQEEFYKFIKPILEKMDGTEELLVKLNREDLLRKQRTFDNGSIPHQIHLGELHAILRRQEDFYPFLKDNREKIEKILTFRIPYYVGPLARGNSRFAWMTRKSEETITPWNFEEVVDKGASAQSFIERMTNFDKNLPNEKVLPKHSLLYEYFTVYNELTKVKYVTEGMRKPAFLSGEQKKAIVDLLFKTNRKVTVKQLKEDYFKKIECFDSVEISGVEDRFNASLGTYHDLLKIIKDKDFLDNEENEDILEDIVLTLTLFEDREMIEERLKTYAHLFDDKVMKQLKRRRYTGWGRLSRKLINGIRDKQSGKTILDFLKSDGFANRNFMQLIHDDSLTFKEDIQKAQVSGQGDSLHEHIANLAGSPAIKKGILQTVKVVDELVKVMGRHKPENIVIEMARENQTTQKGQKNSRERMKRIEEGIKELGSQILKEHPVENTQLQNEKLYLYYLQNGRDMYVDQELDINRLSDYDVDHIVPQSFLKDDSIDNKVLTRSDKARGKSDNVPSEEVVKKMKNYWRQLLNAKLITQRKFDNLTKAERGGLSELDKAGFIKRQLVETRQITKHVAQILDSRMNTKYDENDKLIREVKVITLKSKLVSDFRKDFQFYKVREINNYHHAHDAYLNAVVGTALIKKYPKLESEFVYGDYKVYDVRKMIAKSEQEIGKATAKYFFYSNIMNFFKTEITLANGEIRKRPLIETNGETGEIVWDKGRDFATVRKVLSMPQVNIVKKTEVQTGGFSKESILPKRNSDKLIARKKDWDPKKYGGFDSPTVAYSVLVVAKVEKGKSKKLKSVKELLGITIMERSSFEKNPIDFLEAKGYKEVKKDLIIKLPKYSLFELENGRKRMLASAGELQKGNELALPSKYVNFLYLASHYEKLKGSPEDNEQKQLFVEQHKHYLDEIIEQISEFSKRVILADANLDKVLSAYNKHRDKPIREQAENIIHLFTLTNLGAPAAFKYFDTTIDRKRYTSTKEVLDATLIHQSITGLYETRIDLSQLGGDGGGSSEAAAKGGTLQLEEEYRLFEPESTQKQEMDIWLKNFPQAWAETGGMGTAHCQAPVLIQLKATATPISIRQYPMPHEAYQGIKPHIRRMLDQGILKPCQSPWNTPLLPVKKPGTEDYRPVQDLREVNKRVEDIHPTVPNPYNLLSTLPPSHPWYTVLDLKDAFFCLRLHSESQLLFAFEWRDPEIGLSGQLTWTRLPQGFKNSPTLFNEALHSDLADFRVRYPALVLLQYVDDLLLAAATRTECLEGTKALLETLGNKGYRASAKKAQICLQEVTYLGYSLKDGQRWLTKARKEAILSIPVPKNSRQVREFLGKAGYCRLFIPGFAELAAPLYPLTRPGTLFQWGTEQQLAFEDIKKALLSSPALGLPDITKPFELFIDENSGFAKGVLVQKLGPWKRPVAYLSKKLDTVASGWPPCLRMVAAIAILVKDAGKLTLGQPLTILTSHPVEALVRQPPNKWLSNARMTHYQAMLLDAERVHFGPTVSLNPATLLPLPSGGNHHDCLQILAETHGTRPDLTDQPLPDADLTWYTDGSSFIRNGEREAGAAVTTESEVIWAAPLPPGTSAQRAELIALTQALKMAEGKKLTVYTDSRYAFATTHVHGEIYRRRGWLTSEGKEIKNKNEILALLEALFLPKRLSIIHCPGHQKGDSPQAKGNRLADDTAKKAATETHSSLTVLPAGKRTADGSEFEKRTADGSEFESPKKKAKVE

SEQ ID NO: 1237 - protein, 2095 aa, synthetic construct
  source 1..2095: note = Description of Artificial Sequence: Synthetic polypeptide
MPAAKRVKLDGGDKKYSIGLDIGTNSVGWAVITDEYKVPSKKFKVLGNTDRHSIKKNLIGALLFDSGETAEATRLKRTARRRYTRRKNRICYLQEIFSNEMAKVDDSFFHRLEESFLVEEDKKHERHPIFGNIVDEVAYHEKYPTIYHLRKKLVDSTDKADLRLIYLALAHMIKFRGHFLIEGDLNPDNSDVDKLFIQLVQTYNQLFEENPINASGVDAKAILSARLSKSRRLENLIAQLPGEKKNGLFGNLIALSLGLTPNFKSNFDLAEDAKLQLSKDTYDDDLDNLLAQIGDQYADLFLAAKNLSDAILLSDILRVNTEITKAPLSASMIKRYDEHHQDLTLLKALVRQQLPEKYKEIFFDQSKNGYAGYIDGGASQEEFYKFIKPILEKMDGTEELLVKLNREDLLRKQRTFDNGSIPHQIHLGELHAILRRQEDFYPFLKDNREKIEKILTFRIPYYVGPLARGNSRFAWMTRKSEETITPWNFEEVVDKGASAQSFIERMTNFDKNLPNEKVLPKHSLLYEYFTVYNELTKVKYVTEGMRKPAFLSGEQKKAIVDLLFKTNRKVTVKQLKEDYFKKIECFDSVEISGVEDRFNASLGTYHDLLKIIKDKDFLDNEENEDILEDIVLTLTLFEDREMIEERLKTYAHLFDDKVMKQLKRRRYTGWGRLSRKLINGIRDKQSGKTILDFLKSDGFANRNFMQLIHDDSLTFKEDIQKAQVSGQGDSLHEHIANLAGSPAIKKGILQTVKVVDELVKVMGRHKPENIVIEMARENQTTQKGQKNSRERMKRIEEGIKELGSQILKEHPVENTQLQNEKLYLYYLQNGRDMYVDQELDINRLSDYDVDHIVPQSFLKDDSIDNKVLTRSDKARGKSDNVPSEEVVKKMKNYWRQLLNAKLITQRKFDNLTKAERGGLSELDKAGFIKRQLVETRQITKHVAQILDSRMNTKYDENDKLIREVKVITLKSKLVSDFRKDFQFYKVREINNYHHAHDAYLNAVVGTALIKKYPKLESEFVYGDYKVYDVRKMIAKSEQEIGKATAKYFFYSNIMNFFKTEITLANGEIRKRPLIETNGETGEIVWDKGRDFATVRKVLSMPQVNIVKKTEVQTGGFSKESILPKRNSDKLIARKKDWDPKKYGGFDSPTVAYSVLVVAKVEKGKSKKLKSVKELLGITIMERSSFEKNPIDFLEAKGYKEVKKDLIIKLPKYSLFELENGRKRMLASAGELQKGNELALPSKYVNFLYLASHYEKLKGSPEDNEQKQLFVEQHKHYLDEIIEQISEFSKRVILADANLDKVLSAYNKHRDKPIREQAENIIHLFTLTNLGAPAAFKYFDTTIDRKRYTSTKEVLDATLIHQSITGLYETRIDLSQLGGDGGGGSEAAAKGGGGGTLQLEEEYRLFEPESTQKQEMDIWLKNFPQAWAETGGMGTAHCQAPVLIQLKATATPISIRQYPMPHEAYQGIKPHIRRMLDQGILKPCQSPWNTPLLPVKKPGTEDYRPVQDLREVNKRVEDIHPTVPNPYNLLSTLPPSHPWYTVLDLKDAFFCLRLHSESQLLFAFEWRDPEIGLSGQLTWTRLPQGFKNSPTLFNEALHSDLADFRVRYPALVLLQYVDDLLLAAATRTECLEGTKALLETLGNKGYRASAKKAQICLQEVTYLGYSLKDGQRWLTKARKEAILSIPVPKNSRQVREFLGKAGYCRLFIPGFAELAAPLYPLTRPGTLFQWGTEQQLAFEDIKKALLSSPALGLPDITKPFELFIDENSGFAKGVLVQKLGPWKRPVAYLSKKLDTVASGWPPCLRMVAAIAILVKDAGKLTLGQPLTILTSHPVEALVRQPPNKWLSNARMTHYQAMLLDAERVHFGPTVSLNPATLLPLPSGGNHHDCLQILAETHGTRPDLTDQPLPDADLTWYTDGSSFIRNGEREAGAAVTTESEVIWAAPLPPGTSAQRAELIALTQALKMAEGKKLTVYTDSRYAFATTHVHGEIYRRRGWLTSEGKEIKNKNEILALLEALFLPKRLSIIHCPGHQKGDSPQAKGNRLADDTAKKAATETHSSLTVLPAGKRTADGSEFEKRTADGSEFESPKKKAKVE

SEQ ID NO: 1238 - protein, 2093 aa, synthetic construct
  source 1..2093: note = Description of Artificial Sequence: Synthetic polypeptide
MPAAKRVKLDGGDKKYSIGLDIGTNSVGWAVITDEYKVPSKKFKVLGNTDRHSIKKNLIGALLFDSGETAEATRLKRTARRRYTRRKNRICYLQEIFSNEMAKVDDSFFHRLEESFLVEEDKKHERHPIFGNIVDEVAYHEKYPTIYHLRKKLVDSTDKADLRLIYLALAHMIKFRGHFLIEGDLNPDNSDVDKLFIQLVQTYNQLFEENPINASGVDAKAILSARLSKSRRLENLIAQLPGEKKNGLFGNLIALSLGLTPNFKSNFDLAEDAKLQLSKDTYDDDLDNLLAQIGDQYADLFLAAKNLSDAILLSDILRVNTEITKAPLSASMIKRYDEHHQDLTLLKALVRQQLPEKYKEIFFDQSKNGYAGYIDGGASQEEFYKFIKPILEKMDGTEELLVKLNREDLLRKQRTFDNGSIPHQIHLGELHAILRRQEDFYPFLKDNREKIEKILTFRIPYYVGPLARGNSRFAWMTRKSEETITPWNFEEVVDKGASAQSFIERMTNFDKNLPNEKVLPKHSLLYEYFTVYNELTKVKYVTEGMRKPAFLSGEQKKAIVDLLFKTNRKVTVKQLKEDYFKKIECFDSVEISGVEDRFNASLGTYHDLLKIIKDKDFLDNEENEDILEDIVLTLTLFEDREMIEERLKTYAHLFDDKVMKQLKRRRYTGWGRLSRKLINGIRDKQSGKTILDFLKSDGFANRNFMQLIHDDSLTFKEDIQKAQVSGQGDSLHEHIANLAGSPAIKKGILQTVKVVDELVKVMGRHKPENIVIEMARENQTTQKGQKNSRERMKRIEEGIKELGSQILKEHPVENTQLQNEKLYLYYLQNGRDMYVDQELDINRLSDYDVDHIVPQSFLKDDSIDNKVLTRSDKARGKSDNVPSEEVVKKMKNYWRQLLNAKLITQRKFDNLTKAERGGLSELDKAGFIKRQLVETRQITKHVAQILDSRMNTKYDENDKLIREVKVITLKSKLVSDFRKDFQFYKVREINNYHHAHDAYLNAVVGTALIKKYPKLESEFVYGDYKVYDVRKMIAKSEQEIGKATAKYFFYSNIMNFFKTEITLANGEIRKRPLIETNGETGEIVWDKGRDFATVRKVLSMPQVNIVKKTEVQTGGFSKESILPKRNSDKLIARKKDWDPKKYGGFDSPTVAYSVLVVAKVEKGKSKKLKSVKELLGITIMERSSFEKNPIDFLEAKGYKEVKKDLIIKLPKYSLFELENGRKRMLASAGELQKGNELALPSKYVNFLYLASHYEKLKGSPEDNEQKQLFVEQHKHYLDEIIEQISEFSKRVILADANLDKVLSAYNKHRDKPIREQAENIIHLFTLTNLGAPAAFKYFDTTIDRKRYTSTKEVLDATLIHQSITGLYETRIDLSQLGGDGGPAPGSSGGGGGTLQLEEEYRLFEPESTQKQEMDIWLKNFPQAWAETGGMGTAHCQAPVLIQLKATATPISIRQYPMPHEAYQGIKPHIRRMLDQGILKPCQSPWNTPLLPVKKPGTEDYRPVQDLREVNKRVEDIHPTVPNPYNLLSTLPPSHPWYTVLDLKDAFFCLRLHSESQLLFAFEWRDPEIGLSGQLTWTRLPQGFKNSPTLFNEALHSDLADFRVRYPALVLLQYVDDLLLAAATRTECLEGTKALLETLGNKGYRASAKKAQICLQEVTYLGYSLKDGQRWLTKARKEAILSIPVPKNSRQVREFLGKAGYCRLFIPGFAELAAPLYPLTRPGTLFQWGTEQQLAFEDIKKALLSSPALGLPDITKPFELFIDENSGFAKGVLVQKLGPWKRPVAYLSKKLDTVASGWPPCLRMVAAIAILVKDAGKLTLGQPLTILTSHPVEALVRQPPNKWLSNARMTHYQAMLLDAERVHFGPTVSLNPATLLPLPSGGNHHDCLQILAETHGTRPDLTDQPLPDADLTWYTDGSSFIRNGEREAGAAVTTESEVIWAAPLPPGTSAQRAELIALTQALKMAEGKKLTVYTDSRYAFATTHVHGEIYRRRGWLTSEGKEIKNKNEILALLEALFLPKRLSIIHCPGHQKGDSPQAKGNRLADDTAKKAATETHSSLTVLPAGKRTADGSEFEKRTADGSEFESPKKKAKVE

SEQ ID NO: 1239 - protein, 2095 aa, synthetic construct
  source 1..2095: note = Description of Artificial Sequence: Synthetic polypeptide
MPAAKRVKLDGGDKKYSIGLDIGTNSVGWAVITDEYKVPSKKFKVLGNTDRHSIKKNLIGALLFDSGETAEATRLKRTARRRYTRRKNRICYLQEIFSNEMAKVDDSFFHRLEESFLVEEDKKHERHPIFGNIVDEVAYHEKYPTIYHLRKKLVDSTDKADLRLIYLALAHMIKFRGHFLIEGDLNPDNSDVDKLFIQLVQTYNQLFEENPINASGVDAKAILSARLSKSRRLENLIAQLPGEKKNGLFGNLIALSLGLTPNFKSNFDLAEDAKLQLSKDTYDDDLDNLLAQIGDQYADLFLAAKNLSDAILLSDILRVNTEITKAPLSASMIKRYDEHHQDLTLLKALVRQQLPEKYKEIFFDQSKNGYAGYIDGGASQEEFYKFIKPILEKMDGTEELLVKLNREDLLRKQRTFDNGSIPHQIHLGELHAILRRQEDFYPFLKDNREKIEKILTFRIPYYVGPLARGNSRFAWMTRKSEETITPWNFEEVVDKGASAQSFIERMTNFDKNLPNEKVLPKHSLLYEYFTVYNELTKVKYVTEGMRKPAFLSGEQKKAIVDLLFKTNRKVTVKQLKEDYFKKIECFDSVEISGVEDRFNASLGTYHDLLKIIKDKDFLDNEENEDILEDIVLTLTLFEDREMIEERLKTYAHLFDDKVMKQLKRRRYTGWGRLSRKLINGIRDKQSGKTILDFLKSDGFANRNFMQLIHDDSLTFKEDIQKAQVSGQGDSLHEHIANLAGSPAIKKGILQTVKVVDELVKVMGRHKPENIVIEMARENQTTQKGQKNSRERMKRIEEGIKELGSQILKEHPVENTQLQNEKLYLYYLQNGRDMYVDQELDINRLSDYDVDHIVPQSFLKDDSIDNKVLTRSDKARGKSDNVPSEEVVKKMKNYWRQLLNAKLITQRKFDNLTKAERGGLSELDKAGFIKRQLVETRQITKHVAQILDSRMNTKYDENDKLIREVKVITLKSKLVSDFRKDFQFYKVREINNYHHAHDAYLNAVVGTALIKKYPKLESEFVYGDYKVYDVRKMIAKSEQEIGKATAKYFFYSNIMNFFKTEITLANGEIRKRPLIETNGETGEIVWDKGRDFATVRKVLSMPQVNIVKKTEVQTGGFSKESILPKRNSDKLIARKKDWDPKKYGGFDSPTVAYSVLVVAKVEKGKSKKLKSVKELLGITIMERSSFEKNPIDFLEAKGYKEVKKDLIIKLPKYSLFELENGRKRMLASAGELQKGNELALPSKYVNFLYLASHYEKLKGSPEDNEQKQLFVEQHKHYLDEIIEQISEFSKRVILADANLDKVLSAYNKHRDKPIREQAENIIHLFTLTNLGAPAAFKYFDTTIDRKRYTSTKEVLDATLIHQSITGLYETRIDLSQLGGDGGPAPGGSEAAAKGGTLQLEEEYRLFEPESTQKQEMDIWLKNFPQAWAETGGMGTAHCQAPVLIQLKATATPISIRQYPMPHEAYQGIKPHIRRMLDQGILKPCQSPWNTPLLPVKKPGTEDYRPVQDLREVNKRVEDIHPTVPNPYNLLSTLPPSHPWYTVLDLKDAFFCLRLHSESQLLFAFEWRDPEIGLSGQLTWTRLPQGFKNSPTLFNEALHSDLADFRVRYPALVLLQYVDDLLLAAATRTECLEGTKALLETLGNKGYRASAKKAQICLQEVTYLGYSLKDGQRWLTKARKEAILSIPVPKNSRQVREFLGKAGYCRLFIPGFAELAAPLYPLTRPGTLFQWGTEQQLAFEDIKKALLSSPALGLPDITKPFELFIDENSGFAKGVLVQKLGPWKRPVAYLSKKLDTVASGWPPCLRMVAAIAILVKDAGKLTLGQPLTILTSHPVEALVRQPPNKWLSNARMTHYQAMLLDAERVHFGPTVSLNPATLLPLPSGGNHHDCLQILAETHGTRPDLTDQPLPDADLTWYTDGSSFIRNGEREAGAAVTTESEVIWAAPLPPGTSAQRAELIALTQALKMAEGKKLTVYTDSRYAFATTHVHGEIYRRRGWLTSEGKEIKNKNEILALLEALFLPKRLSIIHCPGHQKGDSPQAKGNRLADDTAKKAATETHSSLTVLPAGKRTADGSEFEKRTADGSEFESPKKKAKVE

SEQ ID NO: 1240 - protein, 2093 aa, synthetic construct
  source 1..2093: note = Description of Artificial Sequence: Synthetic polypeptide
MPAAKRVKLDGGDKKYSIGLDIGTNSVGWAVITDEYKVPSKKFKVLGNTDRHSIKKNLIGALLFDSGETAEATRLKRTARRRYTRRKNRICYLQEIFSNEMAKVDDSFFHRLEESFLVEEDKKHERHPIFGNIVDEVAYHEKYPTIYHLRKKLVDSTDKADLRLIYLALAHMIKFRGHFLIEGDLNPDNSDVDKLFIQLVQTYNQLFEENPINASGVDAKAILSARLSKSRRLENLIAQLPGEKKNGLFGNLIALSLGLTPNFKSNFDLAEDAKLQLSKDTYDDDLDNLLAQIGDQYADLFLAAKNLSDAILLSDILRVNTEITKAPLSASMIKRYDEHHQDLTLLKALVRQQLPEKYKEIFFDQSKNGYAGYIDGGASQEEFYKFIKPILEKMDGTEELLVKLNREDLLRKQRTFDNGSIPHQIHLGELHAILRRQEDFYPFLKDNREKIEKILTFRIPYYVGPLARGNSRFAWMTRKSEETITPWNFEEVVDKGASAQSFIERMTNFDKNLPNEKVLPKHSLLYEYFTVYNELTKVKYVTEGMRKPAFLSGEQKKAIVDLLFKTNRKVTVKQLKEDYFKKIECFDSVEISGVEDRFNASLGTYHDLLKIIKDKDFLDNEENEDILEDIVLTLTLFEDREMIEERLKTYAHLFDDKVMKQLKRRRYTGWGRLSRKLINGIRDKQSGKTILDFLKSDGFANRNFMQLIHDDSLTFKEDIQKAQVSGQGDSLHEHIANLAGSPAIKKGILQTVKVVDELVKVMGRHKPENIVIEMARENQTTQKGQKNSRERMKRIEEGIKELGSQILKEHPVENTQLQNEKLYLYYLQNGRDMYVDQELDINRLSDYDVDHIVPQSFLKDDSIDNKVLTRSDKARGKSDNVPSEEVVKKMKNYWRQLLNAKLITQRKFDNLTKAERGGLSELDKAGFIKRQLVETRQITKHVAQILDSRMNTKYDENDKLIREVKVITLKSKLVSDFRKDFQFYKVREINNYHHAHDAYLNAVVGTALIKKYPKLESEFVYGDYKVYDVRKMIAKSEQEIGKATAKYFFYSNIMNFFKTEITLANGEIRKRPLIETNGETGEIVWDKGRDFATVRKVLSMPQVNIVKKTEVQTGGFSKESILPKRNSDKLIARKKDWDPKKYGGFDSPTVAYSVLVVAKVEKGKSKKLKSVKELLGITIMERSSFEKNPIDFLEAKGYKEVKKDLIIKLPKYSLFELENGRKRMLASAGELQKGNELALPSKYVNFLYLASHYEKLKGSPEDNEQKQLFVEQHKHYLDEIIEQISEFSKRVILADANLDKVLSAYNKHRDKPIREQAENIIHLFTLTNLGAPAAFKYFDTTIDRKRYTSTKEVLDATLIHQSITGLYETRIDLSQLGGDGGGSSGGGPAPGGTLQLEEEYRLFEPESTQKQEMDIWLKNFPQAWAETGGMGTAHCQAPVLIQLKATATPISIRQYPMPHEAYQGIKPHIRRMLDQGILKPCQSPWNTPLLPVKKPGTEDYRPVQDLREVNKRVEDIHPTVPNPYNLLSTLPPSHPWYTVLDLKDAFFCLRLHSESQLLFAFEWRDPEIGLSGQLTWTRLPQGFKNSPTLFNEALHSDLADFRVRYPALVLLQYVDDLLLAAATRTECLEGTKALLETLGNKGYRASAKKAQICLQEVTYLGYSLKDGQRWLTKARKEAILSIPVPKNSRQVREFLGKAGYCRLFIPGFAELAAPLYPLTRPGTLFQWGTEQQLAFEDIKKALLSSPALGLPDITKPFELFIDENSGFAKGVLVQKLGPWKRPVAYLSKKLDTVASGWPPCLRMVAAIAILVKDAGKLTLGQPLTILTSHPVEALVRQPPNKWLSNARMTHYQAMLLDAERVHFGPTVSLNPATLLPLPSGGNHHDCLQILAETHGTRPDLTDQPLPDADLTWYTDGSSFIRNGEREAGAAVTTESEVIWAAPLPPGTSAQRAELIALTQALKMAEGKKLTVYTDSRYAFATTHVHGEIYRRRGWLTSEGKEIKNKNEILALLEALFLPKRLSIIHCPGHQKGDSPQAKGNRLADDTAKKAATETHSSLTVLPAGKRTADGSEFEKRTADGSEFESPKKKAKVE

SEQ ID NO: 1241 - protein, 2095 aa, synthetic construct
  source 1..2095: note = Description of Artificial Sequence: Synthetic polypeptide
MPAAKRVKLDGGDKKYSIGLDIGTNSVGWAVITDEYKVPSKKFKVLGNTDRHSIKKNLIGALLFDSGETAEATRLKRTARRRYTRRKNRICYLQEIFSNEMAKVDDSFFHRLEESFLVEEDKKHERHPIFGNIVDEVAYHEKYPTIYHLRKKLVDSTDKADLRLIYLALAHMIKFRGHFLIEGDLNPDNSDVDKLFIQLVQTYNQLFEENPINASGVDAKAILSARLSKSRRLENLIAQLPGEKKNGLFGNLIALSLGLTPNFKSNFDLAEDAKLQLSKDTYDDDLDNLLAQIGDQYADLFLAAKNLSDAILLSDILRVNTEITKAPLSASMIKRYDEHHQDLTLLKALVRQQLPEKYKEIFFDQSKNGYAGYIDGGASQEEFYKFIKPILEKMDGTEELLVKLNREDLLRKQRTFDNGSIPHQIHLGELHAILRRQEDFYPFLKDNREKIEKILTFRIPYYVGPLARGNSRFAWMTRKSEETITPWNFEEVVDKGASAQSFIERMTNFDKNLPNEKVLPKHSLLYEYFTVYNELTKVKYVTEGMRKPAFLSGEQKKAIVDLLFKTNRKVTVKQLKEDYFKKIECFDSVEISGVEDRFNASLGTYHDLLKIIKDKDFLDNEENEDILEDIVLTLTLFEDREMIEERLKTYAHLFDDKVMKQLKRRRYTGWGRLSRKLINGIRDKQSGKTILDFLKSDGFANRNFMQLIHDDSLTFKEDIQKAQVSGQGDSLHEHIANLAGSPAIKKGILQTVKVVDELVKVMGRHKPENIVIEMARENQTTQKGQKNSRERMKRIEEGIKELGSQILKEHPVENTQLQNEKLYLYYLQNGRDMYVDQELDINRLSDYDVDHIVPQSFLKDDSIDNKVLTRSDKARGKSDNVPSEEVVKKMKNYWRQLLNAKLITQRKFDNLTKAERGGLSELDKAGFIKRQLVETRQITKHVAQILDSRMNTKYDENDKLIREVKVITLKSKLVSDFRKDFQFYKVREINNYHHAHDAYLNAVVGTALIKKYPKLESEFVYGDYKVYDVRKMIAKSEQEIGKATAKYFFYSNIMNFFKTEITLANGEIRKRPLIETNGETGEIVWDKGRDFATVRKVLSMPQVNIVKKTEVQTGGFSKESILPKRNSDKLIARKKDWDPKKYGGFDSPTVAYSVLVVAKVEKGKSKKLKSVKELLGITIMERSSFEKNPIDFLEAKGYKEVKKDLIIKLPKYSLFELENGRKRMLASAGELQKGNELALPSKYVNFLYLASHYEKLKGSPEDNEQKQLFVEQHKHYLDEIIEQISEFSKRVILADANLDKVLSAYNKHRDKPIREQAENIIHLFTLTNLGAPAAFKYFDTTIDRKRYTSTKEVLDATLIHQSITGLYETRIDLSQLGGDGGEAAAKGGSGSSGGTLQLEEEYRLFEPESTQKQEMDIWLKNFPQAWAETGGMGTAHCQAPVLIQLKATATPISIRQYPMPHEAYQGIKPHIRRMLDQGILKPCQSPWNTPLLPVKKPGTEDYRPVQDLREVNKRVEDIHPTVPNPYNLLSTLPPSHPWYTVLDLKDAFFCLRLHSESQLLFAFEWRDPEIGLSGQLTWTRLPQGFKNSPTLFNEALHSDLADFRVRYPALVLLQYVDDLLLAAATRTECLEGTKALLETLGNKGYRASAKKAQICLQEVTYLGYSLKDGQRWLTKARKEAILSIPVPKNSRQVREFLGKAGYCRLFIPGFAELAAPLYPLTRPGTLFQWGTEQQLAFEDIKKALLSSPALGLPDITKPFELFIDENSGFAKGVLVQKLGPWKRPVAYLSKKLDTVASGWPPCLRMVAAIAILVKDAGKLTLGQPLTILTSHPVEALVRQPPNKWLSNARMTHYQAMLLDAERVHFGPTVSLNPATLLPLPSGGNHHDCLQILAETHGTRPDLTDQPLPDADLTWYTDGSSFIRNGEREAGAAVTTESEVIWAAPLPPGTSAQRAELIALTQALKMAEGKKLTVYTDSRYAFATTHVHGEIYRRRGWLTSEGKEIKNKNEILALLEALFLPKRLSIIHCPGHQKGDSPQAKGNRLADDTAKKAATETHSSLTVLPAGKRTADGSEFEKRTADGSEFESPKKKAKVE

SEQ ID NO: 1242 - protein, 2095 aa, synthetic construct
  source 1..2095: note = Description of Artificial Sequence: Synthetic polypeptide
MPAAKRVKLDGGDKKYSIGLDIGTNSVGWAVITDEYKVPSKKFKVLGNTDRHSIKKNLIGALLFDSGETAEATRLKRTARRRYTRRKNRICYLQEIFSNEMAKVDDSFFHRLEESFLVEEDKKHERHPIFGNIVDEVAYHEKYPTIYHLRKKLVDSTDKADLRLIYLALAHMIKFRGHFLIEGDLNPDNSDVDKLFIQLVQTYNQLFEENPINASGVDAKAILSARLSKSRRLENLIAQLPGEKKNGLFGNLIALSLGLTPNFKSNFDLAEDAKLQLSKDTYDDDLDNLLAQIGDQYADLFLAAKNLSDAILLSDILRVNTEITKAPLSASMIKRYDEHHQDLTLLKALVRQQLPEKYKEIFFDQSKNGYAGYIDGGASQEEFYKFIKPILEKMDGTEELLVKLNREDLLRKQRTFDNGSIPHQIHLGELHAILRRQEDFYPFLKDNREKIEKILTFRIPYYVGPLARGNSRFAWMTRKSEETITPWNFEEVVDKGASAQSFIERMTNFDKNLPNEKVLPKHSLLYEYFTVYNELTKVKYVTEGMRKPAFLSGEQKKAIVDLLFKTNRKVTVKQLKEDYFKKIECFDSVEISGVEDRFNASLGTYHDLLKIIKDKDFLDNEENEDILEDIVLTLTLFEDREMIEERLKTYAHLFDDKVMKQLKRRRYTGWGRLSRKLINGIRDKQSGKTILDFLKSDGFANRNFMQLIHDDSLTFKEDIQKAQVSGQGDSLHEHIANLAGSPAIKKGILQTVKVVDELVKVMGRHKPENIVIEMARENQTTQKGQKNSRERMKRIEEGIKELGSQILKEHPVENTQLQNEKLYLYYLQNGRDMYVDQELDINRLSDYDVDHIVPQSFLKDDSIDNKVLTRSDKARGKSDNVPSEEVVKKMKNYWRQLLNAKLITQRKFDNLTKAERGGLSELDKAGFIKRQLVETRQITKHVAQILDSRMNTKYDENDKLIREVKVITLKSKLVSDFRKDFQFYKVREINNYHHAHDAYLNAVVGTALIKKYPKLESEFVYGDYKVYDVRKMIAKSEQEIGKATAKYFFYSNIMNFFKTEITLANGEIRKRPLIETNGETGEIVWDKGRDFATVRKVLSMPQVNIVKKTEVQTGGFSKESILPKRNSDKLIARKKDWDPKKYGGFDSPTVAYSVLVVAKVEKGKSKKLKSVKELLGITIMERSSFEKNPIDFLEAKGYKEVKKDLIIKLPKYSLFELENGRKRMLASAGELQKGNELALPSKYVNFLYLASHYEKLKGSPEDNEQKQLFVEQHKHYLDEIIEQISEFSKRVILADANLDKVLSAYNKHRDKPIREQAENIIHLFTLTNLGAPAAFKYFDTTIDRKRYTSTKEVLDATLIHQSITGLYETRIDLSQLGGDGGGSSGGSEAAAKGGTLQLEEEYRLFEPESTQKQEMDIWLKNFPQAWAETGGMGTAHCQAPVLIQLKATATPISIRQYPMPHEAYQGIKPHIRRMLDQGILKPCQSPWNTPLLPVKKPGTEDYRPVQDLREVNKRVEDIHPTVPNPYNLLSTLPPSHPWYTVLDLKDAFFCLRLHSESQLLFAFEWRDPEIGLSGQLTWTRLPQGFKNSPTLFNEALHSDLADFRVRYPALVLLQYVDDLLLAAATRTECLEGTKALLETLGNKGYRASAKKAQICLQEVTYLGYSLKDGQRWLTKARKEAILSIPVPKNSRQVREFLGKAGYCRLFIPGFAELAAPLYPLTRPGTLFQWGTEQQLAFEDIKKALLSSPALGLPDITKPFELFIDENSGFAKGVLVQKLGPWKRPVAYLSKKLDTVASGWPPCLRMVAAIAILVKDAGKLTLGQPLTILTSHPVEALVRQPPNKWLSNARMTHYQAMLLDAERVHFGPTVSLNPATLLPLPSGGNHHDCLQILAETHGTRPDLTDQPLPDADLTWYTDGSSFIRNGEREAGAAVTTESEVIWAAPLPPGTSAQRAELIALTQALKMAEGKKLTVYTDSRYAFATTHVHGEIYRRRGWLTSEGKEIKNKNEILALLEALFLPKRLSIIHCPGHQKGDSPQAKGNRLADDTAKKAATETHSSLTVLPAGKRTADGSEFEKRTADGSEFESPKKKAKVE

SEQ ID NO: 1243 - protein, 2099 aa, synthetic construct
  source 1..2099: note = Description of Artificial Sequence: Synthetic polypeptide
MPAAKRVKLDGGDKKYSIGLDIGTNSVGWAVITDEYKVPSKKFKVLGNTDRHSIKKNLIGALLFDSGETAEATRLKRTARRRYTRRKNRICYLQEIFSNEMAKVDDSFFHRLEESFLVEEDKKHERHPIFGNIVDEVAYHEKYPTIYHLRKKLVDSTDKADLRLIYLALAHMIKFRGHFLIEGDLNPDNSDVDKLFIQLVQTYNQLFEENPINASGVDAKAILSARLSKSRRLENLIAQLPGEKKNGLFGNLIALSLGLTPNFKSNFDLAEDAKLQLSKDTYDDDLDNLLAQIGDQYADLFLAAKNLSDAILLSDILRVNTEITKAPLSASMIKRYDEHHQDLTLLKALVRQQLPEKYKEIFFDQSKNGYAGYIDGGASQEEFYKFIKPILEKMDGTEELLVKLNREDLLRKQRTFDNGSIPHQIHLGELHAILRRQEDFYPFLKDNREKIEKILTFRIPYYVGPLARGNSRFAWMTRKSEETITPWNFEEVVDKGASAQSFIERMTNFDKNLPNEKVLPKHSLLYEYFTVYNELTKVKYVTEGMRKPAFLSGEQKKAIVDLLFKTNRKVTVKQLKEDYFKKIECFDSVEISGVEDRFNASLGTYHDLLKIIKDKDFLDNEENEDILEDIVLTLTLFEDREMIEERLKTYAHLFDDKVMKQLKRRRYTGWGRLSRKLINGIRDKQSGKTILDFLKSDGFANRNFMQLIHDDSLTFKEDIQKAQVSGQGDSLHEHIANLAGSPAIKKGILQTVKVVDELVKVMGRHKPENIVIEMARENQTTQKGQKNSRERMKRIEEGIKELGSQILKEHPVENTQLQNEKLYLYYLQNGRDMYVDQELDINRLSDYDVDHIVPQSFLKDDSIDNKVLTRSDKARGKSDNVPSEEVVKKMKNYWRQLLNAKLITQRKFDNLTKAERGGLSELDKAGFIKRQLVETRQITKHVAQILDSRMNTKYDENDKLIREVKVITLKSKLVSDFRKDFQFYKVREINNYHHAHDAYLNAVVGTALIKKYPKLESEFVYGDYKVYDVRKMIAKSEQEIGKATAKYFFYSNIMNFFKTEITLANGEIRKRPLIETNGETGEIVWDKGRDFATVRKVLSMPQVNIVKKTEVQTGGFSKESILPKRNSDKLIARKKDWDPKKYGGFDSPTVAYSVLVVAKVEKGKSKKLKSVKELLGITIMERSSFEKNPIDFLEAKGYKEVKKDLIIKLPKYSLFELENGRKRMLASAGELQKGNELALPSKYVNFLYLASHYEKLKGSPEDNEQKQLFVEQHKHYLDEIIEQISEFSKRVILADANLDKVLSAYNKHRDKPIREQAENIIHLFTLTNLGAPAAFKYFDTTIDRKRYTSTKEVLDATLIHQSITGLYETRIDLSQLGGDGGEAAAKGGGGSEAAAKGGTLQLEEEYRLFEPESTQKQEMDIWLKNFPQAWAETGGMGTAHCQAPVLIQLKATATPISIRQYPMPHEAYQGIKPHIRRMLDQGILKPCQSPWNTPLLPVKKPGTEDYRPVQDLREVNKRVEDIHPTVPNPYNLLSTLPPSHPWYTVLDLKDAFFCLRLHSESQLLFAFEWRDPEIGLSGQLTWTRLPQGFKNSPTLFNEALHSDLADFRVRYPALVLLQYVDDLLLAAATRTECLEGTKALLETLGNKGYRASAKKAQICLQEVTYLGYSLKDGQRWLTKARKEAILSIPVPKNSRQVREFLGKAGYCRLFIPGFAELAAPLYPLTRPGTLFQWGTEQQLAFEDIKKALLSSPALGLPDITKPFELFIDENSGFAKGVLVQKLGPWKRPVAYLSKKLDTVASGWPPCLRMVAAIAILVKDAGKLTLGQPLTILTSHPVEALVRQPPNKWLSNARMTHYQAMLLDAERVHFGPTVSLNPATLLPLPSGGNHHDCLQILAETHGTRPDLTDQPLPDADLTWYTDGSSFIRNGEREAGAAVTTESEVIWAAPLPPGTSAQRAELIALTQALKMAEGKKLTVYTDSRYAFATTHVHGEIYRRRGWLTSEGKEIKNKNEILALLEALFLPKRLSIIHCPGHQKGDSPQAKGNRLADDTAKKAATETHSSLTVLPAGKRTADGSEFEKRTADGSEFESPKKKAKVE

SEQ ID NO: 1244 - protein, 2093 aa, synthetic construct
  source 1..2093: note = Description of Artificial Sequence: Synthetic polypeptide
MPAAKRVKLDGGDKKYSIGLDIGTNSVGWAVITDEYKVPSKKFKVLGNTDRHSIKKNLIGALLFDSGETAEATRLKRTARRRYTRRKNRICYLQEIFSNEMAKVDDSFFHRLEESFLVEEDKKHERHPIFGNIVDEVAYHEKYPTIYHLRKKLVDSTDKADLRLIYLALAHMIKFRGHFLIEGDLNPDNSDVDKLFIQLVQTYNQLFEENPINASGVDAKAILSARLSKSRRLENLIAQLPGEKKNGLFGNLIALSLGLTPNFKSNFDLAEDAKLQLSKDTYDDDLDNLLAQIGDQYADLFLAAKNLSDAILLSDILRVNTEITKAPLSASMIKRYDEHHQDLTLLKALVRQQLPEKYKEIFFDQSKNGYAGYIDGGASQEEFYKFIKPILEKMDGTEELLVKLNREDLLRKQRTFDNGSIPHQIHLGELHAILRRQEDFYPFLKDNREKIEKILTFRIPYYVGPLARGNSRFAWMTRKSEETITPWNFEEVVDKGASAQSFIERMTNFDKNLPNEKVLPKHSLLYEYFTVYNELTKVKYVTEGMRKPAFLSGEQKKAIVDLLFKTNRKVTVKQLKEDYFKKIECFDSVEISGVEDRFNASLGTYHDLLKIIKDKDFLDNEENEDILEDIVLTLTLFEDREMIEERLKTYAHLFDDKVMKQLKRRRYTGWGRLSRKLINGIRDKQSGKTILDFLKSDGFANRNFMQLIHDDSLTFKEDIQKAQVSGQGDSLHEHIANLAGSPAIKKGILQTVKVVDELVKVMGRHKPENIVIEMARENQTTQKGQKNSRERMKRIEEGIKELGSQILKEHPVENTQLQNEKLYLYYLQNGRDMYVDQELDINRLSDYDVDHIVPQSFLKDDSIDNKVLTRSDKARGKSDNVPSEEVVKKMKNYWRQLLNAKLITQRKFDNLTKAERGGLSELDKAGFIKRQLVETRQITKHVAQILDSRMNTKYDENDKLIREVKVITLKSKLVSDFRKDFQFYKVREINNYHHAHDAYLNAVVGTALIKKYPKLESEFVYGDYKVYDVRKMIAKSEQEIGKATAKYFFYSNIMNFFKTEITLANGEIRKRPLIETNGETGEIVWDKGRDFATVRKVLSMPQVNIVKKTEVQTGGFSKESILPKRNSDKLIARKKDWDPKKYGGFDSPTVAYSVLVVAKVEKGKSKKLKSVKELLGITIMERSSFEKNPIDFLEAKGYKEVKKDLIIKLPKYSLFELENGRKRMLASAGELQKGNELALPSKYVNFLYLASHYEKLKGSPEDNEQKQLFVEQHKHYLDEIIEQISEFSKRVILADANLDKVLSAYNKHRDKPIREQAENIIHLFTLTNLGAPAAFKYFDTTIDRKRYTSTKEVLDATLIHQSITGLYETRIDLSQLGGDGGGGSGSSPAPGGTLQLEEEYRLFEPESTQKQEMDIWLKNFPQAWAETGGMGTAHCQAPVLIQLKATATPISIRQYPMPHEAYQGIKPHIRRMLDQGILKPCQSPWNTPLLPVKKPGTEDYRPVQDLREVNKRVEDIHPTVPNPYNLLSTLPPSHPWYTVLDLKDAFFCLRLHSESQLLFAFEWRDPEIGLSGQLTWTRLPQGFKNSPTLFNEALHSDLADFRVRYPALVLLQYVDDLLLAAATRTECLEGTKALLETLGNKGYRASAKKAQICLQEVTYLGYSLKDGQRWLTKARKEAILSIPVPKNSRQVREFLGKAGYCRLFIPGFAELAAPLYPLTRPGTLFQWGTEQQLAFEDIKKALLSSPALGLPDITKPFELFIDENSGFAKGVLVQKLGPWKRPVAYLSKKLDTVASGWPPCLRMVAAIAILVKDAGKLTLGQPLTILTSHPVEALVRQPPNKWLSNARMTHYQAMLLDAERVHFGPTVSLNPATLLPLPSGGNHHDCLQILAETHGTRPDLTDQPLPDADLTWYTDGSSFIRNGEREAGAAVTTESEVIWAAPLPPGTSAQRAELIALTQALKMAEGKKLTVYTDSRYAFATTHVHGEIYRRRGWLTSEGKEIKNKNEILALLEALFLPKRLSIIHCPGHQKGDSPQAKGNRLADDTAKKAATETHSSLTVLPAGKRTADGSEFEKRTADGSEFESPKKKAKVE

SEQ ID NO: 1245 - protein, 2090 aa, synthetic construct
  source 1..2090: note = Description of Artificial Sequence: Synthetic polypeptide
MPAAKRVKLDGGDKKYSIGLDIGTNSVGWAVITDEYKVPSKKFKVLGNTDRHSIKKNLIGALLFDSGETAEATRLKRTARRRYTRRKNRICYLQEIFSNEMAKVDDSFFHRLEESFLVEEDKKHERHPIFGNIVDEVAYHEKYPTIYHLRKKLVDSTDKADLRLIYLALAHMIKFRGHFLIEGDLNPDNSDVDKLFIQLVQTYNQLFEENPINASGVDAKAILSARLSKSRRLENLIAQLPGEKKNGLFGNLIALSLGLTPNFKSNFDLAEDAKLQLSKDTYDDDLDNLLAQIGDQYADLFLAAKNLSDAILLSDILRVNTEITKAPLSASMIKRYDEHHQDLTLLKALVRQQLPEKYKEIFFDQSKNGYAGYIDGGASQEEFYKFIKPILEKMDGTEELLVKLNREDLLRKQRTFDNGSIPHQIHLGELHAILRRQEDFYPFLKDNREKIEKILTFRIPYYVGPLARGNSRFAWMTRKSEETITPWNFEEVVDKGASAQSFIERMTNFDKNLPNEKVLPKHSLLYEYFTVYNELTKVKYVTEGMRKPAFLSGEQKKAIVDLLFKTNRKVTVKQLKEDYFKKIECFDSVEISGVEDRFNASLGTYHDLLKIIKDKDFLDNEENEDILEDIVLTLTLFEDREMIEERLKTYAHLFDDKVMKQLKRRRYTGWGRLSRKLINGIRDKQSGKTILDFLKSDGFANRNFMQLIHDDSLTFKEDIQKAQVSGQGDSLHEHIANLAGSPAIKKGILQTVKVVDELVKVMGRHKPENIVIEMARENQTTQKGQKNSRERMKRIEEGIKELGSQILKEHPVENTQLQNEKLYLYYLQNGRDMYVDQELDINRLSDYDVDHIVPQSFLKDDSIDNKVLTRSDKARGKSDNVPSEEVVKKMKNYWRQLLNAKLITQRKFDNLTKAERGGLSELDKAGFIKRQLVETRQITKHVAQILDSRMNTKYDENDKLIREVKVITLKSKLVSDFRKDFQFYKVREINNYHHAHDAYLNAVVGTALIKKYPKLESEFVYGDYKVYDVRKMIAKSEQEIGKATAKYFFYSNIMNFFKTEITLANGEIRKRPLIETNGETGEIVWDKGRDFATVRKVLSMPQVNIVKKTEVQTGGFSKESILPKRNSDKLIARKKDWDPKKYGGFDSPTVAYSVLVVAKVEKGKSKKLKSVKELLGITIMERSSFEKNPIDFLEAKGYKEVKKDLIIKLPKYSLFELENGRKRMLASAGELQKGNELALPSKYVNFLYLASHYEKLKGSPEDNEQKQLFVEQHKHYLDEIIEQISEFSKRVILADANLDKVLSAYNKHRDKPIREQAENIIHLFTLTNLGAPAAFKYFDTTIDRKRYTSTKEVLDATLIHQSITGLYETRIDLSQLGGDGGGSSPAPGGTLQLEEEYRLFEPESTQKQEMDIWLKNFPQAWAETGGMGTAHCQAPVLIQLKATATPISIRQYPMPHEAYQGIKPHIRRMLDQGILKPCQSPWNTPLLPVKKPGTEDYRPVQDLREVNKRVEDIHPTVPNPYNLLSTLPPSHPWYTVLDLKDAFFCLRLHSESQLLFAFEWRDPEIGLSGQLTWTRLPQGFKNSPTLFNEALHSDLADFRVRYPALVLLQYVDDLLLAAATRTECLEGTKALLETLGNKGYRASAKKAQICLQEVTYLGYSLKDGQRWLTKARKEAILSIPVPKNSRQVREFLGKAGYCRLFIPGFAELAAPLYPLTRPGTLFQWGTEQQLAFEDIKKALLSSPALGLPDITKPFELFIDENSGFAKGVLVQKLGPWKRPVAYLSKKLDTVASGWPPCLRMVAAIAILVKDAGKLTLGQPLTILTSHPVEALVRQPPNKWLSNARMTHYQAMLLDAERVHFGPTVSLNPATLLPLPSGGNHHDCLQILAETHGTRPDLTDQPLPDADLTWYTDGSSFIRNGEREAGAAVTTESEVIWAAPLPPGTSAQRAELIALTQALKMAEGKKLTVYTDSRYAFATTHVHGEIYRRRGWLTSEGKEIKNKNEILALLEALFLPKRLSIIHCPGHQKGDSPQAKGNRLADDTAKKAATETHSSLTVLPAGKRTADGSEFEKRTADGSEFESPKKKAKVE

SEQ ID NO: 1246 - protein, 2089 aa, synthetic construct
  source 1..2089: note = Description of Artificial Sequence: Synthetic polypeptide
MPAAKRVKLDGGDKKYSIGLDIGTNSVGWAVITDEYKVPSKKFKVLGNTDRHSIKKNLIGALLFDSGETAEATRLKRTARRRYTRRKNRICYLQEIFSNEMAKVDDSFFHRLEESFLVEEDKKHERHPIFGNIVDEVAYHEKYPTIYHLRKKLVDSTDKADLRLIYLALAHMIKFRGHFLIEGDLNPDNSDVDKLFIQLVQTYNQLFEENPINASGVDAKAILSARLSKSRRLENLIAQLPGEKKNGLFGNLIALSLGLTPNFKSNFDLAEDAKLQLSKDTYDDDLDNLLAQIGDQYADLFLAAKNLSDAILLSDILRVNTEITKAPLSASMIKRYDEHHQDLTLLKALVRQQLPEKYKEIFFDQSKNGYAGYIDGGASQEEFYKFIKPILEKMDGTEELLVKLNREDLLRKQRTFDNGSIPHQIHLGELHAILRRQEDFYPFLKDNREKIEKILTFRIPYYVGPLARGNSRFAWMTRKSEETITPWNFEEVVDKGASAQSFIERMTNFDKNLPNEKVLPKHSLLYEYFTVYNELTKVKYVTEGMRKPAFLSGEQKKAIVDLLFKTNRKVTVKQLKEDYFKKIECFDSVEISGVEDRFNASLGTYHDLLKIIKDKDFLDNEENEDILEDIVLTLTLFEDREMIEERLKTYAHLFDDKVMKQLKRRRYTGWGRLSRKLINGIRDKQSGKTILDFLKSDGFANRNFMQLIHDDSLTFKEDIQKAQVSGQGDSLHEHIANLAGSPAIKKGILQTVKVVDELVKVMGRHKPENIVIEMARENQTTQKGQKNSRERMKRIEEGIKELGSQILKEHPVENTQLQNEKLYLYYLQNGRDMYVDQELDINRLSDYDVDHIVPQSFLKDDSIDNKVLTRSDKARGKSDNVPSEEVVKKMKNYWRQLLNAKLITQRKFDNLTKAERGGLSELDKAGFIKRQLVETRQITKHVAQILDSRMNTKYDENDKLIREVKVITLKSKLVSDFRKDFQFYKVREINNYHHAHDAYLNAVVGTALIKKYPKLESEFVYGDYKVYDVRKMIAKSEQEIGKATAKYFFYSNIMNFFKTEITLANGEIRKRPLIETNGETGEIVWDKGRDFATVRKVLSMPQVNIVKKTEVQTGGFSKESILPKRNSDKLIARKKDWDPKKYGGFDSPTVAYSVLVVAKVEKGKSKKLKSVKELLGITIMERSSFEKNPIDFLEAKGYKEVKKDLIIKLPKYSLFELENGRKRMLASAGELQKGNELALPSKYVNFLYLASHYEKLKGSPEDNEQKQLFVEQHKHYLDEIIEQISEFSKRVILADANLDKVLSAYNKHRDKPIREQAENIIHLFTLTNLGAPAAFKYFDTTIDRKRYTSTKEVLDATLIHQSITGLYETRIDLSQLGGDGGPAPAPGGTLQLEEEYRLFEPESTQKQEMDIWLKNFPQAWAETGGMGTAHCQAPVLIQLKATATPISIRQYPMPHEAYQGIKPHIRRMLDQGILKPCQSPWNTPLLPVKKPGTEDYRPVQDLREVNKRVEDIHPTVPNPYNLLSTLPPSHPWYTVLDLKDAFFCLRLHSESQLLFAFEWRDPEIGLSGQLTWTRLPQGFKNSPTLFNEALHSDLADFRVRYPALVLLQYVDDLLLAAATRTECLEGTKALLETLGNKGYRASAKKAQICLQEVTYLGYSLKDGQRWLTKARKEAILSIPVPKNSRQVREFLGKAGYCRLFIPGFAELAAPLYPLTRPGTLFQWGTEQQLAFEDIKKALLSSPALGLPDITKPFELFIDENSGFAKGVLVQKLGPWKRPVAYLSKKLDTVASGWPPCLRMVAAIAILVKDAGKLTLGQPLTILTSHPVEALVRQPPNKWLSNARMTHYQAMLLDAERVHFGPTVSLNPATLLPLPSGGNHHDCLQILAETHGTRPDLTDQPLPDADLTWYTDGSSFIRNGEREAGAAVTTESEVIWAAPLPPGTSAQRAELIALTQALKMAEGKKLTVYTDSRYAFATTHVHGEIYRRRGWLTSEGKEIKNKNEILALLEALFLPKRLSIIHCPGHQKGDSPQAKGNRLADDTAKKAATETHSSLTVLPAGKRTADGSEFEKRTADGSEFESPKKKAKVE

SEQ ID NO: 1247 - protein, 2093 aa, synthetic construct
  source 1..2093: note = Description of Artificial Sequence: Synthetic polypeptide
MPAAKRVKLDGGDKKYSIGLDIGTNSVGWAVITDEYKVPSKKFKVLGNTDRHSIKKNLIGALLFDSGETAEATRLKRTARRRYTRRKNRICYLQEIFSNEMAKVDDSFFHRLEESFLVEEDKKHERHPIFGNIVDEVAYHEKYPTIYHLRKKLVDSTDKADLRLIYLALAHMIKFRGHFLIEGDLNPDNSDVDKLFIQLVQTYNQLFEENPINASGVDAKAILSARLSKSRRLENLIAQLPGEKKNGLFGNLIALSLGLTPNFKSNFDLAEDAKLQLSKDTYDDDLDNLLAQIGDQYADLFLAAKNLSDAILLSDILRVNTEITKAPLSASMIKRYDEHHQDLTLLKALVRQQLPEKYKEIFFDQSKNGYAGYIDGGASQEEFYKFIKPILEKMDGTEELLVKLNREDLLRKQRTFDNGSIPHQIHLGELHAILRRQEDFYPFLKDNREKIEKILTFRIPYYVGPLARGNSRFAWMTRKSEETITPWNFEEVVDKGASAQSFIERMTNFDKNLPNEKVLPKHSLLYEYFTVYNELTKVKYVTEGMRKPAFLSGEQKKAIVDLLFKTNRKVTVKQLKEDYFKKIECFDSVEISGVEDRFNASLGTYHDLLKIIKDKDFLDNEENEDILEDIVLTLTLFEDREMIEERLKTYAHLFDDKVMKQLKRRRYTGWGRLSRKLINGIRDKQSGKTILDFLKSDGFANRNFMQLIHDDSLTFKEDIQKAQVSGQGDSLHEHIANLAGSPAIKKGILQTVKVVDELVKVMGRHKPENIVIEMARENQTTQKGQKNSRERMKRIEEGIKELGSQILKEHPVENTQLQNEKLYLYYLQNGRDMYVDQELDINRLSDYDVDHIVPQSFLKDDSIDNKVLTRSDKARGKSDNVPSEEVVKKMKNYWRQLLNAKLITQRKFDNLTKAERGGLSELDKAGFIKRQLVETRQITKHVAQILDSRMNTKYDENDKLIREVKVITLKSKLVSDFRKDFQFYKVREINNYHHAHDAYLNAVVGTALIKKYPKLESEFVYGDYKVYDVRKMIAKSEQEIGKATAKYFFYSNIMNFFKTEITLANGEIRKRPLIETNGETGEIVWDKGRDFATVRKVLSMPQVNIVKKTEVQTGGFSKESILPKRNSDKLIARKKDWDPKKYGGFDSPTVAYSVLVVAKVEKGKSKKLKSVKELLGITIMERSSFEKNPIDFLEAKGYKEVKKDLIIKLPKYSLFELENGRKRMLASAGELQKGNELALPSKYVNFLYLASHYEKLKGSPEDNEQKQLFVEQHKHYLDEIIEQISEFSKRVILADANLDKVLSAYNKHRDKPIREQAENIIHLFTLTNLGAPAAFKYFDTTIDRKRYTSTKEVLDATLIHQSITGLYETRIDLSQLGGDGGGGGGSSGGSGGTLQLEEEYRLFEPESTQKQEMDIWLKNFPQAWAETGGMGTAHCQAPVLIQLKATATPISIRQYPMPHEAYQGIKPHIRRMLDQGILKPCQSPWNTPLLPVKKPGTEDYRPVQDLREVNKRVEDIHPTVPNPYNLLSTLPPSHPWYTVLDLKDAFFCLRLHSESQLLFAFEWRDPEIGLSGQLTWTRLPQGFKNSPTLFNEALHSDLADFRVRYPALVLLQYVDDLLLAAATRTECLEGTKALLETLGNKGYRASAKKAQICLQEVTYLGYSLKDGQRWLTKARKEAILSIPVPKNSRQVREFLGKAGYCRLFIPGFAELAAPLYPLTRPGTLFQWGTEQQLAFEDIKKALLSSPALGLPDITKPFELFIDENSGFAKGVLVQKLGPWKRPVAYLSKKLDTVASGWPPCLRMVAAIAILVKDAGKLTLGQPLTILTSHPVEALVRQPPNKWLSNARMTHYQAMLLDAERVHFGPTVSLNPATLLPLPSGGNHHDCLQILAETHGTRPDLTDQPLPDADLTWYTDGSSFIRNGEREAGAAVTTESEVIWAAPLPPGTSAQRAELIALTQALKMAEGKKLTVYTDSRYAFATTHVHGEIYRRRGWLTSEGKEIKNKNEILALLEALFLPKRLSIIHCPGHQKGDSPQAKGNRLADDTAKKAATETHSSLTVLPAGKRTADGSEFEKRTADGSEFESPKKKAKVE

SEQ ID NO: 1248 - protein, 2090 aa, synthetic construct
  source 1..2090: note = Description of Artificial Sequence: Synthetic polypeptide
MPAAKRVKLDGGDKKYSIGLDIGTNSVGWAVITDEYKVPSKKFKVLGNTDRHSIKKNLIGALLFDSGETAEATRLKRTARRRYTRRKNRICYLQEIFSNEMAKVDDSFFHRLEESFLVEEDKKHERHPIFGNIVDEVAYHEKYPTIYHLRKKLVDSTDKADLRLIYLALAHMIKFRGHFLIEGDLNPDNSDVDKLFIQLVQTYNQLFEENPINASGVDAKAILSARLSKSRRLENLIAQLPGEKKNGLFGNLIALSLGLTPNFKSNFDLAEDAKLQLSKDTYDDDLDNLLAQIGDQYADLFLAAKNLSDAILLSDILRVNTEITKAPLSASMIKRYDEHHQDLTLLKALVRQQLPEKYKEIFFDQSKNGYAGYIDGGASQEEFYKFIKPILEKMDGTEELLVKLNREDLLRKQRTFDNGSIPHQIHLGELHAILRRQEDFYPFLKDNREKIEKILTFRIPYYVGPLARGNSRFAWMTRKSEETITPWNFEEVVDKGASAQSFIERMTNFDKNLPNEKVLPKHSLLYEYFTVYNELTKVKYVTEGMRKPAFLSGEQKKAIVDLLFKTNRKVTVKQLKEDYFKKIECFDSVEISGVEDRFNASLGTYHDLLKIIKDKDFLDNEENEDILEDIVLTLTLFEDREMIEERLKTYAHLFDDKVMKQLKRRRYTGWGRLSRKLINGIRDKQSGKTILDFLKSDGFANRNFMQLIHDDSLTFKEDIQKAQVSGQGDSLHEHIANLAGSPAIKKGILQTVKVVDELVKVMGRHKPENIVIEMARENQTTQKGQKNSRERMKRIEEGIKELGSQILKEHPVENTQLQNEKLYLYYLQNGRDMYVDQELDINRLSDYDVDHIVPQSFLKDDSIDNKVLTRSDKARGKSDNVPSEEVVKKMKNYWRQLLNAKLITQRKFDNLTKAERGGLSELDKAGFIKRQLVETRQITKHVAQILDSRMNTKYDENDKLIREVKVITLKSKLVSDFRKDFQFYKVREINNYHHAHDAYLNAVVGTALIKKYPKLESEFVYGDYKVYDVRKMIAKSEQEIGKATAKYFFYSNIMNFFKTEITLANGEIRKRPLIETNGETGEIVWDKGRDFATVRKVLSMPQVNIVKKTEVQTGGFSKESILPKRNSDKLIARKKDWDPKKYGGFDSPTVAYSVLVVAKVEKGKSKKLKSVKELLGITIMERSSFEKNPIDFLEAKGYKEVKKDLIIKLPKYSLFELENGRKRMLASAGELQKGNELALPSKYVNFLYLASHYEKLKGSPEDNEQKQLFVEQHKHYLDEIIEQISEFSKRVILADANLDKVLSAYNKHRDKPIREQAENIIHLFTLTNLGAPAAFKYFDTTIDRKRYTSTKEVLDATLIHQSITGLYETRIDLSQLGGDGGPAPGGGGGTLQLEEEYRLFEPESTQKQEMDIWLKNFPQAWAETGGMGTAHCQAPVLIQLKATATPISIRQYPMPHEAYQGIKPHIRRMLDQGILKPCQSPWNTPLLPVKKPGTEDYRPVQDLREVNKRVEDIHPTVPNPYNLLSTLPPSHPWYTVLDLKDAFFCLRLHSESQLLFAFEWRDPEIGLSGQLTWTRLPQGFKNSPTLFNEALHSDLADFRVRYPALVLLQYVDDLLLAAATRTECLEGTKALLETLGNKGYRASAKKAQICLQEVTYLGYSLKDGQRWLTKARKEAILSIPVPKNSRQVREFLGKAGYCRLFIPGFAELAAPLYPLTRPGTLFQWGTEQQLAFEDIKKALLSSPALGLPDITKPFELFIDENSGFAKGVLVQKLGPWKRPVAYLSKKLDTVASGWPPCLRMVAAIAILVKDAGKLTLGQPLTILTSHPVEALVRQPPNKWLSNARMTHYQAMLLDAERVHFGPTVSLNPATLLPLPSGGNHHDCLQILAETHGTRPDLTDQPLPDADLTWYTDGSSFIRNGEREAGAAVTTESEVIWAAPLPPGTSAQRAELIALTQALKMAEGKKLTVYTDSRYAFATTHVHGEIYRRRGWLTSEGKEIKNKNEILALLEALFLPKRLSIIHCPGHQKGDSPQAKGNRLADDTAKKAATETHSSLTVLPAGKRTADGSEFEKRTADGSEFESPKKKAKVE

SEQ ID NO: 1249 - protein, 2090 aa, synthetic construct
  source 1..2090: note = Description of Artificial Sequence: Synthetic polypeptide
MPAAKRVKLDGGDKKYSIGLDIGTNSVGWAVITDEYKVPSKKFKVLGNTDRHSIKKNLIGALLFDSGETAEATRLKRTARRRYTRRKNRICYLQEIFSNEMAKVDDSFFHRLEESFLVEEDKKHERHPIFGNIVDEVAYHEKYPTIYHLRKKLVDSTDKADLRLIYLALAHMIKFRGHFLIEGDLNPDNSDVDKLFIQLVQTYNQLFEENPINASGVDAKAILSARLSKSRRLENLIAQLPGEKKNGLFGNLIALSLGLTPNFKSNFDLAEDAKLQLSKDTYDDDLDNLLAQIGDQYADLFLAAKNLSDAILLSDILRVNTEITKAPLSASMIKRYDEHHQDLTLLKALVRQQLPEKYKEIFFDQSKNGYAGYIDGGASQEEFYKFIKPILEKMDGTEELLVKLNREDLLRKQRTFDNGSIPHQIHLGELHAILRRQEDFYPFLKDNREKIEKILTFRIPYYVGPLARGNSRFAWMTRKSEETITPWNFEEVVDKGASAQSFIERMTNFDKNLPNEKVLPKHSLLYEYFTVYNELTKVKYVTEGMRKPAFLSGEQKKAIVDLLFKTNRKVTVKQLKEDYFKKIECFDSVEISGVEDRFNASLGTYHDLLKIIKDKDFLDNEENEDILEDIVLTLTLFEDREMIEERLKTYAHLFDDKVMKQLKRRRYTGWGRLSRKLINGIRDKQSGKTILDFLKSDGFANRNFMQLIHDDSLTFKEDIQKAQVSGQGDSLHEHIANLAGSPAIKKGILQTVKVVDELVKVMGRHKPENIVIEMARENQTTQKGQKNSRERMKRIEEGIKELGSQILKEHPVENTQLQNEKLYLYYLQNGRDMYVDQELDINRLSDYDVDHIVPQSFLKDDSIDNKVLTRSDKARGKSDNVPSEEVVKKMKNYWRQLLNAKLITQRKFDNLTKAERGGLSELDKAGFIKRQLVETRQITKHVAQILDSRMNTKYDENDKLIREVKVITLKSKLVSDFRKDFQFYKVREINNYHHAHDAYLNAVVGTALIKKYPKLESEFVYGDYKVYDVRKMIAKSEQEIGKATAKYFFYSNIMNFFKTEITLANGEIRKRPLIETNGETGEIVWDKGRDFATVRKVLSMPQVNIVKKTEVQTGGFSKESILPKRNSDKLIARKKDWDPKKYGGFDSPTVAYSVLVVAKVEKGKSKKLKSVKELLGITIMERSSFEKNPIDFLEAKGYKEVKKDLIIKLPKYSLFELENGRKRMLASAGELQKGNELALPSKYVNFLYLASHYEKLKGSPEDNEQKQLFVEQHKHYLDEIIEQISEFSKRVILADANLDKVLSAYNKHRDKPIREQAENIIHLFTLTNLGAPAAFKYFDTTIDRKRYTSTKEVLDATLIHQSITGLYETRIDLSQLGGDGGGSSGGGGGTLQLEEEYRLFEPESTQKQEMDIWLKNFPQAWAETGGMGTAHCQAPVLIQLKATATPISIRQYPMPHEAYQGIKPHIRRMLDQGILKPCQSPWNTPLLPVKKPGTEDYRPVQDLREVNKRVEDIHPTVPNPYNLLSTLPPSHPWYTVLDLKDAFFCLRLHSESQLLFAFEWRDPEIGLSGQLTWTRLPQGFKNSPTLFNEALHSDLADFRVRYPALVLLQYVDDLLLAAATRTECLEGTKALLETLGNKGYRASAKKAQICLQEVTYLGYSLKDGQRWLTKARKEAILSIPVPKNSRQVREFLGKAGYCRLFIPGFAELAAPLYPLTRPGTLFQWGTEQQLAFEDIKKALLSSPALGLPDITKPFELFIDENSGFAKGVLVQKLGPWKRPVAYLSKKLDTVASGWPPCLRMVAAIAILVKDAGKLTLGQPLTILTSHPVEALVRQPPNKWLSNARMTHYQAMLLDAERVHFGPTVSLNPATLLPLPSGGNHHDCLQILAETHGTRPDLTDQPLPDADLTWYTDGSSFIRNGEREAGAAVTTESEVIWAAPLPPGTSAQRAELIALTQALKMAEGKKLTVYTDSRYAFATTHVHGEIYRRRGWLTSEGKEIKNKNEILALLEALFLPKRLSIIHCPGHQKGDSPQAKGNRLADDTAKKAATETHSSLTVLPAGKRTADGSEFEKRTADGSEFESPKKKAKVE

SEQ ID NO: 1250 - protein, 2090 aa, synthetic construct
  source 1..2090: note = Description of Artificial Sequence: Synthetic polypeptide
MPAAKRVKLDGGDKKYSIGLDIGTNSVGWAVITDEYKVPSKKFKVLGNTDRHSIKKNLIGALLFDSGETAEATRLKRTARRRYTRRKNRICYLQEIFSNEMAKVDDSFFHRLEESFLVEEDKKHERHPIFGNIVDEVAYHEKYPTIYHLRKKLVDSTDKADLRLIYLALAHMIKFRGHFLIEGDLNPDNSDVDKLFIQLVQTYNQLFEENPINASGVDAKAILSARLSKSRRLENLIAQLPGEKKNGLFGNLIALSLGLTPNFKSNFDLAEDAKLQLSKDTYDDDLDNLLAQIGDQYADLFLAAKNLSDAILLSDILRVNTEITKAPLSASMIKRYDEHHQDLTLLKALVRQQLPEKYKEIFFDQSKNGYAGYIDGGASQEEFYKFIKPILEKMDGTEELLVKLNREDLLRKQRTFDNGSIPHQIHLGELHAILRRQEDFYPFLKDNREKIEKILTFRIPYYVGPLARGNSRFAWMTRKSEETITPWNFEEVVDKGASAQSFIERMTNFDKNLPNEKVLPKHSLLYEYFTVYNELTKVKYVTEGMRKPAFLSGEQKKAIVDLLFKTNRKVTVKQLKEDYFKKIECFDSVEISGVEDRFNASLGTYHDLLKIIKDKDFLDNEENEDILEDIVLTLTLFEDREMIEERLKTYAHLFDDKVMKQLKRRRYTGWGRLSRKLINGIRDKQSGKTILDFLKSDGFANRNFMQLIHDDSLTFKEDIQKAQVSGQGDSLHEHIANLAGSPAIKKGILQTVKVVDELVKVMGRHKPENIVIEMARENQTTQKGQKNSRERMKRIEEGIKELGSQILKEHPVENTQLQNEKLYLYYLQNGRDMYVDQELDINRLSDYDVDHIVPQSFLKDDSIDNKVLTRSDKARGKSDNVPSEEVVKKMKNYWRQLLNAKLITQRKFDNLTKAERGGLSELDKAGFIKRQLVETRQITKHVAQILDSRMNTKYDENDKLIREVKVITLKSKLVSDFRKDFQFYKVREINNYHHAHDAYLNAVVGTALIKKYPKLESEFVYGDYKVYDVRKMIAKSEQEIGKATAKYFFYSNIMNFFKTEITLANGEIRKRPLIETNGETGEIVWDKGRDFATVRKVLSMPQVNIVKKTEVQTGGFSKESILPKRNSDKLIARKKDWDPKKYGGFDSPTVAYSVLVVAKVEKGKSKKLKSVKELLGITIMERSSFEKNPIDFLEAKGYKEVKKDLIIKLPKYSLFELENGRKRMLASAGELQKGNELALPSKYVNFLYLASHYEKLKGSPEDNEQKQLFVEQHKHYLDEIIEQISEFSKRVILADANLDKVLSAYNKHRDKPIREQAENIIHLFTLTNLGAPAAFKYFDTTIDRKRYTSTKEVLDATLIHQSITGLYETRIDLSQLGGDGGGSSGSSGGTLQLEEEYRLFEPESTQKQEMDIWLKNFPQAWAETGGMGTAHCQAPVLIQLKATATPISIRQYPMPHEAYQGIKPHIRRMLDQGILKPCQSPWNTPLLPVKKPGTEDYRPVQDLREVNKRVEDIHPTVPNPYNLLSTLPPSHPWYTVLDLKDAFFCLRLHSESQLLFAFEWRDPEIGLSGQLTWTRLPQGFKNSPTLFNEALHSDLADFRVRYPALVLLQYVDDLLLAAATRTECLEGTKALLETLGNKGYRASAKKAQICLQEVTYLGYSLKDGQRWLTKARKEAILSIPVPKNSRQVREFLGKAGYCRLFIPGFAELAAPLYPLTRPGTLFQWGTEQQLAFEDIKKALLSSPALGLPDITKPFELFIDENSGFAKGVLVQKLGPWKRPVAYLSKKLDTVASGWPPCLRMVAAIAILVKDAGKLTLGQPLTILTSHPVEALVRQPPNKWLSNARMTHYQAMLLDAERVHFGPTVSLNPATLLPLPSGGNHHDCLQILAETHGTRPDLTDQPLPDADLTWYTDGSSFIRNGEREAGAAVTTESEVIWAAPLPPGTSAQRAELIALTQALKMAEGKKLTVYTDSRYAFATTHVHGEIYRRRGWLTSEGKEIKNKNEILALLEALFLPKRLSIIHCPGHQKGDSPQAKGNRLADDTAKKAATETHSSLTVLPAGKRTADGSEFEKRTADGSEFESPKKKAKVE

SEQ ID NO: 1251 - protein, 2088 aa, synthetic construct
  source 1..2088: note = Description of Artificial Sequence: Synthetic polypeptide
MPAAKRVKLDGGDKKYSIGLDIGTNSVGWAVITDEYKVPSKKFKVLGNTDRHSIKKNLIGALLFDSGETAEATRLKRTARRRYTRRKNRICYLQEIFSNEMAKVDDSFFHRLEESFLVEEDKKHERHPIFGNIVDEVAYHEKYPTIYHLRKKLVDSTDKADLRLIYLALAHMIKFRGHFLIEGDLNPDNSDVDKLFIQLVQTYNQLFEENPINASGVDAKAILSARLSKSRRLENLIAQLPGEKKNGLFGNLIALSLGLTPNFKSNFDLAEDAKLQLSKDTYDDDLDNLLAQIGDQYADLFLAAKNLSDAILLSDILRVNTEITKAPLSASMIKRYDEHHQDLTLLKALVRQQLPEKYKEIFFDQSKNGYAGYIDGGASQEEFYKFIKPILEKMDGTEELLVKLNREDLLRKQRTFDNGSIPHQIHLGELHAILRRQEDFYPFLKDNREKIEKILTFRIPYYVGPLARGNSRFAWMTRKSEETITPWNFEEVVDKGASAQSFIERMTNFDKNLPNEKVLPKHSLLYEYFTVYNELTKVKYVTEGMRKPAFLSGEQKKAIVDLLFKTNRKVTVKQLKEDYFKKIECFDSVEISGVEDRFNASLGTYHDLLKIIKDKDFLDNEENEDILEDIVLTLTLFEDREMIEERLKTYAHLFDDKVMKQLKRRRYTGWGRLSRKLINGIRDKQSGKTILDFLKSDGFANRNFMQLIHDDSLTFKEDIQKAQVSGQGDSLHEHIANLAGSPAIKKGILQTVKVVDELVKVMGRHKPENIVIEMARENQTTQKGQKNSRERMKRIEEGIKELGSQILKEHPVENTQLQNEKLYLYYLQNGRDMYVDQELDINRLSDYDVDHIVPQSFLKDDSIDNKVLTRSDKARGKSDNVPSEEVVKKMKNYWRQLLNAKLITQRKFDNLTKAERGGLSELDKAGFIKRQLVETRQITKHVAQILDSRMNTKYDENDKLIREVKVITLKSKLVSDFRKDFQFYKVREINNYHHAHDAYLNAVVGTALIKKYPKLESEFVYGDYKVYDVRKMIAKSEQEIGKATAKYFFYSNIMNFFKTEITLANGEIRKRPLIETNGETGEIVWDKGRDFATVRKVLSMPQVNIVKKTEVQTGGFSKESILPKRNSDKLIARKKDWDPKKYGGFDSPTVAYSVLVVAKVEKGKSKKLKSVKELLGITIMERSSFEKNPIDFLEAKGYKEVKKDLIIKLPKYSLFELENGRKRMLASAGELQKGNELALPSKYVNFLYLASHYEKLKGSPEDNEQKQLFVEQHKHYLDEIIEQISEFSKRVILADANLDKVLSAYNKHRDKPIREQAENIIHLFTLTNLGAPAAFKYFDTTIDRKRYTSTKEVLDATLIHQSITGLYETRIDLSQLGGDGGGGGGGGTLQLEEEYRLFEPESTQKQEMDIWLKNFPQAWAETGGMGTAHCQAPVLIQLKATATPISIRQYPMPHEAYQGIKPHIRRMLDQGILKPCQSPWNTPLLPVKKPGTEDYRPVQDLREVNKRVEDIHPTVPNPYNLLSTLPPSHPWYTVLDLKDAFFCLRLHSESQLLFAFEWRDPEIGLSGQLTWTRLPQGFKNSPTLFNEALHSDLADFRVRYPALVLLQYVDDLLLAAATRTECLEGTKALLETLGNKGYRASAKKAQICLQEVTYLGYSLKDGQRWLTKARKEAILSIPVPKNSRQVREFLGKAGYCRLFIPGFAELAAPLYPLTRPGTLFQWGTEQQLAFEDIKKALLSSPALGLPDITKPFELFIDENSGFAKGVLVQKLGPWKRPVAYLSKKLDTVASGWPPCLRMVAAIAILVKDAGKLTLGQPLTILTSHPVEALVRQPPNKWLSNARMTHYQAMLLDAERVHFGPTVSLNPATLLPLPSGGNHHDCLQILAETHGTRPDLTDQPLPDADLTWYTDGSSFIRNGEREAGAAVTTESEVIWAAPLPPGTSAQRAELIALTQALKMAEGKKLTVYTDSRYAFATTHVHGEIYRRRGWLTSEGKEIKNKNEILALLEALFLPKRLSIIHCPGHQKGDSPQAKGNRLADDTAKKAATETHSSLTVLPAGKRTADGSEFEKRTADGSEFESPKKKAKVE

SEQ ID NO: 1252 - protein, 2090 aa, synthetic construct
  source 1..2090: note = Description of Artificial Sequence: Synthetic polypeptide
MPAAKRVKLDGGDKKYSIGLDIGTNSVGWAVITDEYKVPSKKFKVLGNTDRHSIKKNLIGALLFDSGETAEATRLKRTARRRYTRRKNRICYLQEIFSNEMAKVDDSFFHRLEESFLVEEDKKHERHPIFGNIVDEVAYHEKYPTIYHLRKKLVDSTDKADLRLIYLALAHMIKFRGHFLIEGDLNPDNSDVDKLFIQLVQTYNQLFEENPINASGVDAKAILSARLSKSRRLENLIAQLPGEKKNGLFGNLIALSLGLTPNFKSNFDLAEDAKLQLSKDTYDDDLDNLLAQIGDQYADLFLAAKNLSDAILLSDILRVNTEITKAPLSASMIKRYDEHHQDLTLLKALVRQQLPEKYKEIFFDQSKNGYAGYIDGGASQEEFYKFIKPILEKMDGTEELLVKLNREDLLRKQRTFDNGSIPHQIHLGELHAILRRQEDFYPFLKDNREKIEKILTFRIPYYVGPLARGNSRFAWMTRKSEETITPWNFEEVVDKGASAQSFIERMTNFDKNLPNEKVLPKHSLLYEYFTVYNELTKVKYVTEGMRKPAFLSGEQKKAIVDLLFKTNRKVTVKQLKEDYFKKIECFDSVEISGVEDRFNASLGTYHDLLKIIKDKDFLDNEENEDILEDIVLTLTLFEDREMIEERLKTYAHLFDDKVMKQLKRRRYTGWGRLSRKLINGIRDKQSGKTILDFLKSDGFANRNFMQLIHDDSLTFKEDIQKAQVSGQGDSLHEHIANLAGSPAIKKGILQTVKVVDELVKVMGRHKPENIVIEMARENQTTQKGQKNSRERMKRIEEGIKELGSQILKEHPVENTQLQNEKLYLYYLQNGRDMYVDQELDINRLSDYDVDHIVPQSFLKDDSIDNKVLTRSDKARGKSDNVPSEEVVKKMKNYWRQLLNAKLITQRKFDNLTKAERGGLSELDKAGFIKRQLVETRQITKHVAQILDSRMNTKYDENDKLIREVKVITLKSKLVSDFRKDFQFYKVREINNYHHAHDAYLNAVVGTALIKKYPKLESEFVYGDYKVYDVRKMIAKSEQEIGKATAKYFFYSNIMNFFKTEITLANGEIRKRPLIETNGETGEIVWDKGRDFATVRKVLSMPQVNIVKKTEVQTGGFSKESILPKRNSDKLIARKKDWDPKKYGGFDSPTVAYSVLVVAKVEKGKSKKLKSVKELLGITIMERSSFEKNPIDFLEAKGYKEVKKDLIIKLPKYSLFELENGRKRMLASAGELQKGNELALPSKYVNFLYLASHYEKLKGSPEDNEQKQLFVEQHKHYLDEIIEQISEFSKRVILADANLDKVLSAYNKHRDKPIREQAENIIHLFTLTNLGAPAAFKYFDTTIDRKRYTSTKEVLDATLIHQSITGLYETRIDLSQLGGDGGPAPGSSGGTLQLEEEYRLFEPESTQKQEMDIWLKNFPQAWAETGGMGTAHCQAPVLIQLKATATPISIRQYPMPHEAYQGIKPHIRRMLDQGILKPCQSPWNTPLLPVKKPGTEDYRPVQDLREVNKRVEDIHPTVPNPYNLLSTLPPSHPWYTVLDLKDAFFCLRLHSESQLLFAFEWRDPEIGLSGQLTWTRLPQGFKNSPTLFNEALHSDLADFRVRYPALVLLQYVDDLLLAAATRTECLEGTKALLETLGNKGYRASAKKAQICLQEVTYLGYSLKDGQRWLTKARKEAILSIPVPKNSRQVREFLGKAGYCRLFIPGFAELAAPLYPLTRPGTLFQWGTEQQLAFEDIKKALLSSPALGLPDITKPFELFIDENSGFAKGVLVQKLGPWKRPVAYLSKKLDTVASGWPPCLRMVAAIAILVKDAGKLTLGQPLTILTSHPVEALVRQPPNKWLSNARMTHYQAMLLDAERVHFGPTVSLNPATLLPLPSGGNHHDCLQILAETHGTRPDLTDQPLPDADLTWYTDGSSFIRNGEREAGAAVTTESEVIWAAPLPPGTSAQRAELIALTQALKMAEGKKLTVYTDSRYAFATTHVHGEIYRRRGWLTSEGKEIKNKNEILALLEALFLPKRLSIIHCPGHQKGDSPQAKGNRLADDTAKKAATETHSSLTVLPAGKRTADGSEFEKRTADGSEFESPKKKAKVE

SEQ ID NO: 1253 - protein, 2095 aa, synthetic construct
  source 1..2095: note = Description of Artificial Sequence: Synthetic polypeptide
MPAAKRVKLDGGDKKYSIGLDIGTNSVGWAVITDEYKVPSKKFKVLGNTDRHSIKKNLIGALLFDSGETAEATRLKRTARRRYTRRKNRICYLQEIFSNEMAKVDDSFFHRLEESFLVEEDKKHERHPIFGNIVDEVAYHEKYPTIYHLRKKLVDSTDKADLRLIYLALAHMIKFRGHFLIEGDLNPDNSDVDKLFIQLVQTYNQLFEENPINASGVDAKAILSARLSKSRRLENLIAQLPGEKKNGLFGNLIALSLGLTPNFKSNFDLAEDAKLQLSKDTYDDDLDNLLAQIGDQYADLFLAAKNLSDAILLSDILRVNTEITKAPLSASMIKRYDEHHQDLTLLKALVRQQLPEKYKEIFFDQSKNGYAGYIDGGASQEEFYKFIKPILEKMDGTEELLVKLNREDLLRKQRTFDNGSIPHQIHLGELHAILRRQEDFYPFLKDNREKIEKILTFRIPYYVGPLARGNSRFAWMTRKSEETITPWNFEEVVDKGASAQSFIERMTNFDKNLPNEKVLPKHSLLYEYFTVYNELTKVKYVTEGMRKPAFLSGEQKKAIVDLLFKTNRKVTVKQLKEDYFKKIECFDSVEISGVEDRFNASLGTYHDLLKIIKDKDFLDNEENEDILEDIVLTLTLFEDREMIEERLKTYAHLFDDKVMKQLKRRRYTGWGRLSRKLINGIRDKQSGKTILDFLKSDGFANRNFMQLIHDDSLTFKEDIQKAQVSGQGDSLHEHIANLAGSPAIKKGILQTVKVVDELVKVMGRHKPENIVIEMARENQTTQKGQKNSRERMKRIEEGIKELGSQILKEHPVENTQLQNEKLYLYYLQNGRDMYVDQELDINRLSDYDVDHIVPQSFLKDDSIDNKVLTRSDKARGKSDNVPSEEVVKKMKNYWRQLLNAKLITQRKFDNLTKAERGGLSELDKAGFIKRQLVETRQITKHVAQILDSRMNTKYDENDKLIREVKVITLKSKLVSDFRKDFQFYKVREINNYHHAHDAYLNAVVGTALIKKYPKLESEFVYGDYKVYDVRKMIAKSEQEIGKATAKYFFYSNIMNFFKTEITLANGEIRKRPLIETNGETGEIVWDKGRDFATVRKVLSMPQVNIVKKTEVQTGGFSKESILPKRNSDKLIARKKDWDPKKYGGFDSPTVAYSVLVVAKVEKGKSKKLKSVKELLGITIMERSSFEKNPIDFLEAKGYKEVKKDLIIKLPKYSLFELENGRKRMLASAGELQKGNELALPSKYVNFLYLASHYEKLKGSPEDNEQKQLFVEQHKHYLDEIIEQISEFSKRVILADANLDKVLSAYNKHRDKPIREQAENIIHLFTLTNLGAPAAFKYFDTTIDRKRYTSTKEVLDATLIHQSITGLYETRIDLSQLGGDGGEAAAKGGGPAPGGTLQLEEEYRLFEPESTQKQEMDIWLKNFPQAWAETGGMGTAHCQAPVLIQLKATATPISIRQYPMPHEAYQGIKPHIRRMLDQGILKPCQSPWNTPLLPVKKPGTEDYRPVQDLREVNKRVEDIHPTVPNPYNLLSTLPPSHPWYTVLDLKDAFFCLRLHSESQLLFAFEWRDPEIGLSGQLTWTRLPQGFKNSPTLFNEALHSDLADFRVRYPALVLLQYVDDLLLAAATRTECLEGTKALLETLGNKGYRASAKKAQICLQEVTYLGYSLKDGQRWLTKARKEAILSIPVPKNSRQVREFLGKAGYCRLFIPGFAELAAPLYPLTRPGTLFQWGTEQQLAFEDIKKALLSSPALGLPDITKPFELFIDENSGFAKGVLVQKLGPWKRPVAYLSKKLDTVASGWPPCLRMVAAIAILVKDAGKLTLGQPLTILTSHPVEALVRQPPNKWLSNARMTHYQAMLLDAERVHFGPTVSLNPATLLPLPSGGNHHDCLQILAETHGTRPDLTDQPLPDADLTWYTDGSSFIRNGEREAGAAVTTESEVIWAAPLPPGTSAQRAELIALTQALKMAEGKKLTVYTDSRYAFATTHVHGEIYRRRGWLTSEGKEIKNKNEILALLEALFLPKRLSIIHCPGHQKGDSPQAKGNRLADDTAKKAATETHSSLTVLPAGKRTADGSEFEKRTADGSEFESPKKKAKVE

SEQ ID NO: 1254 - protein, 2095 aa, synthetic construct
  source 1..2095: note = Description of Artificial Sequence: Synthetic polypeptide
MPAAKRVKLDGGDKKYSIGLDIGTNSVGWAVITDEYKVPSKKFKVLGNTDRHSIKKNLIGALLFDSGETAEATRLKRTARRRYTRRKNRICYLQEIFSNEMAKVDDSFFHRLEESFLVEEDKKHERHPIFGNIVDEVAYHEKYPTIYHLRKKLVDSTDKADLRLIYLALAHMIKFRGHFLIEGDLNPDNSDVDKLFIQLVQTYNQLFEENPINASGVDAKAILSARLSKSRRLENLIAQLPGEKKNGLFGNLIALSLGLTPNFKSNFDLAEDAKLQLSKDTYDDDLDNLLAQIGDQYADLFLAAKNLSDAILLSDILRVNTEITKAPLSASMIKRYDEHHQDLTLLKALVRQQLPEKYKEIFFDQSKNGYAGYIDGGASQEEFYKFIKPILEKMDGTEELLVKLNREDLLRKQRTFDNGSIPHQIHLGELHAILRRQEDFYPFLKDNREKIEKILTFRIPYYVGPLARGNSRFAWMTRKSEETITPWNFEEVVDKGASAQSFIERMTNFDKNLPNEKVLPKHSLLYEYFTVYNELTKVKYVTEGMRKPAFLSGEQKKAIVDLLFKTNRKVTVKQLKEDYFKKIECFDSVEISGVEDRFNASLGTYHDLLKIIKDKDFLDNEENEDILEDIVLTLTLFEDREMIEERLKTYAHLFDDKVMKQLKRRRYTGWGRLSRKLINGIRDKQSGKTILDFLKSDGFANRNFMQLIHDDSLTFKEDIQKAQVSGQGDSLHEHIANLAGSPAIKKGILQTVKVVDELVKVMGRHKPENIVIEMARENQTTQKGQKNSRERMKRIEEGIKELGSQILKEHPVENTQLQNEKLYLYYLQNGRDMYVDQELDINRLSDYDVDHIVPQSFLKDDSIDNKVLTRSDKARGKSDNVPSEEVVKKMKNYWRQLLNAKLITQRKFDNLTKAERGGLSELDKAGFIKRQLVETRQITKHVAQILDSRMNTKYDENDKLIREVKVITLKSKLVSDFRKDFQFYKVREINNYHHAHDAYLNAVVGTALIKKYPKLESEFVYGDYKVYDVRKMIAKSEQEIGKATAKYFFYSNIMNFFKTEITLANGEIRKRPLIETNGETGEIVWDKGRDFATVRKVLSMPQVNIVKKTEVQTGGFSKESILPKRNSDKLIARKKDWDPKKYGGFDSPTVAYSVLVVAKVEKGKSKKLKSVKELLGITIMERSSFEKNPIDFLEAKGYKEVKKDLIIKLPKYSLFELENGRKRMLASAGELQKGNELALPSKYVNFLYLASHYEKLKGSPEDNEQKQLFVEQHKHYLDEIIEQISEFSKRVILADANLDKVLSAYNKHRDKPIREQAENIIHLFTLTNLGAPAAFKYFDTTIDRKRYTSTKEVLDATLIHQSITGLYETRIDLSQLGGDGGEAAAKPAPGGSGGTLQLEEEYRLFEPESTQKQEMDIWLKNFPQAWAETGGMGTAHCQAPVLIQLKATATPISIRQYPMPHEAYQGIKPHIRRMLDQGILKPCQSPWNTPLLPVKKPGTEDYRPVQDLREVNKRVEDIHPTVPNPYNLLSTLPPSHPWYTVLDLKDAFFCLRLHSESQLLFAFEWRDPEIGLSGQLTWTRLPQGFKNSPTLFNEALHSDLADFRVRYPALVLLQYVDDLLLAAATRTECLEGTKALLETLGNKGYRASAKKAQICLQEVTYLGYSLKDGQRWLTKARKEAILSIPVPKNSRQVREFLGKAGYCRLFIPGFAELAAPLYPLTRPGTLFQWGTEQQLAFEDIKKALLSSPALGLPDITKPFELFIDENSGFAKGVLVQKLGPWKRPVAYLSKKLDTVASGWPPCLRMVAAIAILVKDAGKLTLGQPLTILTSHPVEALVRQPPNKWLSNARMTHYQAMLLDAERVHFGPTVSLNPATLLPLPSGGNHHDCLQILAETHGTRPDLTDQPLPDADLTWYTDGSSFIRNGEREAGAAVTTESEVIWAAPLPPGTSAQRAELIALTQALKMAEGKKLTVYTDSRYAFATTHVHGEIYRRRGWLTSEGKEIKNKNEILALLEALFLPKRLSIIHCPGHQKGDSPQAKGNRLADDTAKKAATETHSSLTVLPAGKRTADGSEFEKRTADGSEFESPKKKAKVE

SEQ ID NO: 1255 - protein, 2093 aa, synthetic construct
  source 1..2093: note = Description of Artificial Sequence: Synthetic polypeptide
MPAAKRVKLDGGDKKYSIGLDIGTNSVGWAVITDEYKVPSKKFKVLGNTDRHSIKKNLIGALLFDSGETAEATRLKRTARRRYTRRKNRICYLQEIFSNEMAKVDDSFFHRLEESFLVEEDKKHERHPIFGNIVDEVAYHEKYPTIYHLRKKLVDSTDKADLRLIYLALAHMIKFRGHFLIEGDLNPDNSDVDKLFIQLVQTYNQLFEENPINASGVDAKAILSARLSKSRRLENLIAQLPGEKKNGLFGNLIALSLGLTPNFKSNFDLAEDAKLQLSKDTYDDDLDNLLAQIGDQYADLFLAAKNLSDAILLSDILRVNTEITKAPLSASMIKRYDEHHQDLTLLKALVRQQLPEKYKEIFFDQSKNGYAGYIDGGASQEEFYKFIKPILEKMDGTEELLVKLNREDLLRKQRTFDNGSIPHQIHLGELHAILRRQEDFYPFLKDNREKIEKILTFRIPYYVGPLARGNSRFAWMTRKSEETITPWNFEEVVDKGASAQSFIERMTNFDKNLPNEKVLPKHSLLYEYFTVYNELTKVKYVTEGMRKPAFLSGEQKKAIVDLLFKTNRKVTVKQLKEDYFKKIECFDSVEISGVEDRFNASLGTYHDLLKIIKDKDFLDNEENEDILEDIVLTLTLFEDREMIEERLKTYAHLFDDKVMKQLKRRRYTGWGRLSRKLINGIRDKQSGKTILDFLKSDGFANRNFMQLIHDDSLTFKEDIQKAQVSGQGDSLHEHIANLAGSPAIKKGILQTVKVVDELVKVMGRHKPENIVIEMARENQTTQKGQKNSRERMKRIEEGIKELGSQILKEHPVENTQLQNEKLYLYYLQNGRDMYVDQELDINRLSDYDVDHIVPQSFLKDDSIDNKVLTRSDKARGKSDNVPSEEVVKKMKNYWRQLLNAKLITQRKFDNLTKAERGGLSELDKAGFIKRQLVETRQITKHVAQILDSRMNTKYDENDKLIREVKVITLKSKLVSDFRKDFQFYKVREINNYHHAHDAYLNAVVGTALIKKYPKLESEFVYGDYKVYDVRKMIAKSEQEIGKATAKYFFYSNIMNFFKTEITLANGEIRKRPLIETNGETGEIVWDKGRDFATVRKVLSMPQVNIVKKTEVQTGGFSKESILPKRNSDKLIARKKDWDPKKYGGFDSPTVAYSVLVVAKVEKGKSKKLKSVKELLGITIMERSSFEKNPIDFLEAKGYKEVKKDLIIKLPKYSLFELENGRKRMLASAGELQKGNELALPSKYVNFLYLASHYEKLKGSPEDNEQKQLFVEQHKHYLDEIIEQISEFSKRVILADANLDKVLSAYNKHRDKPIREQAENIIHLFTLTNLGAPAAFKYFDTTIDRKRYTSTKEVLDATLIHQSITGLYETRIDLSQLGGDGGGSSGSSGSSGGTLQLEEEYRLFEPESTQKQEMDIWLKNFPQAWAETGGMGTAHCQAPVLIQLKATATPISIRQYPMPHEAYQGIKPHIRRMLDQGILKPCQSPWNTPLLPVKKPGTEDYRPVQDLREVNKRVEDIHPTVPNPYNLLSTLPPSHPWYTVLDLKDAFFCLRLHSESQLLFAFEWRDPEIGLSGQLTWTRLPQGFKNSPTLFNEALHSDLADFRVRYPALVLLQYVDDLLLAAATRTECLEGTKALLETLGNKGYRASAKKAQICLQEVTYLGYSLKDGQRWLTKARKEAILSIPVPKNSRQVREFLGKAGYCRLFIPGFAELAAPLYPLTRPGTLFQWGTEQQLAFEDIKKALLSSPALGLPDITKPFELFIDENSGFAKGVLVQKLGPWKRPVAYLSKKLDTVASGWPPCLRMVAAIAILVKDAGKLTLGQPLTILTSHPVEALVRQPPNKWLSNARMTHYQAMLLDAERVHFGPTVSLNPATLLPLPSGGNHHDCLQILAETHGTRPDLTDQPLPDADLTWYTDGSSFIRNGEREAGAAVTTESEVIWAAPLPPGTSAQRAELIALTQALKMAEGKKLTVYTDSRYAFATTHVHGEIYRRRGWLTSEGKEIKNKNEILALLEALFLPKRLSIIHCPGHQKGDSPQAKGNRLADDTAKKAATETHSSLTVLPAGKRTADGSEFEKRTADGSEFESPKKKAKVE

SEQ ID NO: 1256 - protein, 2093 aa, synthetic construct
  source 1..2093: note = Description of Artificial Sequence: Synthetic polypeptide
MPAAKRVKLDGGDKKYSIGLDIGTNSVGWAVITDEYKVPSKKFKVLGNTDRHSIKKNLIGALLFDSGETAEATRLKRTARRRYTRRKNRICYLQEIFSNEMAKVDDSFFHRLEESFLVEEDKKHERHPIFGNIVDEVAYHEKYPTIYHLRKKLVDSTDKADLRLIYLALAHMIKFRGHFLIEGDLNPDNSDVDKLFIQLVQTYNQLFEENPINASGVDAKAILSARLSKSRRLENLIAQLPGEKKNGLFGNLIALSLGLTPNFKSNFDLAEDAKLQLSKDTYDDDLDNLLAQIGDQYADLFLAAKNLSDAILLSDILRVNTEITKAPLSASMIKRYDEHHQDLTLLKALVRQQLPEKYKEIFFDQSKNGYAGYIDGGASQEEFYKFIKPILEKMDGTEELLVKLNREDLLRKQRTFDNGSIPHQIHLGELHAILRRQEDFYPFLKDNREKIEKILTFRIPYYVGPLARGNSRFAWMTRKSEETITPWNFEEVVDKGASAQSFIERMTNFDKNLPNEKVLPKHSLLYEYFTVYNELTKVKYVTEGMRKPAFLSGEQKKAIVDLLFKTNRKVTVKQLKEDYFKKIECFDSVEISGVEDRFNASLGTYHDLLKIIKDKDFLDNEENEDILEDIVLTLTLFEDREMIEERLKTYAHLFDDKVMKQLKRRRYTGWGRLSRKLINGIRDKQSGKTILDFLKSDGFANRNFMQLIHDDSLTFKEDIQKAQVSGQGDSLHEHIANLAGSPAIKKGILQTVKVVDELVKVMGRHKPENIVIEMARENQTTQKGQKNSRERMKRIEEGIKELGSQILKEHPVENTQLQNEKLYLYYLQNGRDMYVDQELDINRLSDYDVDHIVPQSFLKDDSIDNKVLTRSDKARGKSDNVPSEEVVKKMKNYWRQLLNAKLITQRKFDNLTKAERGGLSELDKAGFIKRQLVETRQITKHVAQILDSRMNTKYDENDKLIREVKVITLKSKLVSDFRKDFQFYKVREINNYHHAHDAYLNAVVGTALIKKYPKLESEFVYGDYKVYDVRKMIAKSEQEIGKATAKYFFYSNIMNFFKTEITLANGEIRKRPLIETNGETGEIVWDKGRDFATVRKVLSMPQVNIVKKTEVQTGGFSKESILPKRNSDKLIARKKDWDPKKYGGFDSPTVAYSVLVVAKVEKGKSKKLKSVKELLGITIMERSSFEKNPIDFLEAKGYKEVKKDLIIKLPKYSLFELENGRKRMLASAGELQKGNELALPSKYVNFLYLASHYEKLKGSPEDNEQKQLFVEQHKHYLDEIIEQISEFSKRVILADANLDKVLSAYNKHRDKPIREQAENIIHLFTLTNLGAPAAFKYFDTTIDRKRYTSTKEVLDATLIHQSITGLYETRIDLSQLGGDGGPAPGGSGGGGGTLQLEEEYRLFEPESTQKQEMDIWLKNFPQAWAETGGMGTAHCQAPVLIQLKATATPISIRQYPMPHEAYQGIKPHIRRMLDQGILKPCQSPWNTPLLPVKKPGTEDYRPVQDLREVNKRVEDIHPTVPNPYNLLSTLPPSHPWYTVLDLKDAFFCLRLHSESQLLFAFEWRDPEIGLSGQLTWTRLPQGFKNSPTLFNEALHSDLADFRVRYPALVLLQYVDDLLLAAATRTECLEGTKALLETLGNKGYRASAKKAQICLQEVTYLGYSLKDGQRWLTKARKEAILSIPVPKNSRQVREFLGKAGYCRLFIPGFAELAAPLYPLTRPGTLFQWGTEQQLAFEDIKKALLSSPALGLPDITKPFELFIDENSGFAKGVLVQKLGPWKRPVAYLSKKLDTVASGWPPCLRMVAAIAILVKDAGKLTLGQPLTILTSHPVEALVRQPPNKWLSNARMTHYQAMLLDAERVHFGPTVSLNPATLLPLPSGGNHHDCLQILAETHGTRPDLTDQPLPDADLTWYTDGSSFIRNGEREAGAAVTTESEVIWAAPLPPGTSAQRAELIALTQALKMAEGKKLTVYTDSRYAFATTHVHGEIYRRRGWLTSEGKEIKNKNEILALLEALFLPKRLSIIHCPGHQKGDSPQAKGNRLADDTAKKAATETHSSLTVLPAGKRTADGSEFEKRTADGSEFESPKKKAKVE

SEQ ID NO: 1257 - protein, 2093 aa, synthetic construct
  source 1..2093: note = Description of Artificial Sequence: Synthetic polypeptide
MPAAKRVKLDGGDKKYSIGLDIGTNSVGWAVITDEYKVPSKKFKVLGNTDRHSIKKNLIGALLFDSGETAEATRLKRTARRRYTRRKNRICYLQEIFSNEMAKVDDSFFHRLEESFLVEEDKKHERHPIFGNIVDEVAYHEKYPTIYHLRKKLVDSTDKADLRLIYLALAHMIKFRGHFLIEGDLNPDNSDVDKLFIQLVQTYNQLFEENPINASGVDAKAILSARLSKSRRLENLIAQLPGEKKNGLFGNLIALSLGLTPNFKSNFDLAEDAKLQLSKDTYDDDLDNLLAQIGDQYADLFLAAKNLSDAILLSDILRVNTEITKAPLSASMIKRYDEHHQDLTLLKALVRQQLPEKYKEIFFDQSKNGYAGYIDGGASQEEFYKFIKPILEKMDGTEELLVKLNREDLLRKQRTFDNGSIPHQIHLGELHAILRRQEDFYPFLKDNREKIEKILTFRIPYYVGPLARGNSRFAWMTRKSEETITPWNFEEVVDKGASAQSFIERMTNFDKNLPNEKVLPKHSLLYEYFTVYNELTKVKYVTEGMRKPAFLSGEQKKAIVDLLFKTNRKVTVKQLKEDYFKKIECFDSVEISGVEDRFNASLGTYHDLLKIIKDKDFLDNEENEDILEDIVLTLTLFEDREMIEERLKTYAHLFDDKVMKQLKRRRYTGWGRLSRKLINGIRDKQSGKTILDFLKSDGFANRNFMQLIHDDSLTFKEDIQKAQVSGQGDSLHEHIANLAGSPAIKKGILQTVKVVDELVKVMGRHKPENIVIEMARENQTTQKGQKNSRERMKRIEEGIKELGSQILKEHPVENTQLQNEKLYLYYLQNGRDMYVDQELDINRLSDYDVDHIVPQSFLKDDSIDNKVLTRSDKARGKSDNVPSEEVVKKMKNYWRQLLNAKLITQRKFDNLTKAERGGLSELDKAGFIKRQLVETRQITKHVAQILDSRMNTKYDENDKLIREVKVITLKSKLVSDFRKDFQFYKVREINNYHHAHDAYLNAVVGTALIKKYPKLESEFVYGDYKVYDVRKMIAKSEQEIGKATAKYFFYSNIMNFFKTEITLANGEIRKRPLIETNGETGEIVWDKGRDFATVRKVLSMPQVNIVKKTEVQTGGFSKESILPKRNSDKLIARKKDWDPKKYGGFDSPTVAYSVLVVAKVEKGKSKKLKSVKELLGITIMERSSFEKNPIDFLEAKGYKEVKKDLIIKLPKYSLFELENGRKRMLASAGELQKGNELALPSKYVNFLYLASHYEKLKGSPEDNEQKQLFVEQHKHYLDEIIEQISEFSKRVILADANLDKVLSAYNKHRDKPIREQAENIIHLFTLTNLGAPAAFKYFDTTIDRKRYTSTKEVLDATLIHQSITGLYETRIDLSQLGGDGGGGSPAPGGGGGTLQLEEEYRLFEPESTQKQEMDIWLKNFPQAWAETGGMGTAHCQAPVLIQLKATATPISIRQYPMPHEAYQGIKPHIRRMLDQGILKPCQSPWNTPLLPVKKPGTEDYRPVQDLREVNKRVEDIHPTVPNPYNLLSTLPPSHPWYTVLDLKDAFFCLRLHSESQLLFAFEWRDPEIGLSGQLTWTRLPQGFKNSPTLFNEALHSDLADFRVRYPALVLLQYVDDLLLAAATRTECLEGTKALLETLGNKGYRASAKKAQICLQEVTYLGYSLKDGQRWLTKARKEAILSIPVPKNSRQVREFLGKAGYCRLFIPGFAELAAPLYPLTRPGTLFQWGTEQQLAFEDIKKALLSSPALGLPDITKPFELFIDENSGFAKGVLVQKLGPWKRPVAYLSKKLDTVASGWPPCLRMVAAIAILVKDAGKLTLGQPLTILTSHPVEALVRQPPNKWLSNARMTHYQAMLLDAERVHFGPTVSLNPATLLPLPSGGNHHDCLQILAETHGTRPDLTDQPLPDADLTWYTDGSSFIRNGEREAGAAVTTESEVIWAAPLPPGTSAQRAELIALTQALKMAEGKKLTVYTDSRYAFATTHVHGEIYRRRGWLTSEGKEIKNKNEILALLEALFLPKRLSIIHCPGHQKGDSPQAKGNRLADDTAKKAATETHSSLTVLPAGKRTADGSEFEKRTADGSEFESPKKKAKVE

SEQ ID NO: 1258 - protein, 2093 aa, synthetic construct
  source 1..2093: note = Description of Artificial Sequence: Synthetic polypeptide
MPAAKRVKLDGGDKKYSIGLDIGTNSVGWAVITDEYKVPSKKFKVLGNTDRHSIKKNLIGALLFDSGETAEATRLKRTARRRYTRRKNRICYLQEIFSNEMAKVDDSFFHRLEESFLVEEDKKHERHPIFGNIVDEVAYHEKYPTIYHLRKKLVDSTDKADLRLIYLALAHMIKFRGHFLIEGDLNPDNSDVDKLFIQLVQTYNQLFEENPINASGVDAKAILSARLSKSRRLENLIAQLPGEKKNGLFGNLIALSLGLTPNFKSNFDLAEDAKLQLSKDTYDDDLDNLLAQIGDQYADLFLAAKNLSDAILLSDILRVNTEITKAPLSASMIKRYDEHHQDLTLLKALVRQQLPEKYKEIFFDQSKNGYAGYIDGGASQEEFYKFIKPILEKMDGTEELLVKLNREDLLRKQRTFDNGSIPHQIHLGELHAILRRQEDFYPFLKDNREKIEKILTFRIPYYVGPLARGNSRFAWMTRKSEETITPWNFEEVVDKGASAQSFIERMTNFDKNLPNEKVLPKHSLLYEYFTVYNELTKVKYVTEGMRKPAFLSGEQKKAIVDLLFKTNRKVTVKQLKEDYFKKIECFDSVEISGVEDRFNASLGTYHDLLKIIKDKDFLDNEENEDILEDIVLTLTLFEDREMIEERLKTYAHLFDDKVMKQLKRRRYTGWGRLSRKLINGIRDKQSGKTILDFLKSDGFANRNFMQLIHDDSLTFKEDIQKAQVSGQGDSLHEHIANLAGSPAIKKGILQTVKVVDELVKVMGRHKPENIVIEMARENQTTQKGQKNSRERMKRIEEGIKELGSQILKEHPVENTQLQNEKLYLYYLQNGRDMYVDQELDINRLSDYDVDHIVPQSFLKDDSIDNKVLTRSDKARGKSDNVPSEEVVKKMKNYWRQLLNAKLITQRKFDNLTKAERGGLSELDKAGFIKRQLVETRQITKHVAQILDSRMNTKYDENDKLIREVKVITLKSKLVSDFRKDFQFYKVREINNYHHAHDAYLNAVVGTALIKKYPKLESEFVYGDYKVYDVRKMIAKSEQEIGKATAKYFFYSNIMNFFKTEITLANGEIRKRPLIETNGETGEIVWDKGRDFATVRKVLSMPQVNIVKKTEVQTGGFSKESILPKRNSDKLIARKKDWDPKKYGGFDSPTVAYSVLVVAKVEKGKSKKLKSVKELLGITIMERSSFEKNPIDFLEAKGYKEVKKDLIIKLPKYSLFELENGRKRMLASAGELQKGNELALPSKYVNFLYLASHYEKLKGSPEDNEQKQLFVEQHKHYLDEIIEQISEFSKRVILADANLDKVLSAYNKHRDKPIREQAENIIHLFTLTNLGAPAAFKYFDTTIDRKRYTSTKEVLDATLIHQSITGLYETRIDLSQLGGDGGGSSGGGGGSGGTLQLEEEYRLFEPESTQKQEMDIWLKNFPQAWAETGGMGTAHCQAPVLIQLKATATPISIRQYPMPHEAYQGIKPHIRRMLDQGILKPCQSPWNTPLLPVKKPGTEDYRPVQDLREVNKRVEDIHPTVPNPYNLLSTLPPSHPWYTVLDLKDAFFCLRLHSESQLLFAFEWRDPEIGLSGQLTWTRLPQGFKNSPTLFNEALHSDLADFRVRYPALVLLQYVDDLLLAAATRTECLEGTKALLETLGNKGYRASAKKAQICLQEVTYLGYSLKDGQRWLTKARKEAILSIPVPKNSRQVREFLGKAGYCRLFIPGFAELAAPLYPLTRPGTLFQWGTEQQLAFEDIKKALLSSPALGLPDITKPFELFIDENSGFAKGVLVQKLGPWKRPVAYLSKKLDTVASGWPPCLRMVAAIAILVKDAGKLTLGQPLTILTSHPVEALVRQPPNKWLSNARMTHYQAMLLDAERVHFGPTVSLNPATLLPLPSGGNHHDCLQILAETHGTRPDLTDQPLPDADLTWYTDGSSFIRNGEREAGAAVTTESEVIWAAPLPPGTSAQRAELIALTQALKMAEGKKLTVYTDSRYAFATTHVHGEIYRRRGWLTSEGKEIKNKNEILALLEALFLPKRLSIIHCPGHQKGDSPQAKGNRLADDTAKKAATETHSSLTVLPAGKRTADGSEFEKRTADGSEFESPKKKAKVE

SEQ ID NO: 1259 - protein, 2095 aa, synthetic construct
  source 1..2095: note = Description of Artificial Sequence: Synthetic polypeptide
MPAAKRVKLDGGDKKYSIGLDIGTNSVGWAVITDEYKVPSKKFKVLGNTDRHSIKKNLIGALLFDSGETAEATRLKRTARRRYTRRKNRICYLQEIFSNEMAKVDDSFFHRLEESFLVEEDKKHERHPIFGNIVDEVAYHEKYPTIYHLRKKLVDSTDKADLRLIYLALAHMIKFRGHFLIEGDLNPDNSDVDKLFIQLVQTYNQLFEENPINASGVDAKAILSARLSKSRRLENLIAQLPGEKKNGLFGNLIALSLGLTPNFKSNFDLAEDAKLQLSKDTYDDDLDNLLAQIGDQYADLFLAAKNLSDAILLSDILRVNTEITKAPLSASMIKRYDEHHQDLTLLKALVRQQLPEKYKEIFFDQSKNGYAGYIDGGASQEEFYKFIKPILEKMDGTEELLVKLNREDLLRKQRTFDNGSIPHQIHLGELHAILRRQEDFYPFLKDNREKIEKILTFRIPYYVGPLARGNSRFAWMTRKSEETITPWNFEEVVDKGASAQSFIERMTNFDKNLPNEKVLPKHSLLYEYFTVYNELTKVKYVTEGMRKPAFLSGEQKKAIVDLLFKTNRKVTVKQLKEDYFKKIECFDSVEISGVEDRFNASLGTYHDLLKIIKDKDFLDNEENEDILEDIVLTLTLFEDREMIEERLKTYAHLFDDKVMKQLKRRRYTGWGRLSRKLINGIRDKQSGKTILDFLKSDGFANRNFMQLIHDDSLTFKEDIQKAQVSGQGDSLHEHIANLAGSPAIKKGILQTVKVVDELVKVMGRHKPENIVIEMARENQTTQKGQKNSRERMKRIEEGIKELGSQILKEHPVENTQLQNEKLYLYYLQNGRDMYVDQELDINRLSDYDVDHIVPQSFLKDDSIDNKVLTRSDKARGKSDNVPSEEVVKKMKNYWRQLLNAKLITQRKFDNLTKAERGGLSELDKAGFIKRQLVETRQITKHVAQILDSRMNTKYDENDKLIREVKVITLKSKLVSDFRKDFQFYKVREINNYHHAHDAYLNAVVGTALIKKYPKLESEFVYGDYKVYDVRKMIAKSEQEIGKATAKYFFYSNIMNFFKTEITLANGEIRKRPLIETNGETGEIVWDKGRDFATVRKVLSMPQVNIVKKTEVQTGGFSKESILPKRNSDKLIARKKDWDPKKYGGFDSPTVAYSVLVVAKVEKGKSKKLKSVKELLGITIMERSSFEKNPIDFLEAKGYKEVKKDLIIKLPKYSLFELENGRKRMLASAGELQKGNELALPSKYVNFLYLASHYEKLKGSPEDNEQKQLFVEQHKHYLDEIIEQISEFSKRVILADANLDKVLSAYNKHRDKPIREQAENIIHLFTLTNLGAPAAFKYFDTTIDRKRYTSTKEVLDATLIHQSITGLYETRIDLSQLGGDGGGGGEAAAKGGSGGTLQLEEEYRLFEPESTQKQEMDIWLKNFPQAWAETGGMGTAHCQAPVLIQLKATATPISIRQYPMPHEAYQGIKPHIRRMLDQGILKPCQSPWNTPLLPVKKPGTEDYRPVQDLREVNKRVEDIHPTVPNPYNLLSTLPPSHPWYTVLDLKDAFFCLRLHSESQLLFAFEWRDPEIGLSGQLTWTRLPQGFKNSPTLFNEALHSDLADFRVRYPALVLLQYVDDLLLAAATRTECLEGTKALLETLGNKGYRASAKKAQICLQEVTYLGYSLKDGQRWLTKARKEAILSIPVPKNSRQVREFLGKAGYCRLFIPGFAELAAPLYPLTRPGTLFQWGTEQQLAFEDIKKALLSSPALGLPDITKPFELFIDENSGFAKGVLVQKLGPWKRPVAYLSKKLDTVASGWPPCLRMVAAIAILVKDAGKLTLGQPLTILTSHPVEALVRQPPNKWLSNARMTHYQAMLLDAERVHFGPTVSLNPATLLPLPSGGNHHDCLQILAETHGTRPDLTDQPLPDADLTWYTDGSSFIRNGEREAGAAVTTESEVIWAAPLPPGTSAQRAELIALTQALKMAEGKKLTVYTDSRYAFATTHVHGEIYRRRGWLTSEGKEIKNKNEILALLEALFLPKRLSIIHCPGHQKGDSPQAKGNRLADDTAKKAATETHSSLTVLPAGKRTADGSEFEKRTADGSEFESPKKKAKVE

SEQ ID NO: 1260 - protein, 2089 aa, synthetic construct
  source 1..2089: note = Description of Artificial Sequence: Synthetic polypeptide
MPAAKRVKLDGGDKKYSIGLDIGTNSVGWAVITDEYKVPSKKFKVLGNTDRHSIKKNLIGALLFDSGETAEATRLKRTARRRYTRRKNRICYLQEIFSNEMAKVDDSFFHRLEESFLVEEDKKHERHPIFGNIVDEVAYHEKYPTIYHLRKKLVDSTDKADLRLIYLALAHMIKFRGHFLIEGDLNPDNSDVDKLFIQLVQTYNQLFEENPINASGVDAKAILSARLSKSRRLENLIAQLPGEKKNGLFGNLIALSLGLTPNFKSNFDLAEDAKLQLSKDTYDDDLDNLLAQIGDQYADLFLAAKNLSDAILLSDILRVNTEITKAPLSASMIKRYDEHHQDLTLLKALVRQQLPEKYKEIFFDQSKNGYAGYIDGGASQEEFYKFIKPILEKMDGTEELLVKLNREDLLRKQRTFDNGSIPHQIHLGELHAILRRQEDFYPFLKDNREKIEKILTFRIPYYVGPLARGNSRFAWMTRKSEETITPWNFEEVVDKGASAQSFIERMTNFDKNLPNEKVLPKHSLLYEYFTVYNELTKVKYVTEGMRKPAFLSGEQKKAIVDLLFKTNRKVTVKQLKEDYFKKIECFDSVEISGVEDRFNASLGTYHDLLKIIKDKDFLDNEENEDILEDIVLTLTLFEDREMIEERLKTYAHLFDDKVMKQLKRRRYTGWGRLSRKLINGIRDKQSGKTILDFLKSDGFANRNFMQLIHDDSLTFKEDIQKAQVSGQGDSLHEHIANLAGSPAIKKGILQTVKVVDELVKVMGRHKPENIVIEMARENQTTQKGQKNSRERMKRIEEGIKELGSQILKEHPVENTQLQNEKLYLYYLQNGRDMYVDQELDINRLSDYDVDHIVPQSFLKDDSIDNKVLTRSDKARGKSDNVPSEEVVKKMKNYWRQLLNAKLITQRKFDNLTKAERGGLSELDKAGFIKRQLVETRQITKHVAQILDSRMNTKYDENDKLIREVKVITLKSKLVSDFRKDFQFYKVREINNYHHAHDAYLNAVVGTALIKKYPKLESEFVYGDYKVYDVRKMIAKSEQEIGKATAKYFFYSNIMNFFKTEITLANGEIRKRPLIETNGETGEIVWDKGRDFATVRKVLSMPQVNIVKKTEVQTGGFSKESILPKRNSDKLIARKKDWDPKKYGGFDSPTVAYSVLVVAKVEKGKSKKLKSVKELLGITIMERSSFEKNPIDFLEAKGYKEVKKDLIIKLPKYSLFELENGRKRMLASAGELQKGNELALPSKYVNFLYLASHYEKLKGSPEDNEQKQLFVEQHKHYLDEIIEQISEFSKRVILADANLDKVLSAYNKHRDKPIREQAENIIHLFTLTNLGAPAAFKYFDTTIDRKRYTSTKEVLDATLIHQSITGLYETRIDLSQLGGDGGEAAAKGGTLQLEEEYRLFEPESTQKQEMDIWLKNFPQAWAETGGMGTAHCQAPVLIQLKATATPISIRQYPMPHEAYQGIKPHIRRMLDQGILKPCQSPWNTPLLPVKKPGTEDYRPVQDLREVNKRVEDIHPTVPNPYNLLSTLPPSHPWYTVLDLKDAFFCLRLHSESQLLFAFEWRDPEIGLSGQLTWTRLPQGFKNSPTLFNEALHSDLADFRVRYPALVLLQYVDDLLLAAATRTECLEGTKALLETLGNKGYRASAKKAQICLQEVTYLGYSLKDGQRWLTKARKEAILSIPVPKNSRQVREFLGKAGYCRLFIPGFAELAAPLYPLTRPGTLFQWGTEQQLAFEDIKKALLSSPALGLPDITKPFELFIDENSGFAKGVLVQKLGPWKRPVAYLSKKLDTVASGWPPCLRMVAAIAILVKDAGKLTLGQPLTILTSHPVEALVRQPPNKWLSNARMTHYQAMLLDAERVHFGPTVSLNPATLLPLPSGGNHHDCLQILAETHGTRPDLTDQPLPDADLTWYTDGSSFIRNGEREAGAAVTTESEVIWAAPLPPGTSAQRAELIALTQALKMAEGKKLTVYTDSRYAFATTHVHGEIYRRRGWLTSEGKEIKNKNEILALLEALFLPKRLSIIHCPGHQKGDSPQAKGNRLADDTAKKAATETHSSLTVLPAGKRTADGSEFEKRTADGSEFESPKKKAKVE

SEQ ID NO: 1261 - protein, 2095 aa, synthetic construct
  source 1..2095: note = Description of Artificial Sequence: Synthetic polypeptide
MPAAKRVKLDGGDKKYSIGLDIGTNSVGWAVITDEYKVPSKKFKVLGNTDRHSIKKNLIGALLFDSGETAEATRLKRTARRRYTRRKNRICYLQEIFSNEMAKVDDSFFHRLEESFLVEEDKKHERHPIFGNIVDEVAYHEKYPTIYHLRKKLVDSTDKADLRLIYLALAHMIKFRGHFLIEGDLNPDNSDVDKLFIQLVQTYNQLFEENPINASGVDAKAILSARLSKSRRLENLIAQLPGEKKNGLFGNLIALSLGLTPNFKSNFDLAEDAKLQLSKDTYDDDLDNLLAQIGDQYADLFLAAKNLSDAILLSDILRVNTEITKAPLSASMIKRYDEHHQDLTLLKALVRQQLPEKYKEIFFDQSKNGYAGYIDGGASQEEFYKFIKPILEKMDGTEELLVKLNREDLLRKQRTFDNGSIPHQIHLGELHAILRRQEDFYPFLKDNREKIEKILTFRIPYYVGPLARGNSRFAWMTRKSEETITPWNFEEVVDKGASAQSFIERMTNFDKNLPNEKVLPKHSLLYEYFTVYNELTKVKYVTEGMRKPAFLSGEQKKAIVDLLFKTNRKVTVKQLKEDYFKKIECFDSVEISGVEDRFNASLGTYHDLLKIIKDKDFLDNEENEDILEDIVLTLTLFEDREMIEERLKTYAHLFDDKVMKQLKRRRYTGWGRLSRKLINGIRDKQSGKTILDFLKSDGFANRNFMQLIHDDSLTFKEDIQKAQVSGQGDSLHEHIANLAGSPAIKKGILQTVKVVDELVKVMGRHKPENIVIEMARENQTTQKGQKNSRERMKRIEEGIKELGSQILKEHPVENTQLQNEKLYLYYLQNGRDMYVDQELDINRLSDYDVDHIVPQSFLKDDSIDNKVLTRSDKARGKSDNVPSEEVVKKMKNYWRQLLNAKLITQRKFDNLTKAERGGLSELDKAGFIKRQLVETRQITKHVAQILDSRMNTKYDENDKLIREVKVITLKSKLVSDFRKDFQFYKVREINNYHHAHDAYLNAVVGTALIKKYPKLESEFVYGDYKVYDVRKMIAKSEQEIGKATAKYFFYSNIMNFFKTEITLANGEIRKRPLIETNGETGEIVWDKGRDFATVRKVLSMPQVNIVKKTEVQTGGFSKESILPKRNSDKLIARKKDWDPKKYGGFDSPTVAYSVLVVAKVEKGKSKKLKSVKELLGITIMERSSFEKNPIDFLEAKGYKEVKKDLIIKLPKYSLFELENGRKRMLASAGELQKGNELALPSKYVNFLYLASHYEKLKGSPEDNEQKQLFVEQHKHYLDEIIEQISEFSKRVILADANLDKVLSAYNKHRDKPIREQAENIIHLFTLTNLGAPAAFKYFDTTIDRKRYTSTKEVLDATLIHQSITGLYETRIDLSQLGGDGGGGGGSSEAAAKGGTLQLEEEYRLFEPESTQKQEMDIWLKNFPQAWAETGGMGTAHCQAPVLIQLKATATPISIRQYPMPHEAYQGIKPHIRRMLDQGILKPCQSPWNTPLLPVKKPGTEDYRPVQDLREVNKRVEDIHPTVPNPYNLLSTLPPSHPWYTVLDLKDAFFCLRLHSESQLLFAFEWRDPEIGLSGQLTWTRLPQGFKNSPTLFNEALHSDLADFRVRYPALVLLQYVDDLLLAAATRTECLEGTKALLETLGNKGYRASAKKAQICLQEVTYLGYSLKDGQRWLTKARKEAILSIPVPKNSRQVREFLGKAGYCRLFIPGFAELAAPLYPLTRPGTLFQWGTEQQLAFEDIKKALLSSPALGLPDITKPFELFIDENSGFAKGVLVQKLGPWKRPVAYLSKKLDTVASGWPPCLRMVAAIAILVKDAGKLTLGQPLTILTSHPVEALVRQPPNKWLSNARMTHYQAMLLDAERVHFGPTVSLNPATLLPLPSGGNHHDCLQILAETHGTRPDLTDQPLPDADLTWYTDGSSFIRNGEREAGAAVTTESEVIWAAPLPPGTSAQRAELIALTQALKMAEGKKLTVYTDSRYAFATTHVHGEIYRRRGWLTSEGKEIKNKNEILALLEALFLPKRLSIIHCPGHQKGDSPQAKGNRLADDTAKKAATETHSSLTVLPAGKRTADGSEFEKRTADGSEFESPKKKAKVE

SEQ ID NO: 1262 - protein, 2095 aa, synthetic construct
  source 1..2095: note = Description of Artificial Sequence: Synthetic polypeptide
MPAAKRVKLDGGDKKYSIGLDIGTNSVGWAVITDEYKVPSKKFKVLGNTDRHSIKKNLIGALLFDSGETAEATRLKRTARRRYTRRKNRICYLQEIFSNEMAKVDDSFFHRLEESFLVEEDKKHERHPIFGNIVDEVAYHEKYPTIYHLRKKLVDSTDKADLRLIYLALAHMIKFRGHFLIEGDLNPDNSDVDKLFIQLVQTYNQLFEENPINASGVDAKAILSARLSKSRRLENLIAQLPGEKKNGLFGNLIALSLGLTPNFKSNFDLAEDAKLQLSKDTYDDDLDNLLAQIGDQYADLFLAAKNLSDAILLSDILRVNTEITKAPLSASMIKRYDEHHQDLTLLKALVRQQLPEKYKEIFFDQSKNGYAGYIDGGASQEEFYKFIKPILEKMDGTEELLVKLNREDLLRKQRTFDNGSIPHQIHLGELHAILRRQEDFYPFLKDNREKIEKILTFRIPYYVGPLARGNSRFAWMTRKSEETITPWNFEEVVDKGASAQSFIERMTNFDKNLPNEKVLPKHSLLYEYFTVYNELTKVKYVTEGMRKPAFLSGEQKKAIVDLLFKTNRKVTVKQLKEDYFKKIECFDSVEISGVEDRFNASLGTYHDLLKIIKDKDFLDNEENEDILEDIVLTLTLFEDREMIEERLKTYAHLFDDKVMKQLKRRRYTGWGRLSRKLINGIRDKQSGKTILDFLKSDGFANRNFMQLIHDDSLTFKEDIQKAQVSGQGDSLHEHIANLAGSPAIKKGILQTVKVVDELVKVMGRHKPENIVIEMARENQTTQKGQKNSRERMKRIEEGIKELGSQILKEHPVENTQLQNEKLYLYYLQNGRDMYVDQELDINRLSDYDVDHIVPQSFLKDDSIDNKVLTRSDKARGKSDNVPSEEVVKKMKNYWRQLLNAKLITQRKFDNLTKAERGGLSELDKAGFIKRQLVETRQITKHVAQILDSRMNTKYDENDKLIREVKVITLKSKLVSDFRKDFQFYKVREINNYHHAHDAYLNAVVGTALIKKYPKLESEFVYGDYKVYDVRKMIAKSEQEIGKATAKYFFYSNIMNFFKTEITLANGEIRKRPLIETNGETGEIVWDKGRDFATVRKVLSMPQVNIVKKTEVQTGGFSKESILPKRNSDKLIARKKDWDPKKYGGFDSPTVAYSVLVVAKVEKGKSKKLKSVKELLGITIMERSSFEKNPIDFLEAKGYKEVKKDLIIKLPKYSLFELENGRKRMLASAGELQKGNELALPSKYVNFLYLASHYEKLKGSPEDNEQKQLFVEQHKHYLDEIIEQISEFSKRVILADANLDKVLSAYNKHRDKPIREQAENIIHLFTLTNLGAPAAFKYFDTTIDRKRYTSTKEVLDATLIHQSITGLYETRIDLSQLGGDGGGGGEAAAKPAPGGTLQLEEEYRLFEPESTQKQEMDIWLKNFPQAWAETGGMGTAHCQAPVLIQLKATATPISIRQYPMPHEAYQGIKPHIRRMLDQGILKPCQSPWNTPLLPVKKPGTEDYRPVQDLREVNKRVEDIHPTVPNPYNLLSTLPPSHPWYTVLDLKDAFFCLRLHSESQLLFAFEWRDPEIGLSGQLTWTRLPQGFKNSPTLFNEALHSDLADFRVRYPALVLLQYVDDLLLAAATRTECLEGTKALLETLGNKGYRASAKKAQICLQEVTYLGYSLKDGQRWLTKARKEAILSIPVPKNSRQVREFLGKAGYCRLFIPGFAELAAPLYPLTRPGTLFQWGTEQQLAFEDIKKALLSSPALGLPDITKPFELFIDENSGFAKGVLVQKLGPWKRPVAYLSKKLDTVASGWPPCLRMVAAIAILVKDAGKLTLGQPLTILTSHPVEALVRQPPNKWLSNARMTHYQAMLLDAERVHFGPTVSLNPATLLPLPSGGNHHDCLQILAETHGTRPDLTDQPLPDADLTWYTDGSSFIRNGEREAGAAVTTESEVIWAAPLPPGTSAQRAELIALTQALKMAEGKKLTVYTDSRYAFATTHVHGEIYRRRGWLTSEGKEIKNKNEILALLEALFLPKRLSIIHCPGHQKGDSPQAKGNRLADDTAKKAATETHSSLTVLPAGKRTADGSEFEKRTADGSEFESPKKKAKVE

SEQ ID NO: 1263 - protein, 2093 aa, synthetic construct
  source 1..2093: note = Description of Artificial Sequence: Synthetic polypeptide
MPAAKRVKLDGGDKKYSIGLDIGTNSVGWAVITDEYKVPSKKFKVLGNTDRHSIKKNLIGALLFDSGETAEATRLKRTARRRYTRRKNRICYLQEIFSNEMAKVDDSFFHRLEESFLVEEDKKHERHPIFGNIVDEVAYHEKYPTIYHLRKKLVDSTDKADLRLIYLALAHMIKFRGHFLIEGDLNPDNSDVDKLFIQLVQTYNQLFEENPINASGVDAKAILSARLSKSRRLENLIAQLPGEKKNGLFGNLIALSLGLTPNFKSNFDLAEDAKLQLSKDTYDDDLDNLLAQIGDQYADLFLAAKNLSDAILLSDILRVNTEITKAPLSASMIKRYDEHHQDLTLLKALVRQQLPEKYKEIFFDQSKNGYAGYIDGGASQEEFYKFIKPILEKMDGTEELLVKLNREDLLRKQRTFDNGSIPHQIHLGELHAILRRQEDFYPFLKDNREKIEKILTFRIPYYVGPLARGNSRFAWMTRKSEETITPWNFEEVVDKGASAQSFIERMTNFDKNLPNEKVLPKHSLLYEYFTVYNELTKVKYVTEGMRKPAFLSGEQKKAIVDLLFKTNRKVTVKQLKEDYFKKIECFDSVEISGVEDRFNASLGTYHDLLKIIKDKDFLDNEENEDILEDIVLTLTLFEDREMIEERLKTYAHLFDDKVMKQLKRRRYTGWGRLSRKLINGIRDKQSGKTILDFLKSDGFANRNFMQLIHDDSLTFKEDIQKAQVSGQGDSLHEHIANLAGSPAIKKGILQTVKVVDELVKVMGRHKPENIVIEMARENQTTQKGQKNSRERMKRIEEGIKELGSQILKEHPVENTQLQNEKLYLYYLQNGRDMYVDQELDINRLSDYDVDHIVPQSFLKDDSIDNKVLTRSDKARGKSDNVPSEEVVKKMKNYWRQLLNAKLITQRKFDNLTKAERGGLSELDKAGFIKRQLVETRQITKHVAQILDSRMNTKYDENDKLIREVKVITLKSKLVSDFRKDFQFYKVREINNYHHAHDAYLNAVVGTALIKKYPKLESEFVYGDYKVYDVRKMIAKSEQEIGKATAKYFFYSNIMNFFKTEITLANGEIRKRPLIETNGETGEIVWDKGRDFATVRKVLSMPQVNIVKKTEVQTGGFSKESILPKRNSDKLIARKKDWDPKKYGGFDSPTVAYSVLVVAKVEKGKSKKLKSVKELLGITIMERSSFEKNPIDFLEAKGYKEVKKDLIIKLPKYSLFELENGRKRMLASAGELQKGNELALPSKYVNFLYLASHYEKLKGSPEDNEQKQLFVEQHKHYLDEIIEQISEFSKRVILADANLDKVLSAYNKHRDKPIREQAENIIHLFTLTNLGAPAAFKYFDTTIDRKRYTSTKEVLDATLIHQSITGLYETRIDLSQLGGDGGGGSPAPGSSGGTLQLEEEYRLFEPESTQKQEMDIWLKNFPQAWAETGGMGTAHCQAPVLIQLKATATPISIRQYPMPHEAYQGIKPHIRRMLDQGILKPCQSPWNTPLLPVKKPGTEDYRPVQDLREVNKRVEDIHPTVPNPYNLLSTLPPSHPWYTVLDLKDAFFCLRLHSESQLLFAFEWRDPEIGLSGQLTWTRLPQGFKNSPTLFNEALHSDLADFRVRYPALVLLQYVDDLLLAAATRTECLEGTKALLETLGNKGYRASAKKAQICLQEVTYLGYSLKDGQRWLTKARKEAILSIPVPKNSRQVREFLGKAGYCRLFIPGFAELAAPLYPLTRPGTLFQWGTEQQLAFEDIKKALLSSPALGLPDITKPFELFIDENSGFAKGVLVQKLGPWKRPVAYLSKKLDTVASGWPPCLRMVAAIAILVKDAGKLTLGQPLTILTSHPVEALVRQPPNKWLSNARMTHYQAMLLDAERVHFGPTVSLNPATLLPLPSGGNHHDCLQILAETHGTRPDLTDQPLPDADLTWYTDGSSFIRNGEREAGAAVTTESEVIWAAPLPPGTSAQRAELIALTQALKMAEGKKLTVYTDSRYAFATTHVHGEIYRRRGWLTSEGKEIKNKNEILALLEALFLPKRLSIIHCPGHQKGDSPQAKGNRLADDTAKKAATETHSSLTVLPAGKRTADGSEFEKRTADGSEFESPKKKAKVE

SEQ ID NO: 1264 - protein, 2095 aa, synthetic construct
  source 1..2095: note = Description of Artificial Sequence: Synthetic polypeptide
MPAAKRVKLDGGDKKYSIGLDIGTNSVGWAVITDEYKVPSKKFKVLGNTDRHSIKKNLIGALLFDSGETAEATRLKRTARRRYTRRKNRICYLQEIFSNEMAKVDDSFFHRLEESFLVEEDKKHERHPIFGNIVDEVAYHEKYPTIYHLRKKLVDSTDKADLRLIYLALAHMIKFRGHFLIEGDLNPDNSDVDKLFIQLVQTYNQLFEENPINASGVDAKAILSARLSKSRRLENLIAQLPGEKKNGLFGNLIALSLGLTPNFKSNFDLAEDAKLQLSKDTYDDDLDNLLAQIGDQYADLFLAAKNLSDAILLSDILRVNTEITKAPLSASMIKRYDEHHQDLTLLKALVRQQLPEKYKEIFFDQSKNGYAGYIDGGASQEEFYKFIKPILEKMDGTEELLVKLNREDLLRKQRTFDNGSIPHQIHLGELHAILRRQEDFYPFLKDNREKIEKILTFRIPYYVGPLARGNSRFAWMTRKSEETITPWNFEEVVDKGASAQSFIERMTNFDKNLPNEKVLPKHSLLYEYFTVYNELTKVKYVTEGMRKPAFLSGEQKKAIVDLLFKTNRKVTVKQLKEDYFKKIECFDSVEISGVEDRFNASLGTYHDLLKIIKDKDFLDNEENEDILEDIVLTLTLFEDREMIEERLKTYAHLFDDKVMKQLKRRRYTGWGRLSRKLINGIRDKQSGKTILDFLKSDGFANRNFMQLIHDDSLTFKEDIQKAQVSGQGDSLHEHIANLAGSPAIKKGILQTVKVVDELVKVMGRHKPENIVIEMARENQTTQKGQKNSRERMKRIEEGIKELGSQILKEHPVENTQLQNEKLYLYYLQNGRDMYVDQELDINRLSDYDVDHIVPQSFLKDDSIDNKVLTRSDKARGKSDNVPSEEVVKKMKNYWRQLLNAKLITQRKFDNLTKAERGGLSELDKAGFIKRQLVETRQITKHVAQILDSRMNTKYDENDKLIREVKVITLKSKLVSDFRKDFQFYKVREINNYHHAHDAYLNAVVGTALIKKYPKLESEFVYGDYKVYDVRKMIAKSEQEIGKATAKYFFYSNIMNFFKTEITLANGEIRKRPLIETNGETGEIVWDKGRDFATVRKVLSMPQVNIVKKTEVQTGGFSKESILPKRNSDKLIARKKDWDPKKYGGFDSPTVAYSVLVVAKVEKGKSKKLKSVKELLGITIMERSSFEKNPIDFLEAKGYKEVKKDLIIKLPKYSLFELENGRKRMLASAGELQKGNELALPSKYVNFLYLASHYEKLKGSPEDNEQKQLFVEQHKHYLDEIIEQISEFSKRVILADANLDKVLSAYNKHRDKPIREQAENIIHLFTLTNLGAPAAFKYFDTTIDRKRYTSTKEVLDATLIHQSITGLYETRIDLSQLGGDGGPAPEAAAKGGSGGTLQLEEEYRLFEPESTQKQEMDIWLKNFPQAWAETGGMGTAHCQAPVLIQLKATATPISIRQYPMPHEAYQGIKPHIRRMLDQGILKPCQSPWNTPLLPVKKPGTEDYRPVQDLREVNKRVEDIHPTVPNPYNLLSTLPPSHPWYTVLDLKDAFFCLRLHSESQLLFAFEWRDPEIGLSGQLTWTRLPQGFKNSPTLFNEALHSDLADFRVRYPALVLLQYVDDLLLAAATRTECLEGTKALLETLGNKGYRASAKKAQICLQEVTYLGYSLKDGQRWLTKARKEAILSIPVPKNSRQVREFLGKAGYCRLFIPGFAELAAPLYPLTRPGTLFQWGTEQQLAFEDIKKALLSSPALGLPDITKPFELFIDENSGFAKGVLVQKLGPWKRPVAYLSKKLDTVASGWPPCLRMVAAIAILVKDAGKLTLGQPLTILTSHPVEALVRQPPNKWLSNARMTHYQAMLLDAERVHFGPTVSLNPATLLPLPSGGNHHDCLQILAETHGTRPDLTDQPLPDADLTWYTDGSSFIRNGEREAGAAVTTESEVIWAAPLPPGTSAQRAELIALTQALKMAEGKKLTVYTDSRYAFATTHVHGEIYRRRGWLTSEGKEIKNKNEILALLEALFLPKRLSIIHCPGHQKGDSPQAKGNRLADDTAKKAATETHSSLTVLPAGKRTADGSEFEKRTADGSEFESPKKKAKVE

SEQ ID NO: 1265 - protein, 2095 aa, synthetic construct
  source 1..2095: note = Description of Artificial Sequence: Synthetic polypeptide
MPAAKRVKLDGGDKKYSIGLDIGTNSVGWAVITDEYKVPSKKFKVLGNTDRHSIKKNLIGALLFDSGETAEATRLKRTARRRYTRRKNRICYLQEIFSNEMAKVDDSFFHRLEESFLVEEDKKHERHPIFGNIVDEVAYHEKYPTIYHLRKKLVDSTDKADLRLIYLALAHMIKFRGHFLIEGDLNPDNSDVDKLFIQLVQTYNQLFEENPINASGVDAKAILSARLSKSRRLENLIAQLPGEKKNGLFGNLIALSLGLTPNFKSNFDLAEDAKLQLSKDTYDDDLDNLLAQIGDQYADLFLAAKNLSDAILLSDILRVNTEITKAPLSASMIKRYDEHHQDLTLLKALVRQQLPEKYKEIFFDQSKNGYAGYIDGGASQEEFYKFIKPILEKMDGTEELLVKLNREDLLRKQRTFDNGSIPHQIHLGELHAILRRQEDFYPFLKDNREKIEKILTFRIPYYVGPLARGNSRFAWMTRKSEETITPWNFEEVVDKGASAQSFIERMTNFDKNLPNEKVLPKHSLLYEYFTVYNELTKVKYVTEGMRKPAFLSGEQKKAIVDLLFKTNRKVTVKQLKEDYFKKIECFDSVEISGVEDRFNASLGTYHDLLKIIKDKDFLDNEENEDILEDIVLTLTLFEDREMIEERLKTYAHLFDDKVMKQLKRRRYTGWGRLSRKLINGIRDKQSGKTILDFLKSDGFANRNFMQLIHDDSLTFKEDIQKAQVSGQGDSLHEHIANLAGSPAIKKGILQTVKVVDELVKVMGRHKPENIVIEMARENQTTQKGQKNSRERMKRIEEGIKELGSQILKEHPVENTQLQNEKLYLYYLQNGRDMYVDQELDINRLSDYDVDHIVPQSFLKDDSIDNKVLTRSDKARGKSDNVPSEEVVKKMKNYWRQLLNAKLITQRKFDNLTKAERGGLSELDKAGFIKRQLVETRQITKHVAQILDSRMNTKYDENDKLIREVKVITLKSKLVSDFRKDFQFYKVREINNYHHAHDAYLNAVVGTALIKKYPKLESEFVYGDYKVYDVRKMIAKSEQEIGKATAKYFFYSNIMNFFKTEITLANGEIRKRPLIETNGETGEIVWDKGRDFATVRKVLSMPQVNIVKKTEVQTGGFSKESILPKRNSDKLIARKKDWDPKKYGGFDSPTVAYSVLVVAKVEKGKSKKLKSVKELLGITIMERSSFEKNPIDFLEAKGYKEVKKDLIIKLPKYSLFELENGRKRMLASAGELQKGNELALPSKYVNFLYLASHYEKLKGSPEDNEQKQLFVEQHKHYLDEIIEQISEFSKRVILADANLDKVLSAYNKHRDKPIREQAENIIHLFTLTNLGAPAAFKYFDTTIDRKRYTSTKEVLDATLIHQSITGLYETRIDLSQLGGDGGGSSEAAAKGGSGGTLQLEEEYRLFEPESTQKQEMDIWLKNFPQAWAETGGMGTAHCQAPVLIQLKATATPISIRQYPMPHEAYQGIKPHIRRMLDQGILKPCQSPWNTPLLPVKKPGTEDYRPVQDLREVNKRVEDIHPTVPNPYNLLSTLPPSHPWYTVLDLKDAFFCLRLHSESQLLFAFEWRDPEIGLSGQLTWTRLPQGFKNSPTLFNEALHSDLADFRVRYPALVLLQYVDDLLLAAATRTECLEGTKALLETLGNKGYRASAKKAQICLQEVTYLGYSLKDGQRWLTKARKEAILSIPVPKNSRQVREFLGKAGYCRLFIPGFAELAAPLYPLTRPGTLFQWGTEQQLAFEDIKKALLSSPALGLPDITKPFELFIDENSGFAKGVLVQKLGPWKRPVAYLSKKLDTVASGWPPCLRMVAAIAILVKDAGKLTLGQPLTILTSHPVEALVRQPPNKWLSNARMTHYQAMLLDAERVHFGPTVSLNPATLLPLPSGGNHHDCLQILAETHGTRPDLTDQPLPDADLTWYTDGSSFIRNGEREAGAAVTTESEVIWAAPLPPGTSAQRAELIALTQALKMAEGKKLTVYTDSRYAFATTHVHGEIYRRRGWLTSEGKEIKNKNEILALLEALFLPKRLSIIHCPGHQKGDSPQAKGNRLADDTAKKAATETHSSLTVLPAGKRTADGSEFEKRTADGSEFESPKKKAKVE

SEQ ID NO: 1266 - protein, 2095 aa, synthetic construct
  source 1..2095: note = Description of Artificial Sequence: Synthetic polypeptide
MPAAKRVKLDGGDKKYSIGLDIGTNSVGWAVITDEYKVPSKKFKVLGNTDRHSIKKNLIGALLFDSGETAEATRLKRTARRRYTRRKNRICYLQEIFSNEMAKVDDSFFHRLEESFLVEEDKKHERHPIFGNIVDEVAYHEKYPTIYHLRKKLVDSTDKADLRLIYLALAHMIKFRGHFLIEGDLNPDNSDVDKLFIQLVQTYNQLFEENPINASGVDAKAILSARLSKSRRLENLIAQLPGEKKNGLFGNLIALSLGLTPNFKSNFDLAEDAKLQLSKDTYDDDLDNLLAQIGDQYADLFLAAKNLSDAILLSDILRVNTEITKAPLSASMIKRYDEHHQDLTLLKALVRQQLPEKYKEIFFDQSKNGYAGYIDGGASQEEFYKFIKPILEKMDGTEELLVKLNREDLLRKQRTFDNGSIPHQIHLGELHAILRRQEDFYPFLKDNREKIEKILTFRIPYYVGPLARGNSRFAWMTRKSEETITPWNFEEVVDKGASAQSFIERMTNFDKNLPNEKVLPKHSLLYEYFTVYNELTKVKYVTEGMRKPAFLSGEQKKAIVDLLFKTNRKVTVKQLKEDYFKKIECFDSVEISGVEDRFNASLGTYHDLLKIIKDKDFLDNEENEDILEDIVLTLTLFEDREMIEERLKTYAHLFDDKVMKQLKRRRYTGWGRLSRKLINGIRDKQSGKTILDFLKSDGFANRNFMQLIHDDSLTFKEDIQKAQVSGQGDSLHEHIANLAGSPAIKKGILQTVKVVDELVKVMGRHKPENIVIEMARENQTTQKGQKNSRERMKRIEEGIKELGSQILKEHPVENTQLQNEKLYLYYLQNGRDMYVDQELDINRLSDYDVDHIVPQSFLKDDSIDNKVLTRSDKARGKSDNVPSEEVVKKMKNYWRQLLNAKLITQRKFDNLTKAERGGLSELDKAGFIKRQLVETRQITKHVAQILDSRMNTKYDENDKLIREVKVITLKSKLVSDFRKDFQFYKVREINNYHHAHDAYLNAVVGTALIKKYPKLESEFVYGDYKVYDVRKMIAKSEQEIGKATAKYFFYSNIMNFFKTEITLANGEIRKRPLIETNGETGEIVWDKGRDFATVRKVLSMPQVNIVKKTEVQTGGFSKESILPKRNSDKLIARKKDWDPKKYGGFDSPTVAYSVLVVAKVEKGKSKKLKSVKELLGITIMERSSFEKNPIDFLEAKGYKEVKKDLIIKLPKYSLFELENGRKRMLASAGELQKGNELALPSKYVNFLYLASHYEKLKGSPEDNEQKQLFVEQHKHYLDEIIEQISEFSKRVILADANLDKVLSAYNKHRDKPIREQAENIIHLFTLTNLGAPAAFKYFDTTIDRKRYTSTKEVLDATLIHQSITGLYETRIDLSQLGGDGGGGSPAPEAAAKGGTLQLEEEYRLFEPESTQKQEMDIWLKNFPQAWAETGGMGTAHCQAPVLIQLKATATPISIRQYPMPHEAYQGIKPHIRRMLDQGILKPCQSPWNTPLLPVKKPGTEDYRPVQDLREVNKRVEDIHPTVPNPYNLLSTLPPSHPWYTVLDLKDAFFCLRLHSESQLLFAFEWRDPEIGLSGQLTWTRLPQGFKNSPTLFNEALHSDLADFRVRYPALVLLQYVDDLLLAAATRTECLEGTKALLETLGNKGYRASAKKAQICLQEVTYLGYSLKDGQRWLTKARKEAILSIPVPKNSRQVREFLGKAGYCRLFIPGFAELAAPLYPLTRPGTLFQWGTEQQLAFEDIKKALLSSPALGLPDITKPFELFIDENSGFAKGVLVQKLGPWKRPVAYLSKKLDTVASGWPPCLRMVAAIAILVKDAGKLTLGQPLTILTSHPVEALVRQPPNKWLSNARMTHYQAMLLDAERVHFGPTVSLNPATLLPLPSGGNHHDCLQILAETHGTRPDLTDQPLPDADLTWYTDGSSFIRNGEREAGAAVTTESEVIWAAPLPPGTSAQRAELIALTQALKMAEGKKLTVYTDSRYAFATTHVHGEIYRRRGWLTSEGKEIKNKNEILALLEALFLPKRLSIIHCPGHQKGDSPQAKGNRLADDTAKKAATETHSSLTVLPAGKRTADGSEFEKRTADGSEFESPKKKAKVE

SEQ ID NO: 1267 - protein, 2092 aa, synthetic construct
  source 1..2092: note = Description of Artificial Sequence: Synthetic polypeptide
MPAAKRVKLDGGDKKYSIGLDIGTNSVGWAVITDEYKVPSKKFKVLGNTDRHSIKKNLIGALLFDSGETAEATRLKRTARRRYTRRKNRICYLQEIFSNEMAKVDDSFFHRLEESFLVEEDKKHERHPIFGNIVDEVAYHEKYPTIYHLRKKLVDSTDKADLRLIYLALAHMIKFRGHFLIEGDLNPDNSDVDKLFIQLVQTYNQLFEENPINASGVDAKAILSARLSKSRRLENLIAQLPGEKKNGLFGNLIALSLGLTPNFKSNFDLAEDAKLQLSKDTYDDDLDNLLAQIGDQYADLFLAAKNLSDAILLSDILRVNTEITKAPLSASMIKRYDEHHQDLTLLKALVRQQLPEKYKEIFFDQSKNGYAGYIDGGASQEEFYKFIKPILEKMDGTEELLVKLNREDLLRKQRTFDNGSIPHQIHLGELHAILRRQEDFYPFLKDNREKIEKILTFRIPYYVGPLARGNSRFAWMTRKSEETITPWNFEEVVDKGASAQSFIERMTNFDKNLPNEKVLPKHSLLYEYFTVYNELTKVKYVTEGMRKPAFLSGEQKKAIVDLLFKTNRKVTVKQLKEDYFKKIECFDSVEISGVEDRFNASLGTYHDLLKIIKDKDFLDNEENEDILEDIVLTLTLFEDREMIEERLKTYAHLFDDKVMKQLKRRRYTGWGRLSRKLINGIRDKQSGKTILDFLKSDGFANRNFMQLIHDDSLTFKEDIQKAQVSGQGDSLHEHIANLAGSPAIKKGILQTVKVVDELVKVMGRHKPENIVIEMARENQTTQKGQKNSRERMKRIEEGIKELGSQILKEHPVENTQLQNEKLYLYYLQNGRDMYVDQELDINRLSDYDVDHIVPQSFLKDDSIDNKVLTRSDKARGKSDNVPSEEVVKKMKNYWRQLLNAKLITQRKFDNLTKAERGGLSELDKAGFIKRQLVETRQITKHVAQILDSRMNTKYDENDKLIREVKVITLKSKLVSDFRKDFQFYKVREINNYHHAHDAYLNAVVGTALIKKYPKLESEFVYGDYKVYDVRKMIAKSEQEIGKATAKYFFYSNIMNFFKTEITLANGEIRKRPLIETNGETGEIVWDKGRDFATVRKVLSMPQVNIVKKTEVQTGGFSKESILPKRNSDKLIARKKDWDPKKYGGFDSPTVAYSVLVVAKVEKGKSKKLKSVKELLGITIMERSSFEKNPIDFLEAKGYKEVKKDLIIKLPKYSLFELENGRKRMLASAGELQKGNELALPSKYVNFLYLASHYEKLKGSPEDNEQKQLFVEQHKHYLDEIIEQISEFSKRVILADANLDKVLSAYNKHRDKPIREQAENIIHLFTLTNLGAPAAFKYFDTTIDRKRYTSTKEVLDATLIHQSITGLYETRIDLSQLGGDGGEAAAKPAPGGTLQLEEEYRLFEPESTQKQEMDIWLKNFPQAWAETGGMGTAHCQAPVLIQLKATATPISIRQYPMPHEAYQGIKPHIRRMLDQGILKPCQSPWNTPLLPVKKPGTEDYRPVQDLREVNKRVEDIHPTVPNPYNLLSTLPPSHPWYTVLDLKDAFFCLRLHSESQLLFAFEWRDPEIGLSGQLTWTRLPQGFKNSPTLFNEALHSDLADFRVRYPALVLLQYVDDLLLAAATRTECLEGTKALLETLGNKGYRASAKKAQICLQEVTYLGYSLKDGQRWLTKARKEAILSIPVPKNSRQVREFLGKAGYCRLFIPGFAELAAPLYPLTRPGTLFQWGTEQQLAFEDIKKALLSSPALGLPDITKPFELFIDENSGFAKGVLVQKLGPWKRPVAYLSKKLDTVASGWPPCLRMVAAIAILVKDAGKLTLGQPLTILTSHPVEALVRQPPNKWLSNARMTHYQAMLLDAERVHFGPTVSLNPATLLPLPSGGNHHDCLQILAETHGTRPDLTDQPLPDADLTWYTDGSSFIRNGEREAGAAVTTESEVIWAAPLPPGTSAQRAELIALTQALKMAEGKKLTVYTDSRYAFATTHVHGEIYRRRGWLTSEGKEIKNKNEILALLEALFLPKRLSIIHCPGHQKGDSPQAKGNRLADDTAKKAATETHSSLTVLPAGKRTADGSEFEKRTADGSEFESPKKKAKVE

SEQ ID NO: 1268 - protein, 2093 aa, synthetic construct
  source 1..2093: note = Description of Artificial Sequence: Synthetic polypeptide
MPAAKRVKLDGGDKKYSIGLDIGTNSVGWAVITDEYKVPSKKFKVLGNTDRHSIKKNLIGALLFDSGETAEATRLKRTARRRYTRRKNRICYLQEIFSNEMAKVDDSFFHRLEESFLVEEDKKHERHPIFGNIVDEVAYHEKYPTIYHLRKKLVDSTDKADLRLIYLALAHMIKFRGHFLIEGDLNPDNSDVDKLFIQLVQTYNQLFEENPINASGVDAKAILSARLSKSRRLENLIAQLPGEKKNGLFGNLIALSLGLTPNFKSNFDLAEDAKLQLSKDTYDDDLDNLLAQIGDQYADLFLAAKNLSDAILLSDILRVNTEITKAPLSASMIKRYDEHHQDLTLLKALVRQQLPEKYKEIFFDQSKNGYAGYIDGGASQEEFYKFIKPILEKMDGTEELLVKLNREDLLRKQRTFDNGSIPHQIHLGELHAILRRQEDFYPFLKDNREKIEKILTFRIPYYVGPLARGNSRFAWMTRKSEETITPWNFEEVVDKGASAQSFIERMTNFDKNLPNEKVLPKHSLLYEYFTVYNELTKVKYVTEGMRKPAFLSGEQKKAIVDLLFKTNRKVTVKQLKEDYFKKIECFDSVEISGVEDRFNASLGTYHDLLKIIKDKDFLDNEENEDILEDIVLTLTLFEDREMIEERLKTYAHLFDDKVMKQLKRRRYTGWGRLSRKLINGIRDKQSGKTILDFLKSDGFANRNFMQLIHDDSLTFKEDIQKAQVSGQGDSLHEHIANLAGSPAIKKGILQTVKVVDELVKVMGRHKPENIVIEMARENQTTQKGQKNSRERMKRIEEGIKELGSQILKEHPVENTQLQNEKLYLYYLQNGRDMYVDQELDINRLSDYDVDHIVPQSFLKDDSIDNKVLTRSDKARGKSDNVPSEEVVKKMKNYWRQLLNAKLITQRKFDNLTKAERGGLSELDKAGFIKRQLVETRQITKHVAQILDSRMNTKYDENDKLIREVKVITLKSKLVSDFRKDFQFYKVREINNYHHAHDAYLNAVVGTALIKKYPKLESEFVYGDYKVYDVRKMIAKSEQEIGKATAKYFFYSNIMNFFKTEITLANGEIRKRPLIETNGETGEIVWDKGRDFATVRKVLSMPQVNIVKKTEVQTGGFSKESILPKRNSDKLIARKKDWDPKKYGGFDSPTVAYSVLVVAKVEKGKSKKLKSVKELLGITIMERSSFEKNPIDFLEAKGYKEVKKDLIIKLPKYSLFELENGRKRMLASAGELQKGNELALPSKYVNFLYLASHYEKLKGSPEDNEQKQLFVEQHKHYLDEIIEQISEFSKRVILADANLDKVLSAYNKHRDKPIREQAENIIHLFTLTNLGAPAAFKYFDTTIDRKRYTSTKEVLDATLIHQSITGLYETRIDLSQLGGDGGGGGPAPGGSGGTLQLEEEYRLFEPESTQKQEMDIWLKNFPQAWAETGGMGTAHCQAPVLIQLKATATPISIRQYPMPHEAYQGIKPHIRRMLDQGILKPCQSPWNTPLLPVKKPGTEDYRPVQDLREVNKRVEDIHPTVPNPYNLLSTLPPSHPWYTVLDLKDAFFCLRLHSESQLLFAFEWRDPEIGLSGQLTWTRLPQGFKNSPTLFNEALHSDLADFRVRYPALVLLQYVDDLLLAAATRTECLEGTKALLETLGNKGYRASAKKAQICLQEVTYLGYSLKDGQRWLTKARKEAILSIPVPKNSRQVREFLGKAGYCRLFIPGFAELAAPLYPLTRPGTLFQWGTEQQLAFEDIKKALLSSPALGLPDITKPFELFIDENSGFAKGVLVQKLGPWKRPVAYLSKKLDTVASGWPPCLRMVAAIAILVKDAGKLTLGQPLTILTSHPVEALVRQPPNKWLSNARMTHYQAMLLDAERVHFGPTVSLNPATLLPLPSGGNHHDCLQILAETHGTRPDLTDQPLPDADLTWYTDGSSFIRNGEREAGAAVTTESEVIWAAPLPPGTSAQRAELIALTQALKMAEGKKLTVYTDSRYAFATTHVHGEIYRRRGWLTSEGKEIKNKNEILALLEALFLPKRLSIIHCPGHQKGDSPQAKGNRLADDTAKKAATETHSSLTVLPAGKRTADGSEFEKRTADGSEFESPKKKAKVE

SEQ ID NO: 1269 - protein, 2095 aa, synthetic construct
  source 1..2095: note = Description of Artificial Sequence: Synthetic polypeptide
MPAAKRVKLDGGDKKYSIGLDIGTNSVGWAVITDEYKVPSKKFKVLGNTDRHSIKKNLIGALLFDSGETAEATRLKRTARRRYTRRKNRICYLQEIFSNEMAKVDDSFFHRLEESFLVEEDKKHERHPIFGNIVDEVAYHEKYPTIYHLRKKLVDSTDKADLRLIYLALAHMIKFRGHFLIEGDLNPDNSDVDKLFIQLVQTYNQLFEENPINASGVDAKAILSARLSKSRRLENLIAQLPGEKKNGLFGNLIALSLGLTPNFKSNFDLAEDAKLQLSKDTYDDDLDNLLAQIGDQYADLFLAAKNLSDAILLSDILRVNTEITKAPLSASMIKRYDEHHQDLTLLKALVRQQLPEKYKEIFFDQSKNGYAGYIDGGASQEEFYKFIKPILEKMDGTEELLVKLNREDLLRKQRTFDNGSIPHQIHLGELHAILRRQEDFYPFLKDNREKIEKILTFRIPYYVGPLARGNSRFAWMTRKSEETITPWNFEEVVDKGASAQSFIERMTNFDKNLPNEKVLPKHSLLYEYFTVYNELTKVKYVTEGMRKPAFLSGEQKKAIVDLLFKTNRKVTVKQLKEDYFKKIECFDSVEISGVEDRFNASLGTYHDLLKIIKDKDFLDNEENEDILEDIVLTLTLFEDREMIEERLKTYAHLFDDKVMKQLKRRRYTGWGRLSRKLINGIRDKQSGKTILDFLKSDGFANRNFMQLIHDDSLTFKEDIQKAQVSGQGDSLHEHIANLAGSPAIKKGILQTVKVVDELVKVMGRHKPENIVIEMARENQTTQKGQKNSRERMKRIEEGIKELGSQILKEHPVENTQLQNEKLYLYYLQNGRDMYVDQELDINRLSDYDVDHIVPQSFLKDDSIDNKVLTRSDKARGKSDNVPSEEVVKKMKNYWRQLLNAKLITQRKFDNLTKAERGGLSELDKAGFIKRQLVETRQITKHVAQILDSRMNTKYDENDKLIREVKVITLKSKLVSDFRKDFQFYKVREINNYHHAHDAYLNAVVGTALIKKYPKLESEFVYGDYKVYDVRKMIAKSEQEIGKATAKYFFYSNIMNFFKTEITLANGEIRKRPLIETNGETGEIVWDKGRDFATVRKVLSMPQVNIVKKTEVQTGGFSKESILPKRNSDKLIARKKDWDPKKYGGFDSPTVAYSVLVVAKVEKGKSKKLKSVKELLGITIMERSSFEKNPIDFLEAKGYKEVKKDLIIKLPKYSLFELENGRKRMLASAGELQKGNELALPSKYVNFLYLASHYEKLKGSPEDNEQKQLFVEQHKHYLDEIIEQISEFSKRVILADANLDKVLSAYNKHRDKPIREQAENIIHLFTLTNLGAPAAFKYFDTTIDRKRYTSTKEVLDATLIHQSITGLYETRIDLSQLGGDGGGGSGGGEAAAKGGTLQLEEEYRLFEPESTQKQEMDIWLKNFPQAWAETGGMGTAHCQAPVLIQLKATATPISIRQYPMPHEAYQGIKPHIRRMLDQGILKPCQSPWNTPLLPVKKPGTEDYRPVQDLREVNKRVEDIHPTVPNPYNLLSTLPPSHPWYTVLDLKDAFFCLRLHSESQLLFAFEWRDPEIGLSGQLTWTRLPQGFKNSPTLFNEALHSDLADFRVRYPALVLLQYVDDLLLAAATRTECLEGTKALLETLGNKGYRASAKKAQICLQEVTYLGYSLKDGQRWLTKARKEAILSIPVPKNSRQVREFLGKAGYCRLFIPGFAELAAPLYPLTRPGTLFQWGTEQQLAFEDIKKALLSSPALGLPDITKPFELFIDENSGFAKGVLVQKLGPWKRPVAYLSKKLDTVASGWPPCLRMVAAIAILVKDAGKLTLGQPLTILTSHPVEALVRQPPNKWLSNARMTHYQAMLLDAERVHFGPTVSLNPATLLPLPSGGNHHDCLQILAETHGTRPDLTDQPLPDADLTWYTDGSSFIRNGEREAGAAVTTESEVIWAAPLPPGTSAQRAELIALTQALKMAEGKKLTVYTDSRYAFATTHVHGEIYRRRGWLTSEGKEIKNKNEILALLEALFLPKRLSIIHCPGHQKGDSPQAKGNRLADDTAKKAATETHSSLTVLPAGKRTADGSEFEKRTADGSEFESPKKKAKVE

SEQ ID NO: 1270 - protein, 2093 aa, synthetic construct
  source 1..2093: note = Description of Artificial Sequence: Synthetic polypeptide
MPAAKRVKLDGGDKKYSIGLDIGTNSVGWAVITDEYKVPSKKFKVLGNTDRHSIKKNLIGALLFDSGETAEATRLKRTARRRYTRRKNRICYLQEIFSNEMAKVDDSFFHRLEESFLVEEDKKHERHPIFGNIVDEVAYHEKYPTIYHLRKKLVDSTDKADLRLIYLALAHMIKFRGHFLIEGDLNPDNSDVDKLFIQLVQTYNQLFEENPINASGVDAKAILSARLSKSRRLENLIAQLPGEKKNGLFGNLIALSLGLTPNFKSNFDLAEDAKLQLSKDTYDDDLDNLLAQIGDQYADLFLAAKNLSDAILLSDILRVNTEITKAPLSASMIKRYDEHHQDLTLLKALVRQQLPEKYKEIFFDQSKNGYAGYIDGGASQEEFYKFIKPILEKMDGTEELLVKLNREDLLRKQRTFDNGSIPHQIHLGELHAILRRQEDFYPFLKDNREKIEKILTFRIPYYVGPLARGNSRFAWMTRKSEETITPWNFEEVVDKGASAQSFIERMTNFDKNLPNEKVLPKHSLLYEYFTVYNELTKVKYVTEGMRKPAFLSGEQKKAIVDLLFKTNRKVTVKQLKEDYFKKIECFDSVEISGVEDRFNASLGTYHDLLKIIKDKDFLDNEENEDILEDIVLTLTLFEDREMIEERLKTYAHLFDDKVMKQLKRRRYTGWGRLSRKLINGIRDKQSGKTILDFLKSDGFANRNFMQLIHDDSLTFKEDIQKAQVSGQGDSLHEHIANLAGSPAIKKGILQTVKVVDELVKVMGRHKPENIVIEMARENQTTQKGQKNSRERMKRIEEGIKELGSQILKEHPVENTQLQNEKLYLYYLQNGRDMYVDQELDINRLSDYDVDHIVPQSFLKDDSIDNKVLTRSDKARGKSDNVPSEEVVKKMKNYWRQLLNAKLITQRKFDNLTKAERGGLSELDKAGFIKRQLVETRQITKHVAQILDSRMNTKYDENDKLIREVKVITLKSKLVSDFRKDFQFYKVREINNYHHAHDAYLNAVVGTALIKKYPKLESEFVYGDYKVYDVRKMIAKSEQEIGKATAKYFFYSNIMNFFKTEITLANGEIRKRPLIETNGETGEIVWDKGRDFATVRKVLSMPQVNIVKKTEVQTGGFSKESILPKRNSDKLIARKKDWDPKKYGGFDSPTVAYSVLVVAKVEKGKSKKLKSVKELLGITIMERSSFEKNPIDFLEAKGYKEVKKDLIIKLPKYSLFELENGRKRMLASAGELQKGNELALPSKYVNFLYLASHYEKLKGSPEDNEQKQLFVEQHKHYLDEIIEQISEFSKRVILADANLDKVLSAYNKHRDKPIREQAENIIHLFTLTNLGAPAAFKYFDTTIDRKRYTSTKEVLDATLIHQSITGLYETRIDLSQLGGDGGGGSGSSGGGGGTLQLEEEYRLFEPESTQKQEMDIWLKNFPQAWAETGGMGTAHCQAPVLIQLKATATPISIRQYPMPHEAYQGIKPHIRRMLDQGILKPCQSPWNTPLLPVKKPGTEDYRPVQDLREVNKRVEDIHPTVPNPYNLLSTLPPSHPWYTVLDLKDAFFCLRLHSESQLLFAFEWRDPEIGLSGQLTWTRLPQGFKNSPTLFNEALHSDLADFRVRYPALVLLQYVDDLLLAAATRTECLEGTKALLETLGNKGYRASAKKAQICLQEVTYLGYSLKDGQRWLTKARKEAILSIPVPKNSRQVREFLGKAGYCRLFIPGFAELAAPLYPLTRPGTLFQWGTEQQLAFEDIKKALLSSPALGLPDITKPFELFIDENSGFAKGVLVQKLGPWKRPVAYLSKKLDTVASGWPPCLRMVAAIAILVKDAGKLTLGQPLTILTSHPVEALVRQPPNKWLSNARMTHYQAMLLDAERVHFGPTVSLNPATLLPLPSGGNHHDCLQILAETHGTRPDLTDQPLPDADLTWYTDGSSFIRNGEREAGAAVTTESEVIWAAPLPPGTSAQRAELIALTQALKMAEGKKLTVYTDSRYAFATTHVHGEIYRRRGWLTSEGKEIKNKNEILALLEALFLPKRLSIIHCPGHQKGDSPQAKGNRLADDTAKKAATETHSSLTVLPAGKRTADGSEFEKRTADGSEFESPKKKAKVE

SEQ ID NO: 1271 - protein, 2092 aa, synthetic construct
  source 1..2092: note = Description of Artificial Sequence: Synthetic polypeptide
MPAAKRVKLDGGDKKYSIGLDIGTNSVGWAVITDEYKVPSKKFKVLGNTDRHSIKKNLIGALLFDSGETAEATRLKRTARRRYTRRKNRICYLQEIFSNEMAKVDDSFFHRLEESFLVEEDKKHERHPIFGNIVDEVAYHEKYPTIYHLRKKLVDSTDKADLRLIYLALAHMIKFRGHFLIEGDLNPDNSDVDKLFIQLVQTYNQLFEENPINASGVDAKAILSARLSKSRRLENLIAQLPGEKKNGLFGNLIALSLGLTPNFKSNFDLAEDAKLQLSKDTYDDDLDNLLAQIGDQYADLFLAAKNLSDAILLSDILRVNTEITKAPLSASMIKRYDEHHQDLTLLKALVRQQLPEKYKEIFFDQSKNGYAGYIDGGASQEEFYKFIKPILEKMDGTEELLVKLNREDLLRKQRTFDNGSIPHQIHLGELHAILRRQEDFYPFLKDNREKIEKILTFRIPYYVGPLARGNSRFAWMTRKSEETITPWNFEEVVDKGASAQSFIERMTNFDKNLPNEKVLPKHSLLYEYFTVYNELTKVKYVTEGMRKPAFLSGEQKKAIVDLLFKTNRKVTVKQLKEDYFKKIECFDSVEISGVEDRFNASLGTYHDLLKIIKDKDFLDNEENEDILEDIVLTLTLFEDREMIEERLKTYAHLFDDKVMKQLKRRRYTGWGRLSRKLINGIRDKQSGKTILDFLKSDGFANRNFMQLIHDDSLTFKEDIQKAQVSGQGDSLHEHIANLAGSPAIKKGILQTVKVVDELVKVMGRHKPENIVIEMARENQTTQKGQKNSRERMKRIEEGIKELGSQILKEHPVENTQLQNEKLYLYYLQNGRDMYVDQELDINRLSDYDVDHIVPQSFLKDDSIDNKVLTRSDKARGKSDNVPSEEVVKKMKNYWRQLLNAKLITQRKFDNLTKAERGGLSELDKAGFIKRQLVETRQITKHVAQILDSRMNTKYDENDKLIREVKVITLKSKLVSDFRKDFQFYKVREINNYHHAHDAYLNAVVGTALIKKYPKLESEFVYGDYKVYDVRKMIAKSEQEIGKATAKYFFYSNIMNFFKTEITLANGEIRKRPLIETNGETGEIVWDKGRDFATVRKVLSMPQVNIVKKTEVQTGGFSKESILPKRNSDKLIARKKDWDPKKYGGFDSPTVAYSVLVVAKVEKGKSKKLKSVKELLGITIMERSSFEKNPIDFLEAKGYKEVKKDLIIKLPKYSLFELENGRKRMLASAGELQKGNELALPSKYVNFLYLASHYEKLKGSPEDNEQKQLFVEQHKHYLDEIIEQISEFSKRVILADANLDKVLSAYNKHRDKPIREQAENIIHLFTLTNLGAPAAFKYFDTTIDRKRYTSTKEVLDATLIHQSITGLYETRIDLSQLGGDGGEAAAKGGGGGTLQLEEEYRLFEPESTQKQEMDIWLKNFPQAWAETGGMGTAHCQAPVLIQLKATATPISIRQYPMPHEAYQGIKPHIRRMLDQGILKPCQSPWNTPLLPVKKPGTEDYRPVQDLREVNKRVEDIHPTVPNPYNLLSTLPPSHPWYTVLDLKDAFFCLRLHSESQLLFAFEWRDPEIGLSGQLTWTRLPQGFKNSPTLFNEALHSDLADFRVRYPALVLLQYVDDLLLAAATRTECLEGTKALLETLGNKGYRASAKKAQICLQEVTYLGYSLKDGQRWLTKARKEAILSIPVPKNSRQVREFLGKAGYCRLFIPGFAELAAPLYPLTRPGTLFQWGTEQQLAFEDIKKALLSSPALGLPDITKPFELFIDENSGFAKGVLVQKLGPWKRPVAYLSKKLDTVASGWPPCLRMVAAIAILVKDAGKLTLGQPLTILTSHPVEALVRQPPNKWLSNARMTHYQAMLLDAERVHFGPTVSLNPATLLPLPSGGNHHDCLQILAETHGTRPDLTDQPLPDADLTWYTDGSSFIRNGEREAGAAVTTESEVIWAAPLPPGTSAQRAELIALTQALKMAEGKKLTVYTDSRYAFATTHVHGEIYRRRGWLTSEGKEIKNKNEILALLEALFLPKRLSIIHCPGHQKGDSPQAKGNRLADDTAKKAATETHSSLTVLPAGKRTADGSEFEKRTADGSEFESPKKKAKVE

SEQ ID NO: 1272 - protein, 2090 aa, synthetic construct
  source 1..2090: note = Description of Artificial Sequence: Synthetic polypeptide
MPAAKRVKLDGGDKKYSIGLDIGTNSVGWAVITDEYKVPSKKFKVLGNTDRHSIKKNLIGALLFDSGETAEATRLKRTARRRYTRRKNRICYLQEIFSNEMAKVDDSFFHRLEESFLVEEDKKHERHPIFGNIVDEVAYHEKYPTIYHLRKKLVDSTDKADLRLIYLALAHMIKFRGHFLIEGDLNPDNSDVDKLFIQLVQTYNQLFEENPINASGVDAKAILSARLSKSRRLENLIAQLPGEKKNGLFGNLIALSLGLTPNFKSNFDLAEDAKLQLSKDTYDDDLDNLLAQIGDQYADLFLAAKNLSDAILLSDILRVNTEITKAPLSASMIKRYDEHHQDLTLLKALVRQQLPEKYKEIFFDQSKNGYAGYIDGGASQEEFYKFIKPILEKMDGTEELLVKLNREDLLRKQRTFDNGSIPHQIHLGELHAILRRQEDFYPFLKDNREKIEKILTFRIPYYVGPLARGNSRFAWMTRKSEETITPWNFEEVVDKGASAQSFIERMTNFDKNLPNEKVLPKHSLLYEYFTVYNELTKVKYVTEGMRKPAFLSGEQKKAIVDLLFKTNRKVTVKQLKEDYFKKIECFDSVEISGVEDRFNASLGTYHDLLKIIKDKDFLDNEENEDILEDIVLTLTLFEDREMIEERLKTYAHLFDDKVMKQLKRRRYTGWGRLSRKLINGIRDKQSGKTILDFLKSDGFANRNFMQLIHDDSLTFKEDIQKAQVSGQGDSLHEHIANLAGSPAIKKGILQTVKVVDELVKVMGRHKPENIVIEMARENQTTQKGQKNSRERMKRIEEGIKELGSQILKEHPVENTQLQNEKLYLYYLQNGRDMYVDQELDINRLSDYDVDHIVPQSFLKDDSIDNKVLTRSDKARGKSDNVPSEEVVKKMKNYWRQLLNAKLITQRKFDNLTKAERGGLSELDKAGFIKRQLVETRQITKHVAQILDSRMNTKYDENDKLIREVKVITLKSKLVSDFRKDFQFYKVREINNYHHAHDAYLNAVVGTALIKKYPKLESEFVYGDYKVYDVRKMIAKSEQEIGKATAKYFFYSNIMNFFKTEITLANGEIRKRPLIETNGETGEIVWDKGRDFATVRKVLSMPQVNIVKKTEVQTGGFSKESILPKRNSDKLIARKKDWDPKKYGGFDSPTVAYSVLVVAKVEKGKSKKLKSVKELLGITIMERSSFEKNPIDFLEAKGYKEVKKDLIIKLPKYSLFELENGRKRMLASAGELQKGNELALPSKYVNFLYLASHYEKLKGSPEDNEQKQLFVEQHKHYLDEIIEQISEFSKRVILADANLDKVLSAYNKHRDKPIREQAENIIHLFTLTNLGAPAAFKYFDTTIDRKRYTSTKEVLDATLIHQSITGLYETRIDLSQLGGDGGGGGGSSGGTLQLEEEYRLFEPESTQKQEMDIWLKNFPQAWAETGGMGTAHCQAPVLIQLKATATPISIRQYPMPHEAYQGIKPHIRRMLDQGILKPCQSPWNTPLLPVKKPGTEDYRPVQDLREVNKRVEDIHPTVPNPYNLLSTLPPSHPWYTVLDLKDAFFCLRLHSESQLLFAFEWRDPEIGLSGQLTWTRLPQGFKNSPTLFNEALHSDLADFRVRYPALVLLQYVDDLLLAAATRTECLEGTKALLETLGNKGYRASAKKAQICLQEVTYLGYSLKDGQRWLTKARKEAILSIPVPKNSRQVREFLGKAGYCRLFIPGFAELAAPLYPLTRPGTLFQWGTEQQLAFEDIKKALLSSPALGLPDITKPFELFIDENSGFAKGVLVQKLGPWKRPVAYLSKKLDTVASGWPPCLRMVAAIAILVKDAGKLTLGQPLTILTSHPVEALVRQPPNKWLSNARMTHYQAMLLDAERVHFGPTVSLNPATLLPLPSGGNHHDCLQILAETHGTRPDLTDQPLPDADLTWYTDGSSFIRNGEREAGAAVTTESEVIWAAPLPPGTSAQRAELIALTQALKMAEGKKLTVYTDSRYAFATTHVHGEIYRRRGWLTSEGKEIKNKNEILALLEALFLPKRLSIIHCPGHQKGDSPQAKGNRLADDTAKKAATETHSSLTVLPAGKRTADGSEFEKRTADGSEFESPKKKAKVE

SEQ ID NO: 1273 - protein, 2089 aa, synthetic construct
  source 1..2089: note = Description of Artificial Sequence: Synthetic polypeptide
MPAAKRVKLDGGDKKYSIGLDIGTNSVGWAVITDEYKVPSKKFKVLGNTDRHSIKKNLIGALLFDSGETAEATRLKRTARRRYTRRKNRICYLQEIFSNEMAKVDDSFFHRLEESFLVEEDKKHERHPIFGNIVDEVAYHEKYPTIYHLRKKLVDSTDKADLRLIYLALAHMIKFRGHFLIEGDLNPDNSDVDKLFIQLVQTYNQLFEENPINASGVDAKAILSARLSKSRRLENLIAQLPGEKKNGLFGNLIALSLGLTPNFKSNFDLAEDAKLQLSKDTYDDDLDNLLAQIGDQYADLFLAAKNLSDAILLSDILRVNTEITKAPLSASMIKRYDEHHQDLTLLKALVRQQLPEKYKEIFFDQSKNGYAGYIDGGASQEEFYKFIKPILEKMDGTEELLVKLNREDLLRKQRTFDNGSIPHQIHLGELHAILRRQEDFYPFLKDNREKIEKILTFRIPYYVGPLARGNSRFAWMTRKSEETITPWNFEEVVDKGASAQSFIERMTNFDKNLPNEKVLPKHSLLYEYFTVYNELTKVKYVTEGMRKPAFLSGEQKKAIVDLLFKTNRKVTVKQLKEDYFKKIECFDSVEISGVEDRFNASLGTYHDLLKIIKDKDFLDNEENEDILEDIVLTLTLFEDREMIEERLKTYAHLFDDKVMKQLKRRRYTGWGRLSRKLINGIRDKQSGKTILDFLKSDGFANRNFMQLIHDDSLTFKEDIQKAQVSGQGDSLHEHIANLAGSPAIKKGILQTVKVVDELVKVMGRHKPENIVIEMARENQTTQKGQKNSRERMKRIEEGIKELGSQILKEHPVENTQLQNEKLYLYYLQNGRDMYVDQELDINRLSDYDVDHIVPQSFLKDDSIDNKVLTRSDKARGKSDNVPSEEVVKKMKNYWRQLLNAKLITQRKFDNLTKAERGGLSELDKAGFIKRQLVETRQITKHVAQILDSRMNTKYDENDKLIREVKVITLKSKLVSDFRKDFQFYKVREINNYHHAHDAYLNAVVGTALIKKYPKLESEFVYGDYKVYDVRKMIAKSEQEIGKATAKYFFYSNIMNFFKTEITLANGEIRKRPLIETNGETGEIVWDKGRDFATVRKVLSMPQVNIVKKTEVQTGGFSKESILPKRNSDKLIARKKDWDPKKYGGFDSPTVAYSVLVVAKVEKGKSKKLKSVKELLGITIMERSSFEKNPIDFLEAKGYKEVKKDLIIKLPKYSLFELENGRKRMLASAGELQKGNELALPSKYVNFLYLASHYEKLKGSPEDNEQKQLFVEQHKHYLDEIIEQISEFSKRVILADANLDKVLSAYNKHRDKPIREQAENIIHLFTLTNLGAPAAFKYFDTTIDRKRYTSTKEVLDATLIHQSITGLYETRIDLSQLGGDGGGGGGSGGTLQLEEEYRLFEPESTQKQEMDIWLKNFPQAWAETGGMGTAHCQAPVLIQLKATATPISIRQYPMPHEAYQGIKPHIRRMLDQGILKPCQSPWNTPLLPVKKPGTEDYRPVQDLREVNKRVEDIHPTVPNPYNLLSTLPPSHPWYTVLDLKDAFFCLRLHSESQLLFAFEWRDPEIGLSGQLTWTRLPQGFKNSPTLFNEALHSDLADFRVRYPALVLLQYVDDLLLAAATRTECLEGTKALLETLGNKGYRASAKKAQICLQEVTYLGYSLKDGQRWLTKARKEAILSIPVPKNSRQVREFLGKAGYCRLFIPGFAELAAPLYPLTRPGTLFQWGTEQQLAFEDIKKALLSSPALGLPDITKPFELFIDENSGFAKGVLVQKLGPWKRPVAYLSKKLDTVASGWPPCLRMVAAIAILVKDAGKLTLGQPLTILTSHPVEALVRQPPNKWLSNARMTHYQAMLLDAERVHFGPTVSLNPATLLPLPSGGNHHDCLQILAETHGTRPDLTDQPLPDADLTWYTDGSSFIRNGEREAGAAVTTESEVIWAAPLPPGTSAQRAELIALTQALKMAEGKKLTVYTDSRYAFATTHVHGEIYRRRGWLTSEGKEIKNKNEILALLEALFLPKRLSIIHCPGHQKGDSPQAKGNRLADDTAKKAATETHSSLTVLPAGKRTADGSEFEKRTADGSEFESPKKKAKVE

SEQ ID NO: 1274 - protein, 2099 aa, synthetic construct
  source 1..2099: note = Description of Artificial Sequence: Synthetic polypeptide
MPAAKRVKLDGGDKKYSIGLDIGTNSVGWAVITDEYKVPSKKFKVLGNTDRHSIKKNLIGALLFDSGETAEATRLKRTARRRYTRRKNRICYLQEIFSNEMAKVDDSFFHRLEESFLVEEDKKHERHPIFGNIVDEVAYHEKYPTIYHLRKKLVDSTDKADLRLIYLALAHMIKFRGHFLIEGDLNPDNSDVDKLFIQLVQTYNQLFEENPINASGVDAKAILSARLSKSRRLENLIAQLPGEKKNGLFGNLIALSLGLTPNFKSNFDLAEDAKLQLSKDTYDDDLDNLLAQIGDQYADLFLAAKNLSDAILLSDILRVNTEITKAPLSASMIKRYDEHHQDLTLLKALVRQQLPEKYKEIFFDQSKNGYAGYIDGGASQEEFYKFIKPILEKMDGTEELLVKLNREDLLRKQRTFDNGSIPHQIHLGELHAILRRQEDFYPFLKDNREKIEKILTFRIPYYVGPLARGNSRFAWMTRKSEETITPWNFEEVVDKGASAQSFIERMTNFDKNLPNEKVLPKHSLLYEYFTVYNELTKVKYVTEGMRKPAFLSGEQKKAIVDLLFKTNRKVTVKQLKEDYFKKIECFDSVEISGVEDRFNASLGTYHDLLKIIKDKDFLDNEENEDILEDIVLTLTLFEDREMIEERLKTYAHLFDDKVMKQLKRRRYTGWGRLSRKLINGIRDKQSGKTILDFLKSDGFANRNFMQLIHDDSLTFKEDIQKAQVSGQGDSLHEHIANLAGSPAIKKGILQTVKVVDELVKVMGRHKPENIVIEMARENQTTQKGQKNSRERMKRIEEGIKELGSQILKEHPVENTQLQNEKLYLYYLQNGRDMYVDQELDINRLSDYDVDHIVPQSFLKDDSIDNKVLTRSDKARGKSDNVPSEEVVKKMKNYWRQLLNAKLITQRKFDNLTKAERGGLSELDKAGFIKRQLVETRQITKHVAQILDSRMNTKYDENDKLIREVKVITLKSKLVSDFRKDFQFYKVREINNYHHAHDAYLNAVVGTALIKKYPKLESEFVYGDYKVYDVRKMIAKSEQEIGKATAKYFFYSNIMNFFKTEITLANGEIRKRPLIETNGETGEIVWDKGRDFATVRKVLSMPQVNIVKKTEVQTGGFSKESILPKRNSDKLIARKKDWDPKKYGGFDSPTVAYSVLVVAKVEKGKSKKLKSVKELLGITIMERSSFEKNPIDFLEAKGYKEVKKDLIIKLPKYSLFELENGRKRMLASAGELQKGNELALPSKYVNFLYLASHYEKLKGSPEDNEQKQLFVEQHKHYLDEIIEQISEFSKRVILADANLDKVLSAYNKHRDKPIREQAENIIHLFTLTNLGAPAAFKYFDTTIDRKRYTSTKEVLDATLIHQSITGLYETRIDLSQLGGDGGGSSGSSGSSGSSGSSGGTLQLEEEYRLFEPESTQKQEMDIWLKNFPQAWAETGGMGTAHCQAPVLIQLKATATPISIRQYPMPHEAYQGIKPHIRRMLDQGILKPCQSPWNTPLLPVKKPGTEDYRPVQDLREVNKRVEDIHPTVPNPYNLLSTLPPSHPWYTVLDLKDAFFCLRLHSESQLLFAFEWRDPEIGLSGQLTWTRLPQGFKNSPTLFNEALHSDLADFRVRYPALVLLQYVDDLLLAAATRTECLEGTKALLETLGNKGYRASAKKAQICLQEVTYLGYSLKDGQRWLTKARKEAILSIPVPKNSRQVREFLGKAGYCRLFIPGFAELAAPLYPLTRPGTLFQWGTEQQLAFEDIKKALLSSPALGLPDITKPFELFIDENSGFAKGVLVQKLGPWKRPVAYLSKKLDTVASGWPPCLRMVAAIAILVKDAGKLTLGQPLTILTSHPVEALVRQPPNKWLSNARMTHYQAMLLDAERVHFGPTVSLNPATLLPLPSGGNHHDCLQILAETHGTRPDLTDQPLPDADLTWYTDGSSFIRNGEREAGAAVTTESEVIWAAPLPPGTSAQRAELIALTQALKMAEGKKLTVYTDSRYAFATTHVHGEIYRRRGWLTSEGKEIKNKNEILALLEALFLPKRLSIIHCPGHQKGDSPQAKGNRLADDTAKKAATETHSSLTVLPAGKRTADGSEFEKRTADGSEFESPKKKAKVE

SEQ ID NO: 1275 - protein, 2093 aa, synthetic construct
  source 1..2093: note = Description of Artificial Sequence: Synthetic polypeptide
MPAAKRVKLDGGDKKYSIGLDIGTNSVGWAVITDEYKVPSKKFKVLGNTDRHSIKKNLIGALLFDSGETAEATRLKRTARRRYTRRKNRICYLQEIFSNEMAKVDDSFFHRLEESFLVEEDKKHERHPIFGNIVDEVAYHEKYPTIYHLRKKLVDSTDKADLRLIYLALAHMIKFRGHFLIEGDLNPDNSDVDKLFIQLVQTYNQLFEENPINASGVDAKAILSARLSKSRRLENLIAQLPGEKKNGLFGNLIALSLGLTPNFKSNFDLAEDAKLQLSKDTYDDDLDNLLAQIGDQYADLFLAAKNLSDAILLSDILRVNTEITKAPLSASMIKRYDEHHQDLTLLKALVRQQLPEKYKEIFFDQSKNGYAGYIDGGASQEEFYKFIKPILEKMDGTEELLVKLNREDLLRKQRTFDNGSIPHQIHLGELHAILRRQEDFYPFLKDNREKIEKILTFRIPYYVGPLARGNSRFAWMTRKSEETITPWNFEEVVDKGASAQSFIERMTNFDKNLPNEKVLPKHSLLYEYFTVYNELTKVKYVTEGMRKPAFLSGEQKKAIVDLLFKTNRKVTVKQLKEDYFKKIECFDSVEISGVEDRFNASLGTYHDLLKIIKDKDFLDNEENEDILEDIVLTLTLFEDREMIEERLKTYAHLFDDKVMKQLKRRRYTGWGRLSRKLINGIRDKQSGKTILDFLKSDGFANRNFMQLIHDDSLTFKEDIQKAQVSGQGDSLHEHIANLAGSPAIKKGILQTVKVVDELVKVMGRHKPENIVIEMARENQTTQKGQKNSRERMKRIEEGIKELGSQILKEHPVENTQLQNEKLYLYYLQNGRDMYVDQELDINRLSDYDVDHIVPQSFLKDDSIDNKVLTRSDKARGKSDNVPSEEVVKKMKNYWRQLLNAKLITQRKFDNLTKAERGGLSELDKAGFIKRQLVETRQITKHVAQILDSRMNTKYDENDKLIREVKVITLKSKLVSDFRKDFQFYKVREINNYHHAHDAYLNAVVGTALIKKYPKLESEFVYGDYKVYDVRKMIAKSEQEIGKATAKYFFYSNIMNFFKTEITLANGEIRKRPLIETNGETGEIVWDKGRDFATVRKVLSMPQVNIVKKTEVQTGGFSKESILPKRNSDKLIARKKDWDPKKYGGFDSPTVAYSVLVVAKVEKGKSKKLKSVKELLGITIMERSSFEKNPIDFLEAKGYKEVKKDLIIKLPKYSLFELENGRKRMLASAGELQKGNELALPSKYVNFLYLASHYEKLKGSPEDNEQKQLFVEQHKHYLDEIIEQISEFSKRVILADANLDKVLSAYNKHRDKPIREQAENIIHLFTLTNLGAPAAFKYFDTTIDRKRYTSTKEVLDATLIHQSITGLYETRIDLSQLGGDGGGGSGGGGSSGGTLQLEEEYRLFEPESTQKQEMDIWLKNFPQAWAETGGMGTAHCQAPVLIQLKATATPISIRQYPMPHEAYQGIKPHIRRMLDQGILKPCQSPWNTPLLPVKKPGTEDYRPVQDLREVNKRVEDIHPTVPNPYNLLSTLPPSHPWYTVLDLKDAFFCLRLHSESQLLFAFEWRDPEIGLSGQLTWTRLPQGFKNSPTLFNEALHSDLADFRVRYPALVLLQYVDDLLLAAATRTECLEGTKALLETLGNKGYRASAKKAQICLQEVTYLGYSLKDGQRWLTKARKEAILSIPVPKNSRQVREFLGKAGYCRLFIPGFAELAAPLYPLTRPGTLFQWGTEQQLAFEDIKKALLSSPALGLPDITKPFELFIDENSGFAKGVLVQKLGPWKRPVAYLSKKLDTVASGWPPCLRMVAAIAILVKDAGKLTLGQPLTILTSHPVEALVRQPPNKWLSNARMTHYQAMLLDAERVHFGPTVSLNPATLLPLPSGGNHHDCLQILAETHGTRPDLTDQPLPDADLTWYTDGSSFIRNGEREAGAAVTTESEVIWAAPLPPGTSAQRAELIALTQALKMAEGKKLTVYTDSRYAFATTHVHGEIYRRRGWLTSEGKEIKNKNEILALLEALFLPKRLSIIHCPGHQKGDSPQAKGNRLADDTAKKAATETHSSLTVLPAGKRTADGSEFEKRTADGSEFESPKKKAKVE

SEQ ID NO: 1276 - protein, 2093 aa, synthetic construct
  source 1..2093: note = Description of Artificial Sequence: Synthetic polypeptide
MPAAKRVKLDGGDKKYSIGLDIGTNSVGWAVITDEYKVPSKKFKVLGNTDRHSIKKNLIGALLFDSGETAEATRLKRTARRRYTRRKNRICYLQEIFSNEMAKVDDSFFHRLEESFLVEEDKKHERHPIFGNIVDEVAYHEKYPTIYHLRKKLVDSTDKADLRLIYLALAHMIKFRGHFLIEGDLNPDNSDVDKLFIQLVQTYNQLFEENPINASGVDAKAILSARLSKSRRLENLIAQLPGEKKNGLFGNLIALSLGLTPNFKSNFDLAEDAKLQLSKDTYDDDLDNLLAQIGDQYADLFLAAKNLSDAILLSDILRVNTEITKAPLSASMIKRYDEHHQDLTLLKALVRQQLPEKYKEIFFDQSKNGYAGYIDGGASQEEFYKFIKPILEKMDGTEELLVKLNREDLLRKQRTFDNGSIPHQIHLGELHAILRRQEDFYPFLKDNREKIEKILTFRIPYYVGPLARGNSRFAWMTRKSEETITPWNFEEVVDKGASAQSFIERMTNFDKNLPNEKVLPKHSLLYEYFTVYNELTKVKYVTEGMRKPAFLSGEQKKAIVDLLFKTNRKVTVKQLKEDYFKKIECFDSVEISGVEDRFNASLGTYHDLLKIIKDKDFLDNEENEDILEDIVLTLTLFEDREMIEERLKTYAHLFDDKVMKQLKRRRYTGWGRLSRKLINGIRDKQSGKTILDFLKSDGFANRNFMQLIHDDSLTFKEDIQKAQVSGQGDSLHEHIANLAGSPAIKKGILQTVKVVDELVKVMGRHKPENIVIEMARENQTTQKGQKNSRERMKRIEEGIKELGSQILKEHPVENTQLQNEKLYLYYLQNGRDMYVDQELDINRLSDYDVDHIVPQSFLKDDSIDNKVLTRSDKARGKSDNVPSEEVVKKMKNYWRQLLNAKLITQRKFDNLTKAERGGLSELDKAGFIKRQLVETRQITKHVAQILDSRMNTKYDENDKLIREVKVITLKSKLVSDFRKDFQFYKVREINNYHHAHDAYLNAVVGTALIKKYPKLESEFVYGDYKVYDVRKMIAKSEQEIGKATAKYFFYSNIMNFFKTEITLANGEIRKRPLIETNGETGEIVWDKGRDFATVRKVLSMPQVNIVKKTEVQTGGFSKESILPKRNSDKLIARKKDWDPKKYGGFDSPTVAYSVLVVAKVEKGKSKKLKSVKELLGITIMERSSFEKNPIDFLEAKGYKEVKKDLIIKLPKYSLFELENGRKRMLASAGELQKGNELALPSKYVNFLYLASHYEKLKGSPEDNEQKQLFVEQHKHYLDEIIEQISEFSKRVILADANLDKVLSAYNKHRDKPIREQAENIIHLFTLTNLGAPAAFKYFDTTIDRKRYTSTKEVLDATLIHQSITGLYETRIDLSQLGGDGGPAPGSSGGSGGTLQLEEEYRLFEPESTQKQEMDIWLKNFPQAWAETGGMGTAHCQAPVLIQLKATATPISIRQYPMPHEAYQGIKPHIRRMLDQGILKPCQSPWNTPLLPVKKPGTEDYRPVQDLREVNKRVEDIHPTVPNPYNLLSTLPPSHPWYTVLDLKDAFFCLRLHSESQLLFAFEWRDPEIGLSGQLTWTRLPQGFKNSPTLFNEALHSDLADFRVRYPALVLLQYVDDLLLAAATRTECLEGTKALLETLGNKGYRASAKKAQICLQEVTYLGYSLKDGQRWLTKARKEAILSIPVPKNSRQVREFLGKAGYCRLFIPGFAELAAPLYPLTRPGTLFQWGTEQQLAFEDIKKALLSSPALGLPDITKPFELFIDENSGFAKGVLVQKLGPWKRPVAYLSKKLDTVASGWPPCLRMVAAIAILVKDAGKLTLGQPLTILTSHPVEALVRQPPNKWLSNARMTHYQAMLLDAERVHFGPTVSLNPATLLPLPSGGNHHDCLQILAETHGTRPDLTDQPLPDADLTWYTDGSSFIRNGEREAGAAVTTESEVIWAAPLPPGTSAQRAELIALTQALKMAEGKKLTVYTDSRYAFATTHVHGEIYRRRGWLTSEGKEIKNKNEILALLEALFLPKRLSIIHCPGHQKGDSPQAKGNRLADDTAKKAATETHSSLTVLPAGKRTADGSEFEKRTADGSEFESPKKKAKVE

SEQ ID NO: 1277 - protein, 2093 aa, synthetic construct
  source 1..2093: note = Description of Artificial Sequence: Synthetic polypeptide
MPAAKRVKLDGGDKKYSIGLDIGTNSVGWAVITDEYKVPSKKFKVLGNTDRHSIKKNLIGALLFDSGETAEATRLKRTARRRYTRRKNRICYLQEIFSNEMAKVDDSFFHRLEESFLVEEDKKHERHPIFGNIVDEVAYHEKYPTIYHLRKKLVDSTDKADLRLIYLALAHMIKFRGHFLIEGDLNPDNSDVDKLFIQLVQTYNQLFEENPINASGVDAKAILSARLSKSRRLENLIAQLPGEKKNGLFGNLIALSLGLTPNFKSNFDLAEDAKLQLSKDTYDDDLDNLLAQIGDQYADLFLAAKNLSDAILLSDILRVNTEITKAPLSASMIKRYDEHHQDLTLLKALVRQQLPEKYKEIFFDQSKNGYAGYIDGGASQEEFYKFIKPILEKMDGTEELLVKLNREDLLRKQRTFDNGSIPHQIHLGELHAILRRQEDFYPFLKDNREKIEKILTFRIPYYVGPLARGNSRFAWMTRKSEETITPWNFEEVVDKGASAQSFIERMTNFDKNLPNEKVLPKHSLLYEYFTVYNELTKVKYVTEGMRKPAFLSGEQKKAIVDLLFKTNRKVTVKQLKEDYFKKIECFDSVEISGVEDRFNASLGTYHDLLKIIKDKDFLDNEENEDILEDIVLTLTLFEDREMIEERLKTYAHLFDDKVMKQLKRRRYTGWGRLSRKLINGIRDKQSGKTILDFLKSDGFANRNFMQLIHDDSLTFKEDIQKAQVSGQGDSLHEHIANLAGSPAIKKGILQTVKVVDELVKVMGRHKPENIVIEMARENQTTQKGQKNSRERMKRIEEGIKELGSQILKEHPVENTQLQNEKLYLYYLQNGRDMYVDQELDINRLSDYDVDHIVPQSFLKDDSIDNKVLTRSDKARGKSDNVPSEEVVKKMKNYWRQLLNAKLITQRKFDNLTKAERGGLSELDKAGFIKRQLVETRQITKHVAQILDSRMNTKYDENDKLIREVKVITLKSKLVSDFRKDFQFYKVREINNYHHAHDAYLNAVVGTALIKKYPKLESEFVYGDYKVYDVRKMIAKSEQEIGKATAKYFFYSNIMNFFKTEITLANGEIRKRPLIETNGETGEIVWDKGRDFATVRKVLSMPQVNIVKKTEVQTGGFSKESILPKRNSDKLIARKKDWDPKKYGGFDSPTVAYSVLVVAKVEKGKSKKLKSVKELLGITIMERSSFEKNPIDFLEAKGYKEVKKDLIIKLPKYSLFELENGRKRMLASAGELQKGNELALPSKYVNFLYLASHYEKLKGSPEDNEQKQLFVEQHKHYLDEIIEQISEFSKRVILADANLDKVLSAYNKHRDKPIREQAENIIHLFTLTNLGAPAAFKYFDTTIDRKRYTSTKEVLDATLIHQSITGLYETRIDLSQLGGDGGPAPGGGGSSGGTLQLEEEYRLFEPESTQKQEMDIWLKNFPQAWAETGGMGTAHCQAPVLIQLKATATPISIRQYPMPHEAYQGIKPHIRRMLDQGILKPCQSPWNTPLLPVKKPGTEDYRPVQDLREVNKRVEDIHPTVPNPYNLLSTLPPSHPWYTVLDLKDAFFCLRLHSESQLLFAFEWRDPEIGLSGQLTWTRLPQGFKNSPTLFNEALHSDLADFRVRYPALVLLQYVDDLLLAAATRTECLEGTKALLETLGNKGYRASAKKAQICLQEVTYLGYSLKDGQRWLTKARKEAILSIPVPKNSRQVREFLGKAGYCRLFIPGFAELAAPLYPLTRPGTLFQWGTEQQLAFEDIKKALLSSPALGLPDITKPFELFIDENSGFAKGVLVQKLGPWKRPVAYLSKKLDTVASGWPPCLRMVAAIAILVKDAGKLTLGQPLTILTSHPVEALVRQPPNKWLSNARMTHYQAMLLDAERVHFGPTVSLNPATLLPLPSGGNHHDCLQILAETHGTRPDLTDQPLPDADLTWYTDGSSFIRNGEREAGAAVTTESEVIWAAPLPPGTSAQRAELIALTQALKMAEGKKLTVYTDSRYAFATTHVHGEIYRRRGWLTSEGKEIKNKNEILALLEALFLPKRLSIIHCPGHQKGDSPQAKGNRLADDTAKKAATETHSSLTVLPAGKRTADGSEFEKRTADGSEFESPKKKAKVE

SEQ ID NO: 1278 - protein, 2095 aa, synthetic construct
  source 1..2095: note = Description of Artificial Sequence: Synthetic polypeptide
MPAAKRVKLDGGDKKYSIGLDIGTNSVGWAVITDEYKVPSKKFKVLGNTDRHSIKKNLIGALLFDSGETAEATRLKRTARRRYTRRKNRICYLQEIFSNEMAKVDDSFFHRLEESFLVEEDKKHERHPIFGNIVDEVAYHEKYPTIYHLRKKLVDSTDKADLRLIYLALAHMIKFRGHFLIEGDLNPDNSDVDKLFIQLVQTYNQLFEENPINASGVDAKAILSARLSKSRRLENLIAQLPGEKKNGLFGNLIALSLGLTPNFKSNFDLAEDAKLQLSKDTYDDDLDNLLAQIGDQYADLFLAAKNLSDAILLSDILRVNTEITKAPLSASMIKRYDEHHQDLTLLKALVRQQLPEKYKEIFFDQSKNGYAGYIDGGASQEEFYKFIKPILEKMDGTEELLVKLNREDLLRKQRTFDNGSIPHQIHLGELHAILRRQEDFYPFLKDNREKIEKILTFRIPYYVGPLARGNSRFAWMTRKSEETITPWNFEEVVDKGASAQSFIERMTNFDKNLPNEKVLPKHSLLYEYFTVYNELTKVKYVTEGMRKPAFLSGEQKKAIVDLLFKTNRKVTVKQLKEDYFKKIECFDSVEISGVEDRFNASLGTYHDLLKIIKDKDFLDNEENEDILEDIVLTLTLFEDREMIEERLKTYAHLFDDKVMKQLKRRRYTGWGRLSRKLINGIRDKQSGKTILDFLKSDGFANRNFMQLIHDDSLTFKEDIQKAQVSGQGDSLHEHIANLAGSPAIKKGILQTVKVVDELVKVMGRHKPENIVIEMARENQTTQKGQKNSRERMKRIEEGIKELGSQILKEHPVENTQLQNEKLYLYYLQNGRDMYVDQELDINRLSDYDVDHIVPQSFLKDDSIDNKVLTRSDKARGKSDNVPSEEVVKKMKNYWRQLLNAKLITQRKFDNLTKAERGGLSELDKAGFIKRQLVETRQITKHVAQILDSRMNTKYDENDKLIREVKVITLKSKLVSDFRKDFQFYKVREINNYHHAHDAYLNAVVGTALIKKYPKLESEFVYGDYKVYDVRKMIAKSEQEIGKATAKYFFYSNIMNFFKTEITLANGEIRKRPLIETNGETGEIVWDKGRDFATVRKVLSMPQVNIVKKTEVQTGGFSKESILPKRNSDKLIARKKDWDPKKYGGFDSPTVAYSVLVVAKVEKGKSKKLKSVKELLGITIMERSSFEKNPIDFLEAKGYKEVKKDLIIKLPKYSLFELENGRKRMLASAGELQKGNELALPSKYVNFLYLASHYEKLKGSPEDNEQKQLFVEQHKHYLDEIIEQISEFSKRVILADANLDKVLSAYNKHRDKPIREQAENIIHLFTLTNLGAPAAFKYFDTTIDRKRYTSTKEVLDATLIHQSITGLYETRIDLSQLGGDGGGGSEAAAKGSSGGTLQLEEEYRLFEPESTQKQEMDIWLKNFPQAWAETGGMGTAHCQAPVLIQLKATATPISIRQYPMPHEAYQGIKPHIRRMLDQGILKPCQSPWNTPLLPVKKPGTEDYRPVQDLREVNKRVEDIHPTVPNPYNLLSTLPPSHPWYTVLDLKDAFFCLRLHSESQLLFAFEWRDPEIGLSGQLTWTRLPQGFKNSPTLFNEALHSDLADFRVRYPALVLLQYVDDLLLAAATRTECLEGTKALLETLGNKGYRASAKKAQICLQEVTYLGYSLKDGQRWLTKARKEAILSIPVPKNSRQVREFLGKAGYCRLFIPGFAELAAPLYPLTRPGTLFQWGTEQQLAFEDIKKALLSSPALGLPDITKPFELFIDENSGFAKGVLVQKLGPWKRPVAYLSKKLDTVASGWPPCLRMVAAIAILVKDAGKLTLGQPLTILTSHPVEALVRQPPNKWLSNARMTHYQAMLLDAERVHFGPTVSLNPATLLPLPSGGNHHDCLQILAETHGTRPDLTDQPLPDADLTWYTDGSSFIRNGEREAGAAVTTESEVIWAAPLPPGTSAQRAELIALTQALKMAEGKKLTVYTDSRYAFATTHVHGEIYRRRGWLTSEGKEIKNKNEILALLEALFLPKRLSIIHCPGHQKGDSPQAKGNRLADDTAKKAATETHSSLTVLPAGKRTADGSEFEKRTADGSEFESPKKKAKVE

SEQ ID NO: 1279 - protein, 2095 aa, synthetic construct
  source 1..2095: note = Description of Artificial Sequence: Synthetic polypeptide
MPAAKRVKLDGGDKKYSIGLDIGTNSVGWAVITDEYKVPSKKFKVLGNTDRHSIKKNLIGALLFDSGETAEATRLKRTARRRYTRRKNRICYLQEIFSNEMAKVDDSFFHRLEESFLVEEDKKHERHPIFGNIVDEVAYHEKYPTIYHLRKKLVDSTDKADLRLIYLALAHMIKFRGHFLIEGDLNPDNSDVDKLFIQLVQTYNQLFEENPINASGVDAKAILSARLSKSRRLENLIAQLPGEKKNGLFGNLIALSLGLTPNFKSNFDLAEDAKLQLSKDTYDDDLDNLLAQIGDQYADLFLAAKNLSDAILLSDILRVNTEITKAPLSASMIKRYDEHHQDLTLLKALVRQQLPEKYKEIFFDQSKNGYAGYIDGGASQEEFYKFIKPILEKMDGTEELLVKLNREDLLRKQRTFDNGSIPHQIHLGELHAILRRQEDFYPFLKDNREKIEKILTFRIPYYVGPLARGNSRFAWMTRKSEETITPWNFEEVVDKGASAQSFIERMTNFDKNLPNEKVLPKHSLLYEYFTVYNELTKVKYVTEGMRKPAFLSGEQKKAIVDLLFKTNRKVTVKQLKEDYFKKIECFDSVEISGVEDRFNASLGTYHDLLKIIKDKDFLDNEENEDILEDIVLTLTLFEDREMIEERLKTYAHLFDDKVMKQLKRRRYTGWGRLSRKLINGIRDKQSGKTILDFLKSDGFANRNFMQLIHDDSLTFKEDIQKAQVSGQGDSLHEHIANLAGSPAIKKGILQTVKVVDELVKVMGRHKPENIVIEMARENQTTQKGQKNSRERMKRIEEGIKELGSQILKEHPVENTQLQNEKLYLYYLQNGRDMYVDQELDINRLSDYDVDHIVPQSFLKDDSIDNKVLTRSDKARGKSDNVPSEEVVKKMKNYWRQLLNAKLITQRKFDNLTKAERGGLSELDKAGFIKRQLVETRQITKHVAQILDSRMNTKYDENDKLIREVKVITLKSKLVSDFRKDFQFYKVREINNYHHAHDAYLNAVVGTALIKKYPKLESEFVYGDYKVYDVRKMIAKSEQEIGKATAKYFFYSNIMNFFKTEITLANGEIRKRPLIETNGETGEIVWDKGRDFATVRKVLSMPQVNIVKKTEVQTGGFSKESILPKRNSDKLIARKKDWDPKKYGGFDSPTVAYSVLVVAKVEKGKSKKLKSVKELLGITIMERSSFEKNPIDFLEAKGYKEVKKDLIIKLPKYSLFELENGRKRMLASAGELQKGNELALPSKYVNFLYLASHYEKLKGSPEDNEQKQLFVEQHKHYLDEIIEQISEFSKRVILADANLDKVLSAYNKHRDKPIREQAENIIHLFTLTNLGAPAAFKYFDTTIDRKRYTSTKEVLDATLIHQSITGLYETRIDLSQLGGDGGEAAAKGGSGGGGGTLQLEEEYRLFEPESTQKQEMDIWLKNFPQAWAETGGMGTAHCQAPVLIQLKATATPISIRQYPMPHEAYQGIKPHIRRMLDQGILKPCQSPWNTPLLPVKKPGTEDYRPVQDLREVNKRVEDIHPTVPNPYNLLSTLPPSHPWYTVLDLKDAFFCLRLHSESQLLFAFEWRDPEIGLSGQLTWTRLPQGFKNSPTLFNEALHSDLADFRVRYPALVLLQYVDDLLLAAATRTECLEGTKALLETLGNKGYRASAKKAQICLQEVTYLGYSLKDGQRWLTKARKEAILSIPVPKNSRQVREFLGKAGYCRLFIPGFAELAAPLYPLTRPGTLFQWGTEQQLAFEDIKKALLSSPALGLPDITKPFELFIDENSGFAKGVLVQKLGPWKRPVAYLSKKLDTVASGWPPCLRMVAAIAILVKDAGKLTLGQPLTILTSHPVEALVRQPPNKWLSNARMTHYQAMLLDAERVHFGPTVSLNPATLLPLPSGGNHHDCLQILAETHGTRPDLTDQPLPDADLTWYTDGSSFIRNGEREAGAAVTTESEVIWAAPLPPGTSAQRAELIALTQALKMAEGKKLTVYTDSRYAFATTHVHGEIYRRRGWLTSEGKEIKNKNEILALLEALFLPKRLSIIHCPGHQKGDSPQAKGNRLADDTAKKAATETHSSLTVLPAGKRTADGSEFEKRTADGSEFESPKKKAKVE

SEQ ID NO: 1280 - protein, 2092 aa, synthetic construct
  source 1..2092: note = Description of Artificial Sequence: Synthetic polypeptide
MPAAKRVKLDGGDKKYSIGLDIGTNSVGWAVITDEYKVPSKKFKVLGNTDRHSIKKNLIGALLFDSGETAEATRLKRTARRRYTRRKNRICYLQEIFSNEMAKVDDSFFHRLEESFLVEEDKKHERHPIFGNIVDEVAYHEKYPTIYHLRKKLVDSTDKADLRLIYLALAHMIKFRGHFLIEGDLNPDNSDVDKLFIQLVQTYNQLFEENPINASGVDAKAILSARLSKSRRLENLIAQLPGEKKNGLFGNLIALSLGLTPNFKSNFDLAEDAKLQLSKDTYDDDLDNLLAQIGDQYADLFLAAKNLSDAILLSDILRVNTEITKAPLSASMIKRYDEHHQDLTLLKALVRQQLPEKYKEIFFDQSKNGYAGYIDGGASQEEFYKFIKPILEKMDGTEELLVKLNREDLLRKQRTFDNGSIPHQIHLGELHAILRRQEDFYPFLKDNREKIEKILTFRIPYYVGPLARGNSRFAWMTRKSEETITPWNFEEVVDKGASAQSFIERMTNFDKNLPNEKVLPKHSLLYEYFTVYNELTKVKYVTEGMRKPAFLSGEQKKAIVDLLFKTNRKVTVKQLKEDYFKKIECFDSVEISGVEDRFNASLGTYHDLLKIIKDKDFLDNEENEDILEDIVLTLTLFEDREMIEERLKTYAHLFDDKVMKQLKRRRYTGWGRLSRKLINGIRDKQSGKTILDFLKSDGFANRNFMQLIHDDSLTFKEDIQKAQVSGQGDSLHEHIANLAGSPAIKKGILQTVKVVDELVKVMGRHKPENIVIEMARENQTTQKGQKNSRERMKRIEEGIKELGSQILKEHPVENTQLQNEKLYLYYLQNGRDMYVDQELDINRLSDYDVDHIVPQSFLKDDSIDNKVLTRSDKARGKSDNVPSEEVVKKMKNYWRQLLNAKLITQRKFDNLTKAERGGLSELDKAGFIKRQLVETRQITKHVAQILDSRMNTKYDENDKLIREVKVITLKSKLVSDFRKDFQFYKVREINNYHHAHDAYLNAVVGTALIKKYPKLESEFVYGDYKVYDVRKMIAKSEQEIGKATAKYFFYSNIMNFFKTEITLANGEIRKRPLIETNGETGEIVWDKGRDFATVRKVLSMPQVNIVKKTEVQTGGFSKESILPKRNSDKLIARKKDWDPKKYGGFDSPTVAYSVLVVAKVEKGKSKKLKSVKELLGITIMERSSFEKNPIDFLEAKGYKEVKKDLIIKLPKYSLFELENGRKRMLASAGELQKGNELALPSKYVNFLYLASHYEKLKGSPEDNEQKQLFVEQHKHYLDEIIEQISEFSKRVILADANLDKVLSAYNKHRDKPIREQAENIIHLFTLTNLGAPAAFKYFDTTIDRKRYTSTKEVLDATLIHQSITGLYETRIDLSQLGGDGGGGGEAAAKGGTLQLEEEYRLFEPESTQKQEMDIWLKNFPQAWAETGGMGTAHCQAPVLIQLKATATPISIRQYPMPHEAYQGIKPHIRRMLDQGILKPCQSPWNTPLLPVKKPGTEDYRPVQDLREVNKRVEDIHPTVPNPYNLLSTLPPSHPWYTVLDLKDAFFCLRLHSESQLLFAFEWRDPEIGLSGQLTWTRLPQGFKNSPTLFNEALHSDLADFRVRYPALVLLQYVDDLLLAAATRTECLEGTKALLETLGNKGYRASAKKAQICLQEVTYLGYSLKDGQRWLTKARKEAILSIPVPKNSRQVREFLGKAGYCRLFIPGFAELAAPLYPLTRPGTLFQWGTEQQLAFEDIKKALLSSPALGLPDITKPFELFIDENSGFAKGVLVQKLGPWKRPVAYLSKKLDTVASGWPPCLRMVAAIAILVKDAGKLTLGQPLTILTSHPVEALVRQPPNKWLSNARMTHYQAMLLDAERVHFGPTVSLNPATLLPLPSGGNHHDCLQILAETHGTRPDLTDQPLPDADLTWYTDGSSFIRNGEREAGAAVTTESEVIWAAPLPPGTSAQRAELIALTQALKMAEGKKLTVYTDSRYAFATTHVHGEIYRRRGWLTSEGKEIKNKNEILALLEALFLPKRLSIIHCPGHQKGDSPQAKGNRLADDTAKKAATETHSSLTVLPAGKRTADGSEFEKRTADGSEFESPKKKAKVE

SEQ ID NO: 1281 - protein, 2090 aa, synthetic construct
  source 1..2090: note = Description of Artificial Sequence: Synthetic polypeptide
MPAAKRVKLDGGDKKYSIGLDIGTNSVGWAVITDEYKVPSKKFKVLGNTDRHSIKKNLIGALLFDSGETAEATRLKRTARRRYTRRKNRICYLQEIFSNEMAKVDDSFFHRLEESFLVEEDKKHERHPIFGNIVDEVAYHEKYPTIYHLRKKLVDSTDKADLRLIYLALAHMIKFRGHFLIEGDLNPDNSDVDKLFIQLVQTYNQLFEENPINASGVDAKAILSARLSKSRRLENLIAQLPGEKKNGLFGNLIALSLGLTPNFKSNFDLAEDAKLQLSKDTYDDDLDNLLAQIGDQYADLFLAAKNLSDAILLSDILRVNTEITKAPLSASMIKRYDEHHQDLTLLKALVRQQLPEKYKEIFFDQSKNGYAGYIDGGASQEEFYKFIKPILEKMDGTEELLVKLNREDLLRKQRTFDNGSIPHQIHLGELHAILRRQEDFYPFLKDNREKIEKILTFRIPYYVGPLARGNSRFAWMTRKSEETITPWNFEEVVDKGASAQSFIERMTNFDKNLPNEKVLPKHSLLYEYFTVYNELTKVKYVTEGMRKPAFLSGEQKKAIVDLLFKTNRKVTVKQLKEDYFKKIECFDSVEISGVEDRFNASLGTYHDLLKIIKDKDFLDNEENEDILEDIVLTLTLFEDREMIEERLKTYAHLFDDKVMKQLKRRRYTGWGRLSRKLINGIRDKQSGKTILDFLKSDGFANRNFMQLIHDDSLTFKEDIQKAQVSGQGDSLHEHIANLAGSPAIKKGILQTVKVVDELVKVMGRHKPENIVIEMARENQTTQKGQKNSRERMKRIEEGIKELGSQILKEHPVENTQLQNEKLYLYYLQNGRDMYVDQELDINRLSDYDVDHIVPQSFLKDDSIDNKVLTRSDKARGKSDNVPSEEVVKKMKNYWRQLLNAKLITQRKFDNLTKAERGGLSELDKAGFIKRQLVETRQITKHVAQILDSRMNTKYDENDKLIREVKVITLKSKLVSDFRKDFQFYKVREINNYHHAHDAYLNAVVGTALIKKYPKLESEFVYGDYKVYDVRKMIAKSEQEIGKATAKYFFYSNIMNFFKTEITLANGEIRKRPLIETNGETGEIVWDKGRDFATVRKVLSMPQVNIVKKTEVQTGGFSKESILPKRNSDKLIARKKDWDPKKYGGFDSPTVAYSVLVVAKVEKGKSKKLKSVKELLGITIMERSSFEKNPIDFLEAKGYKEVKKDLIIKLPKYSLFELENGRKRMLASAGELQKGNELALPSKYVNFLYLASHYEKLKGSPEDNEQKQLFVEQHKHYLDEIIEQISEFSKRVILADANLDKVLSAYNKHRDKPIREQAENIIHLFTLTNLGAPAAFKYFDTTIDRKRYTSTKEVLDATLIHQSITGLYETRIDLSQLGGDGGGGGGGSGGTLQLEEEYRLFEPESTQKQEMDIWLKNFPQAWAETGGMGTAHCQAPVLIQLKATATPISIRQYPMPHEAYQGIKPHIRRMLDQGILKPCQSPWNTPLLPVKKPGTEDYRPVQDLREVNKRVEDIHPTVPNPYNLLSTLPPSHPWYTVLDLKDAFFCLRLHSESQLLFAFEWRDPEIGLSGQLTWTRLPQGFKNSPTLFNEALHSDLADFRVRYPALVLLQYVDDLLLAAATRTECLEGTKALLETLGNKGYRASAKKAQICLQEVTYLGYSLKDGQRWLTKARKEAILSIPVPKNSRQVREFLGKAGYCRLFIPGFAELAAPLYPLTRPGTLFQWGTEQQLAFEDIKKALLSSPALGLPDITKPFELFIDENSGFAKGVLVQKLGPWKRPVAYLSKKLDTVASGWPPCLRMVAAIAILVKDAGKLTLGQPLTILTSHPVEALVRQPPNKWLSNARMTHYQAMLLDAERVHFGPTVSLNPATLLPLPSGGNHHDCLQILAETHGTRPDLTDQPLPDADLTWYTDGSSFIRNGEREAGAAVTTESEVIWAAPLPPGTSAQRAELIALTQALKMAEGKKLTVYTDSRYAFATTHVHGEIYRRRGWLTSEGKEIKNKNEILALLEALFLPKRLSIIHCPGHQKGDSPQAKGNRLADDTAKKAATETHSSLTVLPAGKRTADGSEFEKRTADGSEFESPKKKAKVE

SEQ ID NO: 1282 - protein, 2211 aa, synthetic construct
  source 1..2211: note = Description of Artificial Sequence: Synthetic polypeptide
MPAAKRVKLDGGDKKYSIGLDIGTNSVGWAVITDEYKVPSKKFKVLGNTDRHSIKKNLIGALLFDSGETAEATRLKRTARRRYTRRKNRICYLQEIFSNEMAKVDDSFFHRLEESFLVEEDKKHERHPIFGNIVDEVAYHEKYPTIYHLRKKLVDSTDKADLRLIYLALAHMIKFRGHFLIEGDLNPDNSDVDKLFIQLVQTYNQLFEENPINASGVDAKAILSARLSKSRRLENLIAQLPGEKKNGLFGNLIALSLGLTPNFKSNFDLAEDAKLQLSKDTYDDDLDNLLAQIGDQYADLFLAAKNLSDAILLSDILRVNTEITKAPLSASMIKRYDEHHQDLTLLKALVRQQLPEKYKEIFFDQSKNGYAGYIDGGASQEEFYKFIKPILEKMDGTEELLVKLNREDLLRKQRTFDNGSIPHQIHLGELHAILRRQEDFYPFLKDNREKIEKILTFRIPYYVGPLARGNSRFAWMTRKSEETITPWNFEEVVDKGASAQSFIERMTNFDKNLPNEKVLPKHSLLYEYFTVYNELTKVKYVTEGMRKPAFLSGEQKKAIVDLLFKTNRKVTVKQLKEDYFKKIECFDSVEISGVEDRFNASLGTYHDLLKIIKDKDFLDNEENEDILEDIVLTLTLFEDREMIEERLKTYAHLFDDKVMKQLKRRRYTGWGRLSRKLINGIRDKQSGKTILDFLKSDGFANRNFMQLIHDDSLTFKEDIQKAQVSGQGDSLHEHIANLAGSPAIKKGILQTVKVVDELVKVMGRHKPENIVIEMARENQTTQKGQKNSRERMKRIEEGIKELGSQILKEHPVENTQLQNEKLYLYYLQNGRDMYVDQELDINRLSDYDVDHIVPQSFLKDDSIDNKVLTRSDKARGKSDNVPSEEVVKKMKNYWRQLLNAKLITQRKFDNLTKAERGGLSELDKAGFIKRQLVETRQITKHVAQILDSRMNTKYDENDKLIREVKVITLKSKLVSDFRKDFQFYKVREINNYHHAHDAYLNAVVGTALIKKYPKLESEFVYGDYKVYDVRKMIAKSEQEIGKATAKYFFYSNIMNFFKTEITLANGEIRKRPLIETNGETGEIVWDKGRDFATVRKVLSMPQVNIVKKTEVQTGGFSKESILPKRNSDKLIARKKDWDPKKYGGFDSPTVAYSVLVVAKVEKGKSKKLKSVKELLGITIMERSSFEKNPIDFLEAKGYKEVKKDLIIKLPKYSLFELENGRKRMLASAGELQKGNELALPSKYVNFLYLASHYEKLKGSPEDNEQKQLFVEQHKHYLDEIIEQISEFSKRVILADANLDKVLSAYNKHRDKPIREQAENIIHLFTLTNLGAPAAFKYFDTTIDRKRYTSTKEVLDATLIHQSITGLYETRIDLSQLGGDGGAEAAAKEAAAKEAAAKEAAAKALEAEAAAKEAAAKEAAAKEAAAKAGGMNPLQLLQPLPAEIKGTKLLAHWNSGATITCIPESFLEDEQPIKKTLIKTIHGEKQQNVYYVTFKVKGRKVEAEVIASPYEYILLSPTDVPWLTQQPLQLTILVPLQEYQEKILSKTALPEDQKQQLKTLFVKYDNLWQHWENQVGHRKIRPHNIATGDYPPRPQKQYPINPKAKPSIQIVIDDLLKQGVLTPQNSTMNTPVYPVPKPDGRWRMVLDYREVNKTIPLTAAQNQHSAGILATIVRQKYKTTLDLANGFWAHPITPESYWLTAFTWQGKQYCWTRLPQGFLNSPALFTADVVDLLKEIPNVQVYVDDIYLSHDDPKEHVQQLEKVFQILLQAGYVVSLKKSEIGQKTVEFLGFNITKEGRGLTDTFKTKLLNITPPKDLKQLQSILGLLNFARNFIPNFAELVQPLYNLIASAKGKYIEWSEENTKQLNMVIEALNTASNLEERLPEQRLVIKVNTSPSAGYVRYYNETGKKPIMYLNYVFSKAELKFSMLEKLLTTMHKALIKAMDLAMGQEILVYSPIVSMTKIQKTPLPERKALPIRWITWMTYLEDPRIQFHYDKTLPELKHIPDVYTSSQSPVKHPSQYEGVFYTDGSAIKSPDPTKSNNAGMGIVHATYKPEYQVLNQWSIPLGNHTAQMAEIAAVEFACKKALKIPGPVLVITDSFYVAESANKELPYWKSNGFVNNKKKPLKHISKWKSIAECLSMKPDITIQHEKGISLQIPVFILKGNALADKLATQGSYVVNAGKRTADGSEFEKRTADGSEFESPKKKAKVE

SEQ ID NO: 1283 - protein, 2190 aa, synthetic construct
  source 1..2190: note = Description of Artificial Sequence: Synthetic polypeptide
MPAAKRVKLDGGDKKYSIGLDIGTNSVGWAVITDEYKVPSKKFKVLGNTDRHSIKKNLIGALLFDSGETAEATRLKRTARRRYTRRKNRICYLQEIFSNEMAKVDDSFFHRLEESFLVEEDKKHERHPIFGNIVDEVAYHEKYPTIYHLRKKLVDSTDKADLRLIYLALAHMIKFRGHFLIEGDLNPDNSDVDKLFIQLVQTYNQLFEENPINASGVDAKAILSARLSKSRRLENLIAQLPGEKKNGLFGNLIALSLGLTPNFKSNFDLAEDAKLQLSKDTYDDDLDNLLAQIGDQYADLFLAAKNLSDAILLSDILRVNTEITKAPLSASMIKRYDEHHQDLTLLKALVRQQLPEKYKEIFFDQSKNGYAGYIDGGASQEEFYKFIKPILEKMDGTEELLVKLNREDLLRKQRTFDNGSIPHQIHLGELHAILRRQEDFYPFLKDNREKIEKILTFRIPYYVGPLARGNSRFAWMTRKSEETITPWNFEEVVDKGASAQSFIERMTNFDKNLPNEKVLPKHSLLYEYFTVYNELTKVKYVTEGMRKPAFLSGEQKKAIVDLLFKTNRKVTVKQLKEDYFKKIECFDSVEISGVEDRFNASLGTYHDLLKIIKDKDFLDNEENEDILEDIVLTLTLFEDREMIEERLKTYAHLFDDKVMKQLKRRRYTGWGRLSRKLINGIRDKQSGKTILDFLKSDGFANRNFMQLIHDDSLTFKEDIQKAQVSGQGDSLHEHIANLAGSPAIKKGILQTVKVVDELVKVMGRHKPENIVIEMARENQTTQKGQKNSRERMKRIEEGIKELGSQILKEHPVENTQLQNEKLYLYYLQNGRDMYVDQELDINRLSDYDVDHIVPQSFLKDDSIDNKVLTRSDKARGKSDNVPSEEVVKKMKNYWRQLLNAKLITQRKFDNLTKAERGGLSELDKAGFIKRQLVETRQITKHVAQILDSRMNTKYDENDKLIREVKVITLKSKLVSDFRKDFQFYKVREINNYHHAHDAYLNAVVGTALIKKYPKLESEFVYGDYKVYDVRKMIAKSEQEIGKATAKYFFYSNIMNFFKTEITLANGEIRKRPLIETNGETGEIVWDKGRDFATVRKVLSMPQVNIVKKTEVQTGGFSKESILPKRNSDKLIARKKDWDPKKYGGFDSPTVAYSVLVVAKVEKGKSKKLKSVKELLGITIMERSSFEKNPIDFLEAKGYKEVKKDLIIKLPKYSLFELENGRKRMLASAGELQKGNELALPSKYVNFLYLASHYEKLKGSPEDNEQKQLFVEQHKHYLDEIIEQISEFSKRVILADANLDKVLSAYNKHRDKPIREQAENIIHLFTLTNLGAPAAFKYFDTTIDRKRYTSTKEVLDATLIHQSITGLYETRIDLSQLGGDGGEAAAKEAAAKEAAAKEAAAKEAAAKGGMNPLQLLQPLPAEIKGTKLLAHWNSGATITCIPESFLEDEQPIKKTLIKTIHGEKQQNVYYVTFKVKGRKVEAEVIASPYEYILLSPTDVPWLTQQPLQLTILVPLQEYQEKILSKTALPEDQKQQLKTLFVKYDNLWQHWENQVGHRKIRPHNIATGDYPPRPQKQYPINPKAKPSIQIVIDDLLKQGVLTPQNSTMNTPVYPVPKPDGRWRMVLDYREVNKTIPLTAAQNQHSAGILATIVRQKYKTTLDLANGFWAHPITPESYWLTAFTWQGKQYCWTRLPQGFLNSPALFTADVVDLLKEIPNVQVYVDDIYLSHDDPKEHVQQLEKVFQILLQAGYVVSLKKSEIGQKTVEFLGFNITKEGRGLTDTFKTKLLNITPPKDLKQLQSILGLLNFARNFIPNFAELVQPLYNLIASAKGKYIEWSEENTKQLNMVIEALNTASNLEERLPEQRLVIKVNTSPSAGYVRYYNETGKKPIMYLNYVFSKAELKFSMLEKLLTTMHKALIKAMDLAMGQEILVYSPIVSMTKIQKTPLPERKALPIRWITWMTYLEDPRIQFHYDKTLPELKHIPDVYTSSQSPVKHPSQYEGVFYTDGSAIKSPDPTKSNNAGMGIVHATYKPEYQVLNQWSIPLGNHTAQMAEIAAVEFACKKALKIPGPVLVITDSFYVAESANKELPYWKSNGFVNNKKKPLKHISKWKSIAECLSMKPDITIQHEKGISLQIPVFILKGNALADKLATQGSYVVNAGKRTADGSEFEKRTADGSEFESPKKKAKVE

SEQ ID NO: 1284 - protein, 2183 aa, synthetic construct
  source 1..2183: note = Description of Artificial Sequence: Synthetic polypeptide
MPAAKRVKLDGGDKKYSIGLDIGTNSVGWAVITDEYKVPSKKFKVLGNTDRHSIKKNLIGALLFDSGETAEATRLKRTARRRYTRRKNRICYLQEIFSNEMAKVDDSFFHRLEESFLVEEDKKHERHPIFGNIVDEVAYHEKYPTIYHLRKKLVDSTDKADLRLIYLALAHMIKFRGHFLIEGDLNPDNSDVDKLFIQLVQTYNQLFEENPINASGVDAKAILSARLSKSRRLENLIAQLPGEKKNGLFGNLIALSLGLTPNFKSNFDLAEDAKLQLSKDTYDDDLDNLLAQIGDQYADLFLAAKNLSDAILLSDILRVNTEITKAPLSASMIKRYDEHHQDLTLLKALVRQQLPEKYKEIFFDQSKNGYAGYIDGGASQEEFYKFIKPILEKMDGTEELLVKLNREDLLRKQRTFDNGSIPHQIHLGELHAILRRQEDFYPFLKDNREKIEKILTFRIPYYVGPLARGNSRFAWMTRKSEETITPWNFEEVVDKGASAQSFIERMTNFDKNLPNEKVLPKHSLLYEYFTVYNELTKVKYVTEGMRKPAFLSGEQKKAIVDLLFKTNRKVTVKQLKEDYFKKIECFDSVEISGVEDRFNASLGTYHDLLKIIKDKDFLDNEENEDILEDIVLTLTLFEDREMIEERLKTYAHLFDDKVMKQLKRRRYTGWGRLSRKLINGIRDKQSGKTILDFLKSDGFANRNFMQLIHDDSLTFKEDIQKAQVSGQGDSLHEHIANLAGSPAIKKGILQTVKVVDELVKVMGRHKPENIVIEMARENQTTQKGQKNSRERMKRIEEGIKELGSQILKEHPVENTQLQNEKLYLYYLQNGRDMYVDQELDINRLSDYDVDHIVPQSFLKDDSIDNKVLTRSDKARGKSDNVPSEEVVKKMKNYWRQLLNAKLITQRKFDNLTKAERGGLSELDKAGFIKRQLVETRQITKHVAQILDSRMNTKYDENDKLIREVKVITLKSKLVSDFRKDFQFYKVREINNYHHAHDAYLNAVVGTALIKKYPKLESEFVYGDYKVYDVRKMIAKSEQEIGKATAKYFFYSNIMNFFKTEITLANGEIRKRPLIETNGETGEIVWDKGRDFATVRKVLSMPQVNIVKKTEVQTGGFSKESILPKRNSDKLIARKKDWDPKKYGGFDSPTVAYSVLVVAKVEKGKSKKLKSVKELLGITIMERSSFEKNPIDFLEAKGYKEVKKDLIIKLPKYSLFELENGRKRMLASAGELQKGNELALPSKYVNFLYLASHYEKLKGSPEDNEQKQLFVEQHKHYLDEIIEQISEFSKRVILADANLDKVLSAYNKHRDKPIREQAENIIHLFTLTNLGAPAAFKYFDTTIDRKRYTSTKEVLDATLIHQSITGLYETRIDLSQLGGDGGGSSGSSGSSGSSGSSGSSGGMNPLQLLQPLPAEIKGTKLLAHWNSGATITCIPESFLEDEQPIKKTLIKTIHGEKQQNVYYVTFKVKGRKVEAEVIASPYEYILLSPTDVPWLTQQPLQLTILVPLQEYQEKILSKTALPEDQKQQLKTLFVKYDNLWQHWENQVGHRKIRPHNIATGDYPPRPQKQYPINPKAKPSIQIVIDDLLKQGVLTPQNSTMNTPVYPVPKPDGRWRMVLDYREVNKTIPLTAAQNQHSAGILATIVRQKYKTTLDLANGFWAHPITPESYWLTAFTWQGKQYCWTRLPQGFLNSPALFTADVVDLLKEIPNVQVYVDDIYLSHDDPKEHVQQLEKVFQILLQAGYVVSLKKSEIGQKTVEFLGFNITKEGRGLTDTFKTKLLNITPPKDLKQLQSILGLLNFARNFIPNFAELVQPLYNLIASAKGKYIEWSEENTKQLNMVIEALNTASNLEERLPEQRLVIKVNTSPSAGYVRYYNETGKKPIMYLNYVFSKAELKFSMLEKLLTTMHKALIKAMDLAMGQEILVYSPIVSMTKIQKTPLPERKALPIRWITWMTYLEDPRIQFHYDKTLPELKHIPDVYTSSQSPVKHPSQYEGVFYTDGSAIKSPDPTKSNNAGMGIVHATYKPEYQVLNQWSIPLGNHTAQMAEIAAVEFACKKALKIPGPVLVITDSFYVAESANKELPYWKSNGFVNNKKKPLKHISKWKSIAECLSMKPDITIQHEKGISLQIPVFILKGNALADKLATQGSYVVNAGKRTADGSEFEKRTADGSEFESPKKKAKVE

SEQ ID NO: 1285 - protein, 2176 aa, synthetic construct
  source 1..2176: note = Description of Artificial Sequence: Synthetic polypeptide
MPAAKRVKLDGGDKKYSIGLDIGTNSVGWAVITDEYKVPSKKFKVLGNTDRHSIKKNLIGALLFDSGETAEATRLKRTARRRYTRRKNRICYLQEIFSNEMAKVDDSFFHRLEESFLVEEDKKHERHPIFGNIVDEVAYHEKYPTIYHLRKKLVDSTDKADLRLIYLALAHMIKFRGHFLIEGDLNPDNSDVDKLFIQLVQTYNQLFEENPINASGVDAKAILSARLSKSRRLENLIAQLPGEKKNGLFGNLIALSLGLTPNFKSNFDLAEDAKLQLSKDTYDDDLDNLLAQIGDQYADLFLAAKNLSDAILLSDILRVNTEITKAPLSASMIKRYDEHHQDLTLLKALVRQQLPEKYKEIFFDQSKNGYAGYIDGGASQEEFYKFIKPILEKMDGTEELLVKLNREDLLRKQRTFDNGSIPHQIHLGELHAILRRQEDFYPFLKDNREKIEKILTFRIPYYVGPLARGNSRFAWMTRKSEETITPWNFEEVVDKGASAQSFIERMTNFDKNLPNEKVLPKHSLLYEYFTVYNELTKVKYVTEGMRKPAFLSGEQKKAIVDLLFKTNRKVTVKQLKEDYFKKIECFDSVEISGVEDRFNASLGTYHDLLKIIKDKDFLDNEENEDILEDIVLTLTLFEDREMIEERLKTYAHLFDDKVMKQLKRRRYTGWGRLSRKLINGIRDKQSGKTILDFLKSDGFANRNFMQLIHDDSLTFKEDIQKAQVSGQGDSLHEHIANLAGSPAIKKGILQTVKVVDELVKVMGRHKPENIVIEMARENQTTQKGQKNSRERMKRIEEGIKELGSQILKEHPVENTQLQNEKLYLYYLQNGRDMYVDQELDINRLSDYDVDHIVPQSFLKDDSIDNKVLTRSDKARGKSDNVPSEEVVKKMKNYWRQLLNAKLITQRKFDNLTKAERGGLSELDKAGFIKRQLVETRQITKHVAQILDSRMNTKYDENDKLIREVKVITLKSKLVSDFRKDFQFYKVREINNYHHAHDAYLNAVVGTALIKKYPKLESEFVYGDYKVYDVRKMIAKSEQEIGKATAKYFFYSNIMNFFKTEITLANGEIRKRPLIETNGETGEIVWDKGRDFATVRKVLSMPQVNIVKKTEVQTGGFSKESILPKRNSDKLIARKKDWDPKKYGGFDSPTVAYSVLVVAKVEKGKSKKLKSVKELLGITIMERSSFEKNPIDFLEAKGYKEVKKDLIIKLPKYSLFELENGRKRMLASAGELQKGNELALPSKYVNFLYLASHYEKLKGSPEDNEQKQLFVEQHKHYLDEIIEQISEFSKRVILADANLDKVLSAYNKHRDKPIREQAENIIHLFTLTNLGAPAAFKYFDTTIDRKRYTSTKEVLDATLIHQSITGLYETRIDLSQLGGDGGPAPAPAPAPAPGGMNPLQLLQPLPAEIKGTKLLAHWNSGATITCIPESFLEDEQPIKKTLIKTIHGEKQQNVYYVTFKVKGRKVEAEVIASPYEYILLSPTDVPWLTQQPLQLTILVPLQEYQEKILSKTALPEDQKQQLKTLFVKYDNLWQHWENQVGHRKIRPHNIATGDYPPRPQKQYPINPKAKPSIQIVIDDLLKQGVLTPQNSTMNTPVYPVPKPDGRWRMVLDYREVNKTIPLTAAQNQHSAGILATIVRQKYKTTLDLANGFWAHPITPESYWLTAFTWQGKQYCWTRLPQGFLNSPALFTADVVDLLKEIPNVQVYVDDIYLSHDDPKEHVQQLEKVFQILLQAGYVVSLKKSEIGQKTVEFLGFNITKEGRGLTDTFKTKLLNITPPKDLKQLQSILGLLNFARNFIPNFAELVQPLYNLIASAKGKYIEWSEENTKQLNMVIEALNTASNLEERLPEQRLVIKVNTSPSAGYVRYYNETGKKPIMYLNYVFSKAELKFSMLEKLLTTMHKALIKAMDLAMGQEILVYSPIVSMTKIQKTPLPERKALPIRWITWMTYLEDPRIQFHYDKTLPELKHIPDVYTSSQSPVKHPSQYEGVFYTDGSAIKSPDPTKSNNAGMGIVHATYKPEYQVLNQWSIPLGNHTAQMAEIAAVEFACKKALKIPGPVLVITDSFYVAESANKELPYWKSNGFVNNKKKPLKHISKWKSIAECLSMKPDITIQHEKGISLQIPVFILKGNALADKLATQGSYVVNAGKRTADGSEFEKRTADGSEFESPKKKAKVE

SEQ ID NO: 1286 - protein, 2176 aa, synthetic construct
  source 1..2176: note = Description of Artificial Sequence: Synthetic polypeptide
MPAAKRVKLDGGDKKYSIGLDIGTNSVGWAVITDEYKVPSKKFKVLGNTDRHSIKKNLIGALLFDSGETAEATRLKRTARRRYTRRKNRICYLQEIFSNEMAKVDDSFFHRLEESFLVEEDKKHERHPIFGNIVDEVAYHEKYPTIYHLRKKLVDSTDKADLRLIYLALAHMIKFRGHFLIEGDLNPDNSDVDKLFIQLVQTYNQLFEENPINASGVDAKAILSARLSKSRRLENLIAQLPGEKKNGLFGNLIALSLGLTPNFKSNFDLAEDAKLQLSKDTYDDDLDNLLAQIGDQYADLFLAAKNLSDAILLSDILRVNTEITKAPLSASMIKRYDEHHQDLTLLKALVRQQLPEKYKEIFFDQSKNGYAGYIDGGASQEEFYKFIKPILEKMDGTEELLVKLNREDLLRKQRTFDNGSIPHQIHLGELHAILRRQEDFYPFLKDNREKIEKILTFRIPYYVGPLARGNSRFAWMTRKSEETITPWNFEEVVDKGASAQSFIERMTNFDKNLPNEKVLPKHSLLYEYFTVYNELTKVKYVTEGMRKPAFLSGEQKKAIVDLLFKTNRKVTVKQLKEDYFKKIECFDSVEISGVEDRFNASLGTYHDLLKIIKDKDFLDNEENEDILEDIVLTLTLFEDREMIEERLKTYAHLFDDKVMKQLKRRRYTGWGRLSRKLINGIRDKQSGKTILDFLKSDGFANRNFMQLIHDDSLTFKEDIQKAQVSGQGDSLHEHIANLAGSPAIKKGILQTVKVVDELVKVMGRHKPENIVIEMARENQTTQKGQKNSRERMKRIEEGIKELGSQILKEHPVENTQLQNEKLYLYYLQNGRDMYVDQELDINRLSDYDVDHIVPQSFLKDDSIDNKVLTRSDKARGKSDNVPSEEVVKKMKNYWRQLLNAKLITQRKFDNLTKAERGGLSELDKAGFIKRQLVETRQITKHVAQILDSRMNTKYDENDKLIREVKVITLKSKLVSDFRKDFQFYKVREINNYHHAHDAYLNAVVGTALIKKYPKLESEFVYGDYKVYDVRKMIAKSEQEIGKATAKYFFYSNIMNFFKTEITLANGEIRKRPLIETNGETGEIVWDKGRDFATVRKVLSMPQVNIVKKTEVQTGGFSKESILPKRNSDKLIARKKDWDPKKYGGFDSPTVAYSVLVVAKVEKGKSKKLKSVKELLGITIMERSSFEKNPIDFLEAKGYKEVKKDLIIKLPKYSLFELENGRKRMLASAGELQKGNELALPSKYVNFLYLASHYEKLKGSPEDNEQKQLFVEQHKHYLDEIIEQISEFSKRVILADANLDKVLSAYNKHRDKPIREQAENIIHLFTLTNLGAPAAFKYFDTTIDRKRYTSTKEVLDATLIHQSITGLYETRIDLSQLGGDGGGGSPAPEAAAKGGMNPLQLLQPLPAEIKGTKLLAHWNSGATITCIPESFLEDEQPIKKTLIKTIHGEKQQNVYYVTFKVKGRKVEAEVIASPYEYILLSPTDVPWLTQQPLQLTILVPLQEYQEKILSKTALPEDQKQQLKTLFVKYDNLWQHWENQVGHRKIRPHNIATGDYPPRPQKQYPINPKAKPSIQIVIDDLLKQGVLTPQNSTMNTPVYPVPKPDGRWRMVLDYREVNKTIPLTAAQNQHSAGILATIVRQKYKTTLDLANGFWAHPITPESYWLTAFTWQGKQYCWTRLPQGFLNSPALFTADVVDLLKEIPNVQVYVDDIYLSHDDPKEHVQQLEKVFQILLQAGYVVSLKKSEIGQKTVEFLGFNITKEGRGLTDTFKTKLLNITPPKDLKQLQSILGLLNFARNFIPNFAELVQPLYNLIASAKGKYIEWSEENTKQLNMVIEALNTASNLEERLPEQRLVIKVNTSPSAGYVRYYNETGKKPIMYLNYVFSKAELKFSMLEKLLTTMHKALIKAMDLAMGQEILVYSPIVSMTKIQKTPLPERKALPIRWITWMTYLEDPRIQFHYDKTLPELKHIPDVYTSSQSPVKHPSQYEGVFYTDGSAIKSPDPTKSNNAGMGIVHATYKPEYQVLNQWSIPLGNHTAQMAEIAAVEFACKKALKIPGPVLVITDSFYVAESANKELPYWKSNGFVNNKKKPLKHISKWKSIAECLSMKPDITIQHEKGISLQIPVFILKGNALADKLATQGSYVVNAGKRTADGSEFEKRTADGSEFESPKKKAKVE

SEQ ID NO: 1287 - protein, 2176 aa, synthetic construct
  source 1..2176: note = Description of Artificial Sequence: Synthetic polypeptide
MPAAKRVKLDGGDKKYSIGLDIGTNSVGWAVITDEYKVPSKKFKVLGNTDRHSIKKNLIGALLFDSGETAEATRLKRTARRRYTRRKNRICYLQEIFSNEMAKVDDSFFHRLEESFLVEEDKKHERHPIFGNIVDEVAYHEKYPTIYHLRKKLVDSTDKADLRLIYLALAHMIKFRGHFLIEGDLNPDNSDVDKLFIQLVQTYNQLFEENPINASGVDAKAILSARLSKSRRLENLIAQLPGEKKNGLFGNLIALSLGLTPNFKSNFDLAEDAKLQLSKDTYDDDLDNLLAQIGDQYADLFLAAKNLSDAILLSDILRVNTEITKAPLSASMIKRYDEHHQDLTLLKALVRQQLPEKYKEIFFDQSKNGYAGYIDGGASQEEFYKFIKPILEKMDGTEELLVKLNREDLLRKQRTFDNGSIPHQIHLGELHAILRRQEDFYPFLKDNREKIEKILTFRIPYYVGPLARGNSRFAWMTRKSEETITPWNFEEVVDKGASAQSFIERMTNFDKNLPNEKVLPKHSLLYEYFTVYNELTKVKYVTEGMRKPAFLSGEQKKAIVDLLFKTNRKVTVKQLKEDYFKKIECFDSVEISGVEDRFNASLGTYHDLLKIIKDKDFLDNEENEDILEDIVLTLTLFEDREMIEERLKTYAHLFDDKVMKQLKRRRYTGWGRLSRKLINGIRDKQSGKTILDFLKSDGFANRNFMQLIHDDSLTFKEDIQKAQVSGQGDSLHEHIANLAGSPAIKKGILQTVKVVDELVKVMGRHKPENIVIEMARENQTTQKGQKNSRERMKRIEEGIKELGSQILKEHPVENTQLQNEKLYLYYLQNGRDMYVDQELDINRLSDYDVDHIVPQSFLKDDSIDNKVLTRSDKARGKSDNVPSEEVVKKMKNYWRQLLNAKLITQRKFDNLTKAERGGLSELDKAGFIKRQLVETRQITKHVAQILDSRMNTKYDENDKLIREVKVITLKSKLVSDFRKDFQFYKVREINNYHHAHDAYLNAVVGTALIKKYPKLESEFVYGDYKVYDVRKMIAKSEQEIGKATAKYFFYSNIMNFFKTEITLANGEIRKRPLIETNGETGEIVWDKGRDFATVRKVLSMPQVNIVKKTEVQTGGFSKESILPKRNSDKLIARKKDWDPKKYGGFDSPTVAYSVLVVAKVEKGKSKKLKSVKELLGITIMERSSFEKNPIDFLEAKGYKEVKKDLIIKLPKYSLFELENGRKRMLASAGELQKGNELALPSKYVNFLYLASHYEKLKGSPEDNEQKQLFVEQHKHYLDEIIEQISEFSKRVILADANLDKVLSAYNKHRDKPIREQAENIIHLFTLTNLGAPAAFKYFDTTIDRKRYTSTKEVLDATLIHQSITGLYETRIDLSQLGGDGGEAAAKGGSPAPGGMNPLQLLQPLPAEIKGTKLLAHWNSGATITCIPESFLEDEQPIKKTLIKTIHGEKQQNVYYVTFKVKGRKVEAEVIASPYEYILLSPTDVPWLTQQPLQLTILVPLQEYQEKILSKTALPEDQKQQLKTLFVKYDNLWQHWENQVGHRKIRPHNIATGDYPPRPQKQYPINPKAKPSIQIVIDDLLKQGVLTPQNSTMNTPVYPVPKPDGRWRMVLDYREVNKTIPLTAAQNQHSAGILATIVRQKYKTTLDLANGFWAHPITPESYWLTAFTWQGKQYCWTRLPQGFLNSPALFTADVVDLLKEIPNVQVYVDDIYLSHDDPKEHVQQLEKVFQILLQAGYVVSLKKSEIGQKTVEFLGFNITKEGRGLTDTFKTKLLNITPPKDLKQLQSILGLLNFARNFIPNFAELVQPLYNLIASAKGKYIEWSEENTKQLNMVIEALNTASNLEERLPEQRLVIKVNTSPSAGYVRYYNETGKKPIMYLNYVFSKAELKFSMLEKLLTTMHKALIKAMDLAMGQEILVYSPIVSMTKIQKTPLPERKALPIRWITWMTYLEDPRIQFHYDKTLPELKHIPDVYTSSQSPVKHPSQYEGVFYTDGSAIKSPDPTKSNNAGMGIVHATYKPEYQVLNQWSIPLGNHTAQMAEIAAVEFACKKALKIPGPVLVITDSFYVAESANKELPYWKSNGFVNNKKKPLKHISKWKSIAECLSMKPDITIQHEKGISLQIPVFILKGNALADKLATQGSYVVNAGKRTADGSEFEKRTADGSEFESPKKKAKVE

SEQ ID NO: 1288 - protein, 2180 aa, synthetic construct
  source 1..2180: note = Description of Artificial Sequence: Synthetic polypeptide
MPAAKRVKLDGGDKKYSIGLDIGTNSVGWAVITDEYKVPSKKFKVLGNTDRHSIKKNLIGALLFDSGETAEATRLKRTARRRYTRRKNRICYLQEIFSNEMAKVDDSFFHRLEESFLVEEDKKHERHPIFGNIVDEVAYHEKYPTIYHLRKKLVDSTDKADLRLIYLALAHMIKFRGHFLIEGDLNPDNSDVDKLFIQLVQTYNQLFEENPINASGVDAKAILSARLSKSRRLENLIAQLPGEKKNGLFGNLIALSLGLTPNFKSNFDLAEDAKLQLSKDTYDDDLDNLLAQIGDQYADLFLAAKNLSDAILLSDILRVNTEITKAPLSASMIKRYDEHHQDLTLLKALVRQQLPEKYKEIFFDQSKNGYAGYIDGGASQEEFYKFIKPILEKMDGTEELLVKLNREDLLRKQRTFDNGSIPHQIHLGELHAILRRQEDFYPFLKDNREKIEKILTFRIPYYVGPLARGNSRFAWMTRKSEETITPWNFEEVVDKGASAQSFIERMTNFDKNLPNEKVLPKHSLLYEYFTVYNELTKVKYVTEGMRKPAFLSGEQKKAIVDLLFKTNRKVTVKQLKEDYFKKIECFDSVEISGVEDRFNASLGTYHDLLKIIKDKDFLDNEENEDILEDIVLTLTLFEDREMIEERLKTYAHLFDDKVMKQLKRRRYTGWGRLSRKLINGIRDKQSGKTILDFLKSDGFANRNFMQLIHDDSLTFKEDIQKAQVSGQGDSLHEHIANLAGSPAIKKGILQTVKVVDELVKVMGRHKPENIVIEMARENQTTQKGQKNSRERMKRIEEGIKELGSQILKEHPVENTQLQNEKLYLYYLQNGRDMYVDQELDINRLSDYDVDHIVPQSFLKDDSIDNKVLTRSDKARGKSDNVPSEEVVKKMKNYWRQLLNAKLITQRKFDNLTKAERGGLSELDKAGFIKRQLVETRQITKHVAQILDSRMNTKYDENDKLIREVKVITLKSKLVSDFRKDFQFYKVREINNYHHAHDAYLNAVVGTALIKKYPKLESEFVYGDYKVYDVRKMIAKSEQEIGKATAKYFFYSNIMNFFKTEITLANGEIRKRPLIETNGETGEIVWDKGRDFATVRKVLSMPQVNIVKKTEVQTGGFSKESILPKRNSDKLIARKKDWDPKKYGGFDSPTVAYSVLVVAKVEKGKSKKLKSVKELLGITIMERSSFEKNPIDFLEAKGYKEVKKDLIIKLPKYSLFELENGRKRMLASAGELQKGNELALPSKYVNFLYLASHYEKLKGSPEDNEQKQLFVEQHKHYLDEIIEQISEFSKRVILADANLDKVLSAYNKHRDKPIREQAENIIHLFTLTNLGAPAAFKYFDTTIDRKRYTSTKEVLDATLIHQSITGLYETRIDLSQLGGDGGEAAAKEAAAKEAAAKGGMNPLQLLQPLPAEIKGTKLLAHWNSGATITCIPESFLEDEQPIKKTLIKTIHGEKQQNVYYVTFKVKGRKVEAEVIASPYEYILLSPTDVPWLTQQPLQLTILVPLQEYQEKILSKTALPEDQKQQLKTLFVKYDNLWQHWENQVGHRKIRPHNIATGDYPPRPQKQYPINPKAKPSIQIVIDDLLKQGVLTPQNSTMNTPVYPVPKPDGRWRMVLDYREVNKTIPLTAAQNQHSAGILATIVRQKYKTTLDLANGFWAHPITPESYWLTAFTWQGKQYCWTRLPQGFLNSPALFTADVVDLLKEIPNVQVYVDDIYLSHDDPKEHVQQLEKVFQILLQAGYVVSLKKSEIGQKTVEFLGFNITKEGRGLTDTFKTKLLNITPPKDLKQLQSILGLLNFARNFIPNFAELVQPLYNLIASAKGKYIEWSEENTKQLNMVIEALNTASNLEERLPEQRLVIKVNTSPSAGYVRYYNETGKKPIMYLNYVFSKAELKFSMLEKLLTTMHKALIKAMDLAMGQEILVYSPIVSMTKIQKTPLPERKALPIRWITWMTYLEDPRIQFHYDKTLPELKHIPDVYTSSQSPVKHPSQYEGVFYTDGSAIKSPDPTKSNNAGMGIVHATYKPEYQVLNQWSIPLGNHTAQMAEIAAVEFACKKALKIPGPVLVITDSFYVAESANKELPYWKSNGFVNNKKKPLKHISKWKSIAECLSMKPDITIQHEKGISLQIPVFILKGNALADKLATQGSYVVNAGKRTADGSEFEKRTADGSEFESPKKKAKVE

SEQ ID NO: 1289 - protein, 2177 aa, synthetic construct
  source 1..2177: note = Description of Artificial Sequence: Synthetic polypeptide
MPAAKRVKLDGGDKKYSIGLDIGTNSVGWAVITDEYKVPSKKFKVLGNTDRHSIKKNLIGALLFDSGETAEATRLKRTARRRYTRRKNRICYLQEIFSNEMAKVDDSFFHRLEESFLVEEDKKHERHPIFGNIVDEVAYHEKYPTIYHLRKKLVDSTDKADLRLIYLALAHMIKFRGHFLIEGDLNPDNSDVDKLFIQLVQTYNQLFEENPINASGVDAKAILSARLSKSRRLENLIAQLPGEKKNGLFGNLIALSLGLTPNFKSNFDLAEDAKLQLSKDTYDDDLDNLLAQIGDQYADLFLAAKNLSDAILLSDILRVNTEITKAPLSASMIKRYDEHHQDLTLLKALVRQQLPEKYKEIFFDQSKNGYAGYIDGGASQEEFYKFIKPILEKMDGTEELLVKLNREDLLRKQRTFDNGSIPHQIHLGELHAILRRQEDFYPFLKDNREKIEKILTFRIPYYVGPLARGNSRFAWMTRKSEETITPWNFEEVVDKGASAQSFIERMTNFDKNLPNEKVLPKHSLLYEYFTVYNELTKVKYVTEGMRKPAFLSGEQKKAIVDLLFKTNRKVTVKQLKEDYFKKIECFDSVEISGVEDRFNASLGTYHDLLKIIKDKDFLDNEENEDILEDIVLTLTLFEDREMIEERLKTYAHLFDDKVMKQLKRRRYTGWGRLSRKLINGIRDKQSGKTILDFLKSDGFANRNFMQLIHDDSLTFKEDIQKAQVSGQGDSLHEHIANLAGSPAIKKGILQTVKVVDELVKVMGRHKPENIVIEMARENQTTQKGQKNSRERMKRIEEGIKELGSQILKEHPVENTQLQNEKLYLYYLQNGRDMYVDQELDINRLSDYDVDHIVPQSFLKDDSIDNKVLTRSDKARGKSDNVPSEEVVKKMKNYWRQLLNAKLITQRKFDNLTKAERGGLSELDKAGFIKRQLVETRQITKHVAQILDSRMNTKYDENDKLIREVKVITLKSKLVSDFRKDFQFYKVREINNYHHAHDAYLNAVVGTALIKKYPKLESEFVYGDYKVYDVRKMIAKSEQEIGKATAKYFFYSNIMNFFKTEITLANGEIRKRPLIETNGETGEIVWDKGRDFATVRKVLSMPQVNIVKKTEVQTGGFSKESILPKRNSDKLIARKKDWDPKKYGGFDSPTVAYSVLVVAKVEKGKSKKLKSVKELLGITIMERSSFEKNPIDFLEAKGYKEVKKDLIIKLPKYSLFELENGRKRMLASAGELQKGNELALPSKYVNFLYLASHYEKLKGSPEDNEQKQLFVEQHKHYLDEIIEQISEFSKRVILADANLDKVLSAYNKHRDKPIREQAENIIHLFTLTNLGAPAAFKYFDTTIDRKRYTSTKEVLDATLIHQSITGLYETRIDLSQLGGDGGGGSGGSGGSGGSGGMNPLQLLQPLPAEIKGTKLLAHWNSGATITCIPESFLEDEQPIKKTLIKTIHGEKQQNVYYVTFKVKGRKVEAEVIASPYEYILLSPTDVPWLTQQPLQLTILVPLQEYQEKILSKTALPEDQKQQLKTLFVKYDNLWQHWENQVGHRKIRPHNIATGDYPPRPQKQYPINPKAKPSIQIVIDDLLKQGVLTPQNSTMNTPVYPVPKPDGRWRMVLDYREVNKTIPLTAAQNQHSAGILATIVRQKYKTTLDLANGFWAHPITPESYWLTAFTWQGKQYCWTRLPQGFLNSPALFTADVVDLLKEIPNVQVYVDDIYLSHDDPKEHVQQLEKVFQILLQAGYVVSLKKSEIGQKTVEFLGFNITKEGRGLTDTFKTKLLNITPPKDLKQLQSILGLLNFARNFIPNFAELVQPLYNLIASAKGKYIEWSEENTKQLNMVIEALNTASNLEERLPEQRLVIKVNTSPSAGYVRYYNETGKKPIMYLNYVFSKAELKFSMLEKLLTTMHKALIKAMDLAMGQEILVYSPIVSMTKIQKTPLPERKALPIRWITWMTYLEDPRIQFHYDKTLPELKHIPDVYTSSQSPVKHPSQYEGVFYTDGSAIKSPDPTKSNNAGMGIVHATYKPEYQVLNQWSIPLGNHTAQMAEIAAVEFACKKALKIPGPVLVITDSFYVAESANKELPYWKSNGFVNNKKKPLKHISKWKSIAECLSMKPDITIQHEKGISLQIPVFILKGNALADKLATQGSYVVNAGKRTADGSEFEKRTADGSEFESPKKKAKVE

SEQ ID NO: 1290 - protein, 2174 aa, synthetic construct
  source 1..2174: note = Description of Artificial Sequence: Synthetic polypeptide
MPAAKRVKLDGGDKKYSIGLDIGTNSVGWAVITDEYKVPSKKFKVLGNTDRHSIKKNLIGALLFDSGETAEATRLKRTARRRYTRRKNRICYLQEIFSNEMAKVDDSFFHRLEESFLVEEDKKHERHPIFGNIVDEVAYHEKYPTIYHLRKKLVDSTDKADLRLIYLALAHMIKFRGHFLIEGDLNPDNSDVDKLFIQLVQTYNQLFEENPINASGVDAKAILSARLSKSRRLENLIAQLPGEKKNGLFGNLIALSLGLTPNFKSNFDLAEDAKLQLSKDTYDDDLDNLLAQIGDQYADLFLAAKNLSDAILLSDILRVNTEITKAPLSASMIKRYDEHHQDLTLLKALVRQQLPEKYKEIFFDQSKNGYAGYIDGGASQEEFYKFIKPILEKMDGTEELLVKLNREDLLRKQRTFDNGSIPHQIHLGELHAILRRQEDFYPFLKDNREKIEKILTFRIPYYVGPLARGNSRFAWMTRKSEETITPWNFEEVVDKGASAQSFIERMTNFDKNLPNEKVLPKHSLLYEYFTVYNELTKVKYVTEGMRKPAFLSGEQKKAIVDLLFKTNRKVTVKQLKEDYFKKIECFDSVEISGVEDRFNASLGTYHDLLKIIKDKDFLDNEENEDILEDIVLTLTLFEDREMIEERLKTYAHLFDDKVMKQLKRRRYTGWGRLSRKLINGIRDKQSGKTILDFLKSDGFANRNFMQLIHDDSLTFKEDIQKAQVSGQGDSLHEHIANLAGSPAIKKGILQTVKVVDELVKVMGRHKPENIVIEMARENQTTQKGQKNSRERMKRIEEGIKELGSQILKEHPVENTQLQNEKLYLYYLQNGRDMYVDQELDINRLSDYDVDHIVPQSFLKDDSIDNKVLTRSDKARGKSDNVPSEEVVKKMKNYWRQLLNAKLITQRKFDNLTKAERGGLSELDKAGFIKRQLVETRQITKHVAQILDSRMNTKYDENDKLIREVKVITLKSKLVSDFRKDFQFYKVREINNYHHAHDAYLNAVVGTALIKKYPKLESEFVYGDYKVYDVRKMIAKSEQEIGKATAKYFFYSNIMNFFKTEITLANGEIRKRPLIETNGETGEIVWDKGRDFATVRKVLSMPQVNIVKKTEVQTGGFSKESILPKRNSDKLIARKKDWDPKKYGGFDSPTVAYSVLVVAKVEKGKSKKLKSVKELLGITIMERSSFEKNPIDFLEAKGYKEVKKDLIIKLPKYSLFELENGRKRMLASAGELQKGNELALPSKYVNFLYLASHYEKLKGSPEDNEQKQLFVEQHKHYLDEIIEQISEFSKRVILADANLDKVLSAYNKHRDKPIREQAENIIHLFTLTNLGAPAAFKYFDTTIDRKRYTSTKEVLDATLIHQSITGLYETRIDLSQLGGDGGGGSGGGPAPGGMNPLQLLQPLPAEIKGTKLLAHWNSGATITCIPESFLEDEQPIKKTLIKTIHGEKQQNVYYVTFKVKGRKVEAEVIASPYEYILLSPTDVPWLTQQPLQLTILVPLQEYQEKILSKTALPEDQKQQLKTLFVKYDNLWQHWENQVGHRKIRPHNIATGDYPPRPQKQYPINPKAKPSIQIVIDDLLKQGVLTPQNSTMNTPVYPVPKPDGRWRMVLDYREVNKTIPLTAAQNQHSAGILATIVRQKYKTTLDLANGFWAHPITPESYWLTAFTWQGKQYCWTRLPQGFLNSPALFTADVVDLLKEIPNVQVYVDDIYLSHDDPKEHVQQLEKVFQILLQAGYVVSLKKSEIGQKTVEFLGFNITKEGRGLTDTFKTKLLNITPPKDLKQLQSILGLLNFARNFIPNFAELVQPLYNLIASAKGKYIEWSEENTKQLNMVIEALNTASNLEERLPEQRLVIKVNTSPSAGYVRYYNETGKKPIMYLNYVFSKAELKFSMLEKLLTTMHKALIKAMDLAMGQEILVYSPIVSMTKIQKTPLPERKALPIRWITWMTYLEDPRIQFHYDKTLPELKHIPDVYTSSQSPVKHPSQYEGVFYTDGSAIKSPDPTKSNNAGMGIVHATYKPEYQVLNQWSIPLGNHTAQMAEIAAVEFACKKALKIPGPVLVITDSFYVAESANKELPYWKSNGFVNNKKKPLKHISKWKSIAECLSMKPDITIQHEKGISLQIPVFILKGNALADKLATQGSYVVNAGKRTADGSEFEKRTADGSEFESPKKKAKVE

SEQ ID NO: 1291 - protein, 2176 aa, synthetic construct
  source 1..2176: note = Description of Artificial Sequence: Synthetic polypeptide
MPAAKRVKLDGGDKKYSIGLDIGTNSVGWAVITDEYKVPSKKFKVLGNTDRHSIKKNLIGALLFDSGETAEATRLKRTARRRYTRRKNRICYLQEIFSNEMAKVDDSFFHRLEESFLVEEDKKHERHPIFGNIVDEVAYHEKYPTIYHLRKKLVDSTDKADLRLIYLALAHMIKFRGHFLIEGDLNPDNSDVDKLFIQLVQTYNQLFEENPINASGVDAKAILSARLSKSRRLENLIAQLPGEKKNGLFGNLIALSLGLTPNFKSNFDLAEDAKLQLSKDTYDDDLDNLLAQIGDQYADLFLAAKNLSDAILLSDILRVNTEITKAPLSASMIKRYDEHHQDLTLLKALVRQQLPEKYKEIFFDQSKNGYAGYIDGGASQEEFYKFIKPILEKMDGTEELLVKLNREDLLRKQRTFDNGSIPHQIHLGELHAILRRQEDFYPFLKDNREKIEKILTFRIPYYVGPLARGNSRFAWMTRKSEETITPWNFEEVVDKGASAQSFIERMTNFDKNLPNEKVLPKHSLLYEYFTVYNELTKVKYVTEGMRKPAFLSGEQKKAIVDLLFKTNRKVTVKQLKEDYFKKIECFDSVEISGVEDRFNASLGTYHDLLKIIKDKDFLDNEENEDILEDIVLTLTLFEDREMIEERLKTYAHLFDDKVMKQLKRRRYTGWGRLSRKLINGIRDKQSGKTILDFLKSDGFANRNFMQLIHDDSLTFKEDIQKAQVSGQGDSLHEHIANLAGSPAIKKGILQTVKVVDELVKVMGRHKPENIVIEMARENQTTQKGQKNSRERMKRIEEGIKELGSQILKEHPVENTQLQNEKLYLYYLQNGRDMYVDQELDINRLSDYDVDHIVPQSFLKDDSIDNKVLTRSDKARGKSDNVPSEEVVKKMKNYWRQLLNAKLITQRKFDNLTKAERGGLSELDKAGFIKRQLVETRQITKHVAQILDSRMNTKYDENDKLIREVKVITLKSKLVSDFRKDFQFYKVREINNYHHAHDAYLNAVVGTALIKKYPKLESEFVYGDYKVYDVRKMIAKSEQEIGKATAKYFFYSNIMNFFKTEITLANGEIRKRPLIETNGETGEIVWDKGRDFATVRKVLSMPQVNIVKKTEVQTGGFSKESILPKRNSDKLIARKKDWDPKKYGGFDSPTVAYSVLVVAKVEKGKSKKLKSVKELLGITIMERSSFEKNPIDFLEAKGYKEVKKDLIIKLPKYSLFELENGRKRMLASAGELQKGNELALPSKYVNFLYLASHYEKLKGSPEDNEQKQLFVEQHKHYLDEIIEQISEFSKRVILADANLDKVLSAYNKHRDKPIREQAENIIHLFTLTNLGAPAAFKYFDTTIDRKRYTSTKEVLDATLIHQSITGLYETRIDLSQLGGDGGPAPGGSEAAAKGGMNPLQLLQPLPAEIKGTKLLAHWNSGATITCIPESFLEDEQPIKKTLIKTIHGEKQQNVYYVTFKVKGRKVEAEVIASPYEYILLSPTDVPWLTQQPLQLTILVPLQEYQEKILSKTALPEDQKQQLKTLFVKYDNLWQHWENQVGHRKIRPHNIATGDYPPRPQKQYPINPKAKPSIQIVIDDLLKQGVLTPQNSTMNTPVYPVPKPDGRWRMVLDYREVNKTIPLTAAQNQHSAGILATIVRQKYKTTLDLANGFWAHPITPESYWLTAFTWQGKQYCWTRLPQGFLNSPALFTADVVDLLKEIPNVQVYVDDIYLSHDDPKEHVQQLEKVFQILLQAGYVVSLKKSEIGQKTVEFLGFNITKEGRGLTDTFKTKLLNITPPKDLKQLQSILGLLNFARNFIPNFAELVQPLYNLIASAKGKYIEWSEENTKQLNMVIEALNTASNLEERLPEQRLVIKVNTSPSAGYVRYYNETGKKPIMYLNYVFSKAELKFSMLEKLLTTMHKALIKAMDLAMGQEILVYSPIVSMTKIQKTPLPERKALPIRWITWMTYLEDPRIQFHYDKTLPELKHIPDVYTSSQSPVKHPSQYEGVFYTDGSAIKSPDPTKSNNAGMGIVHATYKPEYQVLNQWSIPLGNHTAQMAEIAAVEFACKKALKIPGPVLVITDSFYVAESANKELPYWKSNGFVNNKKKPLKHISKWKSIAECLSMKPDITIQHEKGISLQIPVFILKGNALADKLATQGSYVVNAGKRTADGSEFEKRTADGSEFESPKKKAKVE

SEQ ID NO: 1292 - protein, 2173 aa, synthetic construct
  source 1..2173: note = Description of Artificial Sequence: Synthetic polypeptide
MPAAKRVKLDGGDKKYSIGLDIGTNSVGWAVITDEYKVPSKKFKVLGNTDRHSIKKNLIGALLFDSGETAEATRLKRTARRRYTRRKNRICYLQEIFSNEMAKVDDSFFHRLEESFLVEEDKKHERHPIFGNIVDEVAYHEKYPTIYHLRKKLVDSTDKADLRLIYLALAHMIKFRGHFLIEGDLNPDNSDVDKLFIQLVQTYNQLFEENPINASGVDAKAILSARLSKSRRLENLIAQLPGEKKNGLFGNLIALSLGLTPNFKSNFDLAEDAKLQLSKDTYDDDLDNLLAQIGDQYADLFLAAKNLSDAILLSDILRVNTEITKAPLSASMIKRYDEHHQDLTLLKALVRQQLPEKYKEIFFDQSKNGYAGYIDGGASQEEFYKFIKPILEKMDGTEELLVKLNREDLLRKQRTFDNGSIPHQIHLGELHAILRRQEDFYPFLKDNREKIEKILTFRIPYYVGPLARGNSRFAWMTRKSEETITPWNFEEVVDKGASAQSFIERMTNFDKNLPNEKVLPKHSLLYEYFTVYNELTKVKYVTEGMRKPAFLSGEQKKAIVDLLFKTNRKVTVKQLKEDYFKKIECFDSVEISGVEDRFNASLGTYHDLLKIIKDKDFLDNEENEDILEDIVLTLTLFEDREMIEERLKTYAHLFDDKVMKQLKRRRYTGWGRLSRKLINGIRDKQSGKTILDFLKSDGFANRNFMQLIHDDSLTFKEDIQKAQVSGQGDSLHEHIANLAGSPAIKKGILQTVKVVDELVKVMGRHKPENIVIEMARENQTTQKGQKNSRERMKRIEEGIKELGSQILKEHPVENTQLQNEKLYLYYLQNGRDMYVDQELDINRLSDYDVDHIVPQSFLKDDSIDNKVLTRSDKARGKSDNVPSEEVVKKMKNYWRQLLNAKLITQRKFDNLTKAERGGLSELDKAGFIKRQLVETRQITKHVAQILDSRMNTKYDENDKLIREVKVITLKSKLVSDFRKDFQFYKVREINNYHHAHDAYLNAVVGTALIKKYPKLESEFVYGDYKVYDVRKMIAKSEQEIGKATAKYFFYSNIMNFFKTEITLANGEIRKRPLIETNGETGEIVWDKGRDFATVRKVLSMPQVNIVKKTEVQTGGFSKESILPKRNSDKLIARKKDWDPKKYGGFDSPTVAYSVLVVAKVEKGKSKKLKSVKELLGITIMERSSFEKNPIDFLEAKGYKEVKKDLIIKLPKYSLFELENGRKRMLASAGELQKGNELALPSKYVNFLYLASHYEKLKGSPEDNEQKQLFVEQHKHYLDEIIEQISEFSKRVILADANLDKVLSAYNKHRDKPIREQAENIIHLFTLTNLGAPAAFKYFDTTIDRKRYTSTKEVLDATLIHQSITGLYETRIDLSQLGGDGGGSSEAAAKGGMNPLQLLQPLPAEIKGTKLLAHWNSGATITCIPESFLEDEQPIKKTLIKTIHGEKQQNVYYVTFKVKGRKVEAEVIASPYEYILLSPTDVPWLTQQPLQLTILVPLQEYQEKILSKTALPEDQKQQLKTLFVKYDNLWQHWENQVGHRKIRPHNIATGDYPPRPQKQYPINPKAKPSIQIVIDDLLKQGVLTPQNSTMNTPVYPVPKPDGRWRMVLDYREVNKTIPLTAAQNQHSAGILATIVRQKYKTTLDLANGFWAHPITPESYWLTAFTWQGKQYCWTRLPQGFLNSPALFTADVVDLLKEIPNVQVYVDDIYLSHDDPKEHVQQLEKVFQILLQAGYVVSLKKSEIGQKTVEFLGFNITKEGRGLTDTFKTKLLNITPPKDLKQLQSILGLLNFARNFIPNFAELVQPLYNLIASAKGKYIEWSEENTKQLNMVIEALNTASNLEERLPEQRLVIKVNTSPSAGYVRYYNETGKKPIMYLNYVFSKAELKFSMLEKLLTTMHKALIKAMDLAMGQEILVYSPIVSMTKIQKTPLPERKALPIRWITWMTYLEDPRIQFHYDKTLPELKHIPDVYTSSQSPVKHPSQYEGVFYTDGSAIKSPDPTKSNNAGMGIVHATYKPEYQVLNQWSIPLGNHTAQMAEIAAVEFACKKALKIPGPVLVITDSFYVAESANKELPYWKSNGFVNNKKKPLKHISKWKSIAECLSMKPDITIQHEKGISLQIPVFILKGNALADKLATQGSYVVNAGKRTADGSEFEKRTADGSEFESPKKKAKVE

SEQ ID NO: 1293 - protein, 2176 aa, synthetic construct
  source 1..2176: note = Description of Artificial Sequence: Synthetic polypeptide
MPAAKRVKLDGGDKKYSIGLDIGTNSVGWAVITDEYKVPSKKFKVLGNTDRHSIKKNLIGALLFDSGETAEATRLKRTARRRYTRRKNRICYLQEIFSNEMAKVDDSFFHRLEESFLVEEDKKHERHPIFGNIVDEVAYHEKYPTIYHLRKKLVDSTDKADLRLIYLALAHMIKFRGHFLIEGDLNPDNSDVDKLFIQLVQTYNQLFEENPINASGVDAKAILSARLSKSRRLENLIAQLPGEKKNGLFGNLIALSLGLTPNFKSNFDLAEDAKLQLSKDTYDDDLDNLLAQIGDQYADLFLAAKNLSDAILLSDILRVNTEITKAPLSASMIKRYDEHHQDLTLLKALVRQQLPEKYKEIFFDQSKNGYAGYIDGGASQEEFYKFIKPILEKMDGTEELLVKLNREDLLRKQRTFDNGSIPHQIHLGELHAILRRQEDFYPFLKDNREKIEKILTFRIPYYVGPLARGNSRFAWMTRKSEETITPWNFEEVVDKGASAQSFIERMTNFDKNLPNEKVLPKHSLLYEYFTVYNELTKVKYVTEGMRKPAFLSGEQKKAIVDLLFKTNRKVTVKQLKEDYFKKIECFDSVEISGVEDRFNASLGTYHDLLKIIKDKDFLDNEENEDILEDIVLTLTLFEDREMIEERLKTYAHLFDDKVMKQLKRRRYTGWGRLSRKLINGIRDKQSGKTILDFLKSDGFANRNFMQLIHDDSLTFKEDIQKAQVSGQGDSLHEHIANLAGSPAIKKGILQTVKVVDELVKVMGRHKPENIVIEMARENQTTQKGQKNSRERMKRIEEGIKELGSQILKEHPVENTQLQNEKLYLYYLQNGRDMYVDQELDINRLSDYDVDHIVPQSFLKDDSIDNKVLTRSDKARGKSDNVPSEEVVKKMKNYWRQLLNAKLITQRKFDNLTKAERGGLSELDKAGFIKRQLVETRQITKHVAQILDSRMNTKYDENDKLIREVKVITLKSKLVSDFRKDFQFYKVREINNYHHAHDAYLNAVVGTALIKKYPKLESEFVYGDYKVYDVRKMIAKSEQEIGKATAKYFFYSNIMNFFKTEITLANGEIRKRPLIETNGETGEIVWDKGRDFATVRKVLSMPQVNIVKKTEVQTGGFSKESILPKRNSDKLIARKKDWDPKKYGGFDSPTVAYSVLVVAKVEKGKSKKLKSVKELLGITIMERSSFEKNPIDFLEAKGYKEVKKDLIIKLPKYSLFELENGRKRMLASAGELQKGNELALPSKYVNFLYLASHYEKLKGSPEDNEQKQLFVEQHKHYLDEIIEQISEFSKRVILADANLDKVLSAYNKHRDKPIREQAENIIHLFTLTNLGAPAAFKYFDTTIDRKRYTSTKEVLDATLIHQSITGLYETRIDLSQLGGDGGGGSGSSEAAAKGGMNPLQLLQPLPAEIKGTKLLAHWNSGATITCIPESFLEDEQPIKKTLIKTIHGEKQQNVYYVTFKVKGRKVEAEVIASPYEYILLSPTDVPWLTQQPLQLTILVPLQEYQEKILSKTALPEDQKQQLKTLFVKYDNLWQHWENQVGHRKIRPHNIATGDYPPRPQKQYPINPKAKPSIQIVIDDLLKQGVLTPQNSTMNTPVYPVPKPDGRWRMVLDYREVNKTIPLTAAQNQHSAGILATIVRQKYKTTLDLANGFWAHPITPESYWLTAFTWQGKQYCWTRLPQGFLNSPALFTADVVDLLKEIPNVQVYVDDIYLSHDDPKEHVQQLEKVFQILLQAGYVVSLKKSEIGQKTVEFLGFNITKEGRGLTDTFKTKLLNITPPKDLKQLQSILGLLNFARNFIPNFAELVQPLYNLIASAKGKYIEWSEENTKQLNMVIEALNTASNLEERLPEQRLVIKVNTSPSAGYVRYYNETGKKPIMYLNYVFSKAELKFSMLEKLLTTMHKALIKAMDLAMGQEILVYSPIVSMTKIQKTPLPERKALPIRWITWMTYLEDPRIQFHYDKTLPELKHIPDVYTSSQSPVKHPSQYEGVFYTDGSAIKSPDPTKSNNAGMGIVHATYKPEYQVLNQWSIPLGNHTAQMAEIAAVEFACKKALKIPGPVLVITDSFYVAESANKELPYWKSNGFVNNKKKPLKHISKWKSIAECLSMKPDITIQHEKGISLQIPVFILKGNALADKLATQGSYVVNAGKRTADGSEFEKRTADGSEFESPKKKAKVE

SEQ ID NO: 1294 - protein, 2171 aa, synthetic construct
  source 1..2171: note = Description of Artificial Sequence: Synthetic polypeptide
MPAAKRVKLDGGDKKYSIGLDIGTNSVGWAVITDEYKVPSKKFKVLGNTDRHSIKKNLIGALLFDSGETAEATRLKRTARRRYTRRKNRICYLQEIFSNEMAKVDDSFFHRLEESFLVEEDKKHERHPIFGNIVDEVAYHEKYPTIYHLRKKLVDSTDKADLRLIYLALAHMIKFRGHFLIEGDLNPDNSDVDKLFIQLVQTYNQLFEENPINASGVDAKAILSARLSKSRRLENLIAQLPGEKKNGLFGNLIALSLGLTPNFKSNFDLAEDAKLQLSKDTYDDDLDNLLAQIGDQYADLFLAAKNLSDAILLSDILRVNTEITKAPLSASMIKRYDEHHQDLTLLKALVRQQLPEKYKEIFFDQSKNGYAGYIDGGASQEEFYKFIKPILEKMDGTEELLVKLNREDLLRKQRTFDNGSIPHQIHLGELHAILRRQEDFYPFLKDNREKIEKILTFRIPYYVGPLARGNSRFAWMTRKSEETITPWNFEEVVDKGASAQSFIERMTNFDKNLPNEKVLPKHSLLYEYFTVYNELTKVKYVTEGMRKPAFLSGEQKKAIVDLLFKTNRKVTVKQLKEDYFKKIECFDSVEISGVEDRFNASLGTYHDLLKIIKDKDFLDNEENEDILEDIVLTLTLFEDREMIEERLKTYAHLFDDKVMKQLKRRRYTGWGRLSRKLINGIRDKQSGKTILDFLKSDGFANRNFMQLIHDDSLTFKEDIQKAQVSGQGDSLHEHIANLAGSPAIKKGILQTVKVVDELVKVMGRHKPENIVIEMARENQTTQKGQKNSRERMKRIEEGIKELGSQILKEHPVENTQLQNEKLYLYYLQNGRDMYVDQELDINRLSDYDVDHIVPQSFLKDDSIDNKVLTRSDKARGKSDNVPSEEVVKKMKNYWRQLLNAKLITQRKFDNLTKAERGGLSELDKAGFIKRQLVETRQITKHVAQILDSRMNTKYDENDKLIREVKVITLKSKLVSDFRKDFQFYKVREINNYHHAHDAYLNAVVGTALIKKYPKLESEFVYGDYKVYDVRKMIAKSEQEIGKATAKYFFYSNIMNFFKTEITLANGEIRKRPLIETNGETGEIVWDKGRDFATVRKVLSMPQVNIVKKTEVQTGGFSKESILPKRNSDKLIARKKDWDPKKYGGFDSPTVAYSVLVVAKVEKGKSKKLKSVKELLGITIMERSSFEKNPIDFLEAKGYKEVKKDLIIKLPKYSLFELENGRKRMLASAGELQKGNELALPSKYVNFLYLASHYEKLKGSPEDNEQKQLFVEQHKHYLDEIIEQISEFSKRVILADANLDKVLSAYNKHRDKPIREQAENIIHLFTLTNLGAPAAFKYFDTTIDRKRYTSTKEVLDATLIHQSITGLYETRIDLSQLGGDGGGGSGGSGGMNPLQLLQPLPAEIKGTKLLAHWNSGATITCIPESFLEDEQPIKKTLIKTIHGEKQQNVYYVTFKVKGRKVEAEVIASPYEYILLSPTDVPWLTQQPLQLTILVPLQEYQEKILSKTALPEDQKQQLKTLFVKYDNLWQHWENQVGHRKIRPHNIATGDYPPRPQKQYPINPKAKPSIQIVIDDLLKQGVLTPQNSTMNTPVYPVPKPDGRWRMVLDYREVNKTIPLTAAQNQHSAGILATIVRQKYKTTLDLANGFWAHPITPESYWLTAFTWQGKQYCWTRLPQGFLNSPALFTADVVDLLKEIPNVQVYVDDIYLSHDDPKEHVQQLEKVFQILLQAGYVVSLKKSEIGQKTVEFLGFNITKEGRGLTDTFKTKLLNITPPKDLKQLQSILGLLNFARNFIPNFAELVQPLYNLIASAKGKYIEWSEENTKQLNMVIEALNTASNLEERLPEQRLVIKVNTSPSAGYVRYYNETGKKPIMYLNYVFSKAELKFSMLEKLLTTMHKALIKAMDLAMGQEILVYSPIVSMTKIQKTPLPERKALPIRWITWMTYLEDPRIQFHYDKTLPELKHIPDVYTSSQSPVKHPSQYEGVFYTDGSAIKSPDPTKSNNAGMGIVHATYKPEYQVLNQWSIPLGNHTAQMAEIAAVEFACKKALKIPGPVLVITDSFYVAESANKELPYWKSNGFVNNKKKPLKHISKWKSIAECLSMKPDITIQHEKGISLQIPVFILKGNALADKLATQGSYVVNAGKRTADGSEFEKRTADGSEFESPKKKAKVE

SEQ ID NO: 1295 - protein, 2084 aa, synthetic construct
  source 1..2084: note = Description of Artificial Sequence: Synthetic polypeptide
MPAAKRVKLDGGDKKYSIGLDIGTNSVGWAVITDEYKVPSKKFKVLGNTDRHSIKKNLIGALLFDSGETAEATRLKRTARRRYTRRKNRICYLQEIFSNEMAKVDDSFFHRLEESFLVEEDKKHERHPIFGNIVDEVAYHEKYPTIYHLRKKLVDSTDKADLRLIYLALAHMIKFRGHFLIEGDLNPDNSDVDKLFIQLVQTYNQLFEENPINASGVDAKAILSARLSKSRRLENLIAQLPGEKKNGLFGNLIALSLGLTPNFKSNFDLAEDAKLQLSKDTYDDDLDNLLAQIGDQYADLFLAAKNLSDAILLSDILRVNTEITKAPLSASMIKRYDEHHQDLTLLKALVRQQLPEKYKEIFFDQSKNGYAGYIDGGASQEEFYKFIKPILEKMDGTEELLVKLNREDLLRKQRTFDNGSIPHQIHLGELHAILRRQEDFYPFLKDNREKIEKILTFRIPYYVGPLARGNSRFAWMTRKSEETITPWNFEEVVDKGASAQSFIERMTNFDKNLPNEKVLPKHSLLYEYFTVYNELTKVKYVTEGMRKPAFLSGEQKKAIVDLLFKTNRKVTVKQLKEDYFKKIECFDSVEISGVEDRFNASLGTYHDLLKIIKDKDFLDNEENEDILEDIVLTLTLFEDREMIEERLKTYAHLFDDKVMKQLKRRRYTGWGRLSRKLINGIRDKQSGKTILDFLKSDGFANRNFMQLIHDDSLTFKEDIQKAQVSGQGDSLHEHIANLAGSPAIKKGILQTVKVVDELVKVMGRHKPENIVIEMARENQTTQKGQKNSRERMKRIEEGIKELGSQILKEHPVENTQLQNEKLYLYYLQNGRDMYVDQELDINRLSDYDVDHIVPQSFLKDDSIDNKVLTRSDKARGKSDNVPSEEVVKKMKNYWRQLLNAKLITQRKFDNLTKAERGGLSELDKAGFIKRQLVETRQITKHVAQILDSRMNTKYDENDKLIREVKVITLKSKLVSDFRKDFQFYKVREINNYHHAHDAYLNAVVGTALIKKYPKLESEFVYGDYKVYDVRKMIAKSEQEIGKATAKYFFYSNIMNFFKTEITLANGEIRKRPLIETNGETGEIVWDKGRDFATVRKVLSMPQVNIVKKTEVQTGGFSKESILPKRNSDKLIARKKDWDPKKYGGFDSPTVAYSVLVVAKVEKGKSKKLKSVKELLGITIMERSSFEKNPIDFLEAKGYKEVKKDLIIKLPKYSLFELENGRKRMLASAGELQKGNELALPSKYVNFLYLASHYEKLKGSPEDNEQKQLFVEQHKHYLDEIIEQISEFSKRVILADANLDKVLSAYNKHRDKPIREQAENIIHLFTLTNLGAPAAFKYFDTTIDRKRYTSTKEVLDATLIHQSITGLYETRIDLSQLGGDGGEAAAKPAPGGVPWLTQQPLQLTILVPLQEYQEKILSKTALPEDQKQQLKTLFVKYDNLWQHWENQVGHRKIRPHNIATGDYPPRPQKQYPINPKAKPSIQIVIDDLLKQGVLTPQNSTMNTPVYPVPKPDGRWRMVLDYREVNKTIPLTAAQNQHSAGILATIVRQKYKTTLDLANGFWAHPITPESYWLTAFTWQGKQYCWTRLPQGFLNSPALFTADVVDLLKEIPNVQVYVDDIYLSHDDPKEHVQQLEKVFQILLQAGYVVSLKKSEIGQKTVEFLGFNITKEGRGLTDTFKTKLLNITPPKDLKQLQSILGLLNFARNFIPNFAELVQPLYNLIASAKGKYIEWSEENTKQLNMVIEALNTASNLEERLPEQRLVIKVNTSPSAGYVRYYNETGKKPIMYLNYVFSKAELKFSMLEKLLTTMHKALIKAMDLAMGQEILVYSPIVSMTKIQKTPLPERKALPIRWITWMTYLEDPRIQFHYDKTLPELKHIPDVYTSSQSPVKHPSQYEGVFYTDGSAIKSPDPTKSNNAGMGIVHATYKPEYQVLNQWSIPLGNHTAQMAEIAAVEFACKKALKIPGPVLVITDSFYVAESANKELPYWKSNGFVNNKKKPLKHISKWKSIAECLSMKPDITIQHEKGISLQIPVFILKGNALADKLATQGSYVVNAGKRTADGSEFEKRTADGSEFESPKKKAKVE

SEQ ID NO: 1296 - protein, 2087 aa, synthetic construct
  source 1..2087: note = Description of Artificial Sequence: Synthetic polypeptide
MPAAKRVKLDGGDKKYSIGLDIGTNSVGWAVITDEYKVPSKKFKVLGNTDRHSIKKNLIGALLFDSGETAEATRLKRTARRRYTRRKNRICYLQEIFSNEMAKVDDSFFHRLEESFLVEEDKKHERHPIFGNIVDEVAYHEKYPTIYHLRKKLVDSTDKADLRLIYLALAHMIKFRGHFLIEGDLNPDNSDVDKLFIQLVQTYNQLFEENPINASGVDAKAILSARLSKSRRLENLIAQLPGEKKNGLFGNLIALSLGLTPNFKSNFDLAEDAKLQLSKDTYDDDLDNLLAQIGDQYADLFLAAKNLSDAILLSDILRVNTEITKAPLSASMIKRYDEHHQDLTLLKALVRQQLPEKYKEIFFDQSKNGYAGYIDGGASQEEFYKFIKPILEKMDGTEELLVKLNREDLLRKQRTFDNGSIPHQIHLGELHAILRRQEDFYPFLKDNREKIEKILTFRIPYYVGPLARGNSRFAWMTRKSEETITPWNFEEVVDKGASAQSFIERMTNFDKNLPNEKVLPKHSLLYEYFTVYNELTKVKYVTEGMRKPAFLSGEQKKAIVDLLFKTNRKVTVKQLKEDYFKKIECFDSVEISGVEDRFNASLGTYHDLLKIIKDKDFLDNEENEDILEDIVLTLTLFEDREMIEERLKTYAHLFDDKVMKQLKRRRYTGWGRLSRKLINGIRDKQSGKTILDFLKSDGFANRNFMQLIHDDSLTFKEDIQKAQVSGQGDSLHEHIANLAGSPAIKKGILQTVKVVDELVKVMGRHKPENIVIEMARENQTTQKGQKNSRERMKRIEEGIKELGSQILKEHPVENTQLQNEKLYLYYLQNGRDMYVDQELDINRLSDYDVDHIVPQSFLKDDSIDNKVLTRSDKARGKSDNVPSEEVVKKMKNYWRQLLNAKLITQRKFDNLTKAERGGLSELDKAGFIKRQLVETRQITKHVAQILDSRMNTKYDENDKLIREVKVITLKSKLVSDFRKDFQFYKVREINNYHHAHDAYLNAVVGTALIKKYPKLESEFVYGDYKVYDVRKMIAKSEQEIGKATAKYFFYSNIMNFFKTEITLANGEIRKRPLIETNGETGEIVWDKGRDFATVRKVLSMPQVNIVKKTEVQTGGFSKESILPKRNSDKLIARKKDWDPKKYGGFDSPTVAYSVLVVAKVEKGKSKKLKSVKELLGITIMERSSFEKNPIDFLEAKGYKEVKKDLIIKLPKYSLFELENGRKRMLASAGELQKGNELALPSKYVNFLYLASHYEKLKGSPEDNEQKQLFVEQHKHYLDEIIEQISEFSKRVILADANLDKVLSAYNKHRDKPIREQAENIIHLFTLTNLGAPAAFKYFDTTIDRKRYTSTKEVLDATLIHQSITGLYETRIDLSQLGGDGGEAAAKGSSGGSGGVPWLTQQPLQLTILVPLQEYQEKILSKTALPEDQKQQLKTLFVKYDNLWQHWENQVGHRKIRPHNIATGDYPPRPQKQYPINPKAKPSIQIVIDDLLKQGVLTPQNSTMNTPVYPVPKPDGRWRMVLDYREVNKTIPLTAAQNQHSAGILATIVRQKYKTTLDLANGFWAHPITPESYWLTAFTWQGKQYCWTRLPQGFLNSPALFTADVVDLLKEIPNVQVYVDDIYLSHDDPKEHVQQLEKVFQILLQAGYVVSLKKSEIGQKTVEFLGFNITKEGRGLTDTFKTKLLNITPPKDLKQLQSILGLLNFARNFIPNFAELVQPLYNLIASAKGKYIEWSEENTKQLNMVIEALNTASNLEERLPEQRLVIKVNTSPSAGYVRYYNETGKKPIMYLNYVFSKAELKFSMLEKLLTTMHKALIKAMDLAMGQEILVYSPIVSMTKIQKTPLPERKALPIRWITWMTYLEDPRIQFHYDKTLPELKHIPDVYTSSQSPVKHPSQYEGVFYTDGSAIKSPDPTKSNNAGMGIVHATYKPEYQVLNQWSIPLGNHTAQMAEIAAVEFACKKALKIPGPVLVITDSFYVAESANKELPYWKSNGFVNNKKKPLKHISKWKSIAECLSMKPDITIQHEKGISLQIPVFILKGNALADKLATQGSYVVNAGKRTADGSEFEKRTADGSEFESPKKKAKVE

SEQ ID NO: 1297 - protein, 2094 aa, synthetic construct
  source 1..2094: note = Description of Artificial Sequence: Synthetic polypeptide
MPAAKRVKLDGGDKKYSIGLDIGTNSVGWAVITDEYKVPSKKFKVLGNTDRHSIKKNLIGALLFDSGETAEATRLKRTARRRYTRRKNRICYLQEIFSNEMAKVDDSFFHRLEESFLVEEDKKHERHPIFGNIVDEVAYHEKYPTIYHLRKKLVDSTDKADLRLIYLALAHMIKFRGHFLIEGDLNPDNSDVDKLFIQLVQTYNQLFEENPINASGVDAKAILSARLSKSRRLENLIAQLPGEKKNGLFGNLIALSLGLTPNFKSNFDLAEDAKLQLSKDTYDDDLDNLLAQIGDQYADLFLAAKNLSDAILLSDILRVNTEITKAPLSASMIKRYDEHHQDLTLLKALVRQQLPEKYKEIFFDQSKNGYAGYIDGGASQEEFYKFIKPILEKMDGTEELLVKLNREDLLRKQRTFDNGSIPHQIHLGELHAILRRQEDFYPFLKDNREKIEKILTFRIPYYVGPLARGNSRFAWMTRKSEETITPWNFEEVVDKGASAQSFIERMTNFDKNLPNEKVLPKHSLLYEYFTVYNELTKVKYVTEGMRKPAFLSGEQKKAIVDLLFKTNRKVTVKQLKEDYFKKIECFDSVEISGVEDRFNASLGTYHDLLKIIKDKDFLDNEENEDILEDIVLTLTLFEDREMIEERLKTYAHLFDDKVMKQLKRRRYTGWGRLSRKLINGIRDKQSGKTILDFLKSDGFANRNFMQLIHDDSLTFKEDIQKAQVSGQGDSLHEHIANLAGSPAIKKGILQTVKVVDELVKVMGRHKPENIVIEMARENQTTQKGQKNSRERMKRIEEGIKELGSQILKEHPVENTQLQNEKLYLYYLQNGRDMYVDQELDINRLSDYDVDHIVPQSFLKDDSIDNKVLTRSDKARGKSDNVPSEEVVKKMKNYWRQLLNAKLITQRKFDNLTKAERGGLSELDKAGFIKRQLVETRQITKHVAQILDSRMNTKYDENDKLIREVKVITLKSKLVSDFRKDFQFYKVREINNYHHAHDAYLNAVVGTALIKKYPKLESEFVYGDYKVYDVRKMIAKSEQEIGKATAKYFFYSNIMNFFKTEITLANGEIRKRPLIETNGETGEIVWDKGRDFATVRKVLSMPQVNIVKKTEVQTGGFSKESILPKRNSDKLIARKKDWDPKKYGGFDSPTVAYSVLVVAKVEKGKSKKLKSVKELLGITIMERSSFEKNPIDFLEAKGYKEVKKDLIIKLPKYSLFELENGRKRMLASAGELQKGNELALPSKYVNFLYLASHYEKLKGSPEDNEQKQLFVEQHKHYLDEIIEQISEFSKRVILADANLDKVLSAYNKHRDKPIREQAENIIHLFTLTNLGAPAAFKYFDTTIDRKRYTSTKEVLDATLIHQSITGLYETRIDLSQLGGDGGGSSGSSGSSGSSGSSGSSGGVPWLTQQPLQLTILVPLQEYQEKILSKTALPEDQKQQLKTLFVKYDNLWQHWENQVGHRKIRPHNIATGDYPPRPQKQYPINPKAKPSIQIVIDDLLKQGVLTPQNSTMNTPVYPVPKPDGRWRMVLDYREVNKTIPLTAAQNQHSAGILATIVRQKYKTTLDLANGFWAHPITPESYWLTAFTWQGKQYCWTRLPQGFLNSPALFTADVVDLLKEIPNVQVYVDDIYLSHDDPKEHVQQLEKVFQILLQAGYVVSLKKSEIGQKTVEFLGFNITKEGRGLTDTFKTKLLNITPPKDLKQLQSILGLLNFARNFIPNFAELVQPLYNLIASAKGKYIEWSEENTKQLNMVIEALNTASNLEERLPEQRLVIKVNTSPSAGYVRYYNETGKKPIMYLNYVFSKAELKFSMLEKLLTTMHKALIKAMDLAMGQEILVYSPIVSMTKIQKTPLPERKALPIRWITWMTYLEDPRIQFHYDKTLPELKHIPDVYTSSQSPVKHPSQYEGVFYTDGSAIKSPDPTKSNNAGMGIVHATYKPEYQVLNQWSIPLGNHTAQMAEIAAVEFACKKALKIPGPVLVITDSFYVAESANKELPYWKSNGFVNNKKKPLKHISKWKSIAECLSMKPDITIQHEKGISLQIPVFILKGNALADKLATQGSYVVNAGKRTADGSEFEKRTADGSEFESPKKKAKVE

SEQ ID NO: 1298 - protein, 2122 aa, synthetic construct
  source 1..2122: note = Description of Artificial Sequence: Synthetic polypeptide
MPAAKRVKLDGGDKKYSIGLDIGTNSVGWAVITDEYKVPSKKFKVLGNTDRHSIKKNLIGALLFDSGETAEATRLKRTARRRYTRRKNRICYLQEIFSNEMAKVDDSFFHRLEESFLVEEDKKHERHPIFGNIVDEVAYHEKYPTIYHLRKKLVDSTDKADLRLIYLALAHMIKFRGHFLIEGDLNPDNSDVDKLFIQLVQTYNQLFEENPINASGVDAKAILSARLSKSRRLENLIAQLPGEKKNGLFGNLIALSLGLTPNFKSNFDLAEDAKLQLSKDTYDDDLDNLLAQIGDQYADLFLAAKNLSDAILLSDILRVNTEITKAPLSASMIKRYDEHHQDLTLLKALVRQQLPEKYKEIFFDQSKNGYAGYIDGGASQEEFYKFIKPILEKMDGTEELLVKLNREDLLRKQRTFDNGSIPHQIHLGELHAILRRQEDFYPFLKDNREKIEKILTFRIPYYVGPLARGNSRFAWMTRKSEETITPWNFEEVVDKGASAQSFIERMTNFDKNLPNEKVLPKHSLLYEYFTVYNELTKVKYVTEGMRKPAFLSGEQKKAIVDLLFKTNRKVTVKQLKEDYFKKIECFDSVEISGVEDRFNASLGTYHDLLKIIKDKDFLDNEENEDILEDIVLTLTLFEDREMIEERLKTYAHLFDDKVMKQLKRRRYTGWGRLSRKLINGIRDKQSGKTILDFLKSDGFANRNFMQLIHDDSLTFKEDIQKAQVSGQGDSLHEHIANLAGSPAIKKGILQTVKVVDELVKVMGRHKPENIVIEMARENQTTQKGQKNSRERMKRIEEGIKELGSQILKEHPVENTQLQNEKLYLYYLQNGRDMYVDQELDINRLSDYDVDHIVPQSFLKDDSIDNKVLTRSDKARGKSDNVPSEEVVKKMKNYWRQLLNAKLITQRKFDNLTKAERGGLSELDKAGFIKRQLVETRQITKHVAQILDSRMNTKYDENDKLIREVKVITLKSKLVSDFRKDFQFYKVREINNYHHAHDAYLNAVVGTALIKKYPKLESEFVYGDYKVYDVRKMIAKSEQEIGKATAKYFFYSNIMNFFKTEITLANGEIRKRPLIETNGETGEIVWDKGRDFATVRKVLSMPQVNIVKKTEVQTGGFSKESILPKRNSDKLIARKKDWDPKKYGGFDSPTVAYSVLVVAKVEKGKSKKLKSVKELLGITIMERSSFEKNPIDFLEAKGYKEVKKDLIIKLPKYSLFELENGRKRMLASAGELQKGNELALPSKYVNFLYLASHYEKLKGSPEDNEQKQLFVEQHKHYLDEIIEQISEFSKRVILADANLDKVLSAYNKHRDKPIREQAENIIHLFTLTNLGAPAAFKYFDTTIDRKRYTSTKEVLDATLIHQSITGLYETRIDLSQLGGDGGAEAAAKEAAAKEAAAKEAAAKALEAEAAAKEAAAKEAAAKEAAAKAGGVPWLTQQPLQLTILVPLQEYQEKILSKTALPEDQKQQLKTLFVKYDNLWQHWENQVGHRKIRPHNIATGDYPPRPQKQYPINPKAKPSIQIVIDDLLKQGVLTPQNSTMNTPVYPVPKPDGRWRMVLDYREVNKTIPLTAAQNQHSAGILATIVRQKYKTTLDLANGFWAHPITPESYWLTAFTWQGKQYCWTRLPQGFLNSPALFNADVVDLLKEIPNVQVYVDDIYLSHDDPKEHVQQLEKVFQILLQAGYVVSLKKSEIGQKTVEFLGFNITKEGRGLTDTFKTKLLNITPPKDLKQLQSILGLLNFARNFIPNFAELVQPLYNLIAPAKGKYIEWSEENTKQLNMVIEALNTASNLEERLPEQRLVIKVNTSPSAGYVRYYNETGKKPIMYLNYVFSKAELKFSMLEKLLTTMHKALIKAMDLAMGQEILVYSPIVSMTKIQKTPLPERKALPIRWITWMTYLEDPRIQFHYDKTLPELKHIPDVYTSSQSPVKHPSQYEGVFYTDGSAIKSPDPTKSNNAGMGIVHATYKPEYQVLNQWSIPLGNHTAQMAEIAAVEFACKKALKIPGPVLVITDSFYVAESANKELPYWKSNGFVNNKKKPLKHISKWKSIAECLSMKPDITIQHEKGISLQIPVFILKGNALADKLATQGSYVVNAGKRTADGSEFEKRTADGSEFESPKKKAKVE

SEQ ID NO: 1299 - protein, 2096 aa, synthetic construct
  source 1..2096: note = Description of Artificial Sequence: Synthetic polypeptide
MPAAKRVKLDGGDKKYSIGLDIGTNSVGWAVITDEYKVPSKKFKVLGNTDRHSIKKNLIGALLFDSGETAEATRLKRTARRRYTRRKNRICYLQEIFSNEMAKVDDSFFHRLEESFLVEEDKKHERHPIFGNIVDEVAYHEKYPTIYHLRKKLVDSTDKADLRLIYLALAHMIKFRGHFLIEGDLNPDNSDVDKLFIQLVQTYNQLFEENPINASGVDAKAILSARLSKSRRLENLIAQLPGEKKNGLFGNLIALSLGLTPNFKSNFDLAEDAKLQLSKDTYDDDLDNLLAQIGDQYADLFLAAKNLSDAILLSDILRVNTEITKAPLSASMIKRYDEHHQDLTLLKALVRQQLPEKYKEIFFDQSKNGYAGYIDGGASQEEFYKFIKPILEKMDGTEELLVKLNREDLLRKQRTFDNGSIPHQIHLGELHAILRRQEDFYPFLKDNREKIEKILTFRIPYYVGPLARGNSRFAWMTRKSEETITPWNFEEVVDKGASAQSFIERMTNFDKNLPNEKVLPKHSLLYEYFTVYNELTKVKYVTEGMRKPAFLSGEQKKAIVDLLFKTNRKVTVKQLKEDYFKKIECFDSVEISGVEDRFNASLGTYHDLLKIIKDKDFLDNEENEDILEDIVLTLTLFEDREMIEERLKTYAHLFDDKVMKQLKRRRYTGWGRLSRKLINGIRDKQSGKTILDFLKSDGFANRNFMQLIHDDSLTFKEDIQKAQVSGQGDSLHEHIANLAGSPAIKKGILQTVKVVDELVKVMGRHKPENIVIEMARENQTTQKGQKNSRERMKRIEEGIKELGSQILKEHPVENTQLQNEKLYLYYLQNGRDMYVDQELDINRLSDYDVDHIVPQSFLKDDSIDNKVLTRSDKARGKSDNVPSEEVVKKMKNYWRQLLNAKLITQRKFDNLTKAERGGLSELDKAGFIKRQLVETRQITKHVAQILDSRMNTKYDENDKLIREVKVITLKSKLVSDFRKDFQFYKVREINNYHHAHDAYLNAVVGTALIKKYPKLESEFVYGDYKVYDVRKMIAKSEQEIGKATAKYFFYSNIMNFFKTEITLANGEIRKRPLIETNGETGEIVWDKGRDFATVRKVLSMPQVNIVKKTEVQTGGFSKESILPKRNSDKLIARKKDWDPKKYGGFDSPTVAYSVLVVAKVEKGKSKKLKSVKELLGITIMERSSFEKNPIDFLEAKGYKEVKKDLIIKLPKYSLFELENGRKRMLASAGELQKGNELALPSKYVNFLYLASHYEKLKGSPEDNEQKQLFVEQHKHYLDEIIEQISEFSKRVILADANLDKVLSAYNKHRDKPIREQAENIIHLFTLTNLGAPAAFKYFDTTIDRKRYTSTKEVLDATLIHQSITGLYETRIDLSQLGGDGGGGGGSGGGGSGGGGSGGGGSGGVPWLTQQPLQLTILVPLQEYQEKILSKTALPEDQKQQLKTLFVKYDNLWQHWENQVGHRKIRPHNIATGDYPPRPQKQYPINPKAKPSIQIVIDDLLKQGVLTPQNSTMNTPVYPVPKPDGRWRMVLDYREVNKTIPLTAAQNQHSAGILATIVRQKYKTTLDLANGFWAHPITPESYWLTAFTWQGKQYCWTRLPQGFLNSPALFNADVVDLLKEIPNVQVYVDDIYLSHDDPKEHVQQLEKVFQILLQAGYVVSLKKSEIGQKTVEFLGFNITKEGRGLTDTFKTKLLNITPPKDLKQLQSILGLLNFARNFIPNFAELVQPLYNLIAPAKGKYIEWSEENTKQLNMVIEALNTASNLEERLPEQRLVIKVNTSPSAGYVRYYNETGKKPIMYLNYVFSKAELKFSMLEKLLTTMHKALIKAMDLAMGQEILVYSPIVSMTKIQKTPLPERKALPIRWITWMTYLEDPRIQFHYDKTLPELKHIPDVYTSSQSPVKHPSQYEGVFYTDGSAIKSPDPTKSNNAGMGIVHATYKPEYQVLNQWSIPLGNHTAQMAEIAAVEFACKKALKIPGPVLVITDSFYVAESANKELPYWKSNGFVNNKKKPLKHISKWKSIAECLSMKPDITIQHEKGISLQIPVFILKGNALADKLATQGSYVVNAGKRTADGSEFEKRTADGSEFESPKKKAKVE

SEQ ID NO: 1300 - protein, 2096 aa, synthetic construct
  source 1..2096: note = Description of Artificial Sequence: Synthetic polypeptide
MPAAKRVKLDGGDKKYSIGLDIGTNSVGWAVITDEYKVPSKKFKVLGNTDRHSIKKNLIGALLFDSGETAEATRLKRTARRRYTRRKNRICYLQEIFSNEMAKVDDSFFHRLEESFLVEEDKKHERHPIFGNIVDEVAYHEKYPTIYHLRKKLVDSTDKADLRLIYLALAHMIKFRGHFLIEGDLNPDNSDVDKLFIQLVQTYNQLFEENPINASGVDAKAILSARLSKSRRLENLIAQLPGEKKNGLFGNLIALSLGLTPNFKSNFDLAEDAKLQLSKDTYDDDLDNLLAQIGDQYADLFLAAKNLSDAILLSDILRVNTEITKAPLSASMIKRYDEHHQDLTLLKALVRQQLPEKYKEIFFDQSKNGYAGYIDGGASQEEFYKFIKPILEKMDGTEELLVKLNREDLLRKQRTFDNGSIPHQIHLGELHAILRRQEDFYPFLKDNREKIEKILTFRIPYYVGPLARGNSRFAWMTRKSEETITPWNFEEVVDKGASAQSFIERMTNFDKNLPNEKVLPKHSLLYEYFTVYNELTKVKYVTEGMRKPAFLSGEQKKAIVDLLFKTNRKVTVKQLKEDYFKKIECFDSVEISGVEDRFNASLGTYHDLLKIIKDKDFLDNEENEDILEDIVLTLTLFEDREMIEERLKTYAHLFDDKVMKQLKRRRYTGWGRLSRKLINGIRDKQSGKTILDFLKSDGFANRNFMQLIHDDSLTFKEDIQKAQVSGQGDSLHEHIANLAGSPAIKKGILQTVKVVDELVKVMGRHKPENIVIEMARENQTTQKGQKNSRERMKRIEEGIKELGSQILKEHPVENTQLQNEKLYLYYLQNGRDMYVDQELDINRLSDYDVDHIVPQSFLKDDSIDNKVLTRSDKARGKSDNVPSEEVVKKMKNYWRQLLNAKLITQRKFDNLTKAERGGLSELDKAGFIKRQLVETRQITKHVAQILDSRMNTKYDENDKLIREVKVITLKSKLVSDFRKDFQFYKVREINNYHHAHDAYLNAVVGTALIKKYPKLESEFVYGDYKVYDVRKMIAKSEQEIGKATAKYFFYSNIMNFFKTEITLANGEIRKRPLIETNGETGEIVWDKGRDFATVRKVLSMPQVNIVKKTEVQTGGFSKESILPKRNSDKLIARKKDWDPKKYGGFDSPTVAYSVLVVAKVEKGKSKKLKSVKELLGITIMERSSFEKNPIDFLEAKGYKEVKKDLIIKLPKYSLFELENGRKRMLASAGELQKGNELALPSKYVNFLYLASHYEKLKGSPEDNEQKQLFVEQHKHYLDEIIEQISEFSKRVILADANLDKVLSAYNKHRDKPIREQAENIIHLFTLTNLGAPAAFKYFDTTIDRKRYTSTKEVLDATLIHQSITGLYETRIDLSQLGGDGGEAAAKEAAAKEAAAKEAAAKGGVPWLTQQPLQLTILVPLQEYQEKILSKTALPEDQKQQLKTLFVKYDNLWQHWENQVGHRKIRPHNIATGDYPPRPQKQYPINPKAKPSIQIVIDDLLKQGVLTPQNSTMNTPVYPVPKPDGRWRMVLDYREVNKTIPLTAAQNQHSAGILATIVRQKYKTTLDLANGFWAHPITPESYWLTAFTWQGKQYCWTRLPQGFLNSPALFNADVVDLLKEIPNVQVYVDDIYLSHDDPKEHVQQLEKVFQILLQAGYVVSLKKSEIGQKTVEFLGFNITKEGRGLTDTFKTKLLNITPPKDLKQLQSILGLLNFARNFIPNFAELVQPLYNLIAPAKGKYIEWSEENTKQLNMVIEALNTASNLEERLPEQRLVIKVNTSPSAGYVRYYNETGKKPIMYLNYVFSKAELKFSMLEKLLTTMHKALIKAMDLAMGQEILVYSPIVSMTKIQKTPLPERKALPIRWITWMTYLEDPRIQFHYDKTLPELKHIPDVYTSSQSPVKHPSQYEGVFYTDGSAIKSPDPTKSNNAGMGIVHATYKPEYQVLNQWSIPLGNHTAQMAEIAAVEFACKKALKIPGPVLVITDSFYVAESANKELPYWKSNGFVNNKKKPLKHISKWKSIAECLSMKPDITIQHEKGISLQIPVFILKGNALADKLATQGSYVVNAGKRTADGSEFEKRTADGSEFESPKKKAKVE

SEQ ID NO: 1301 - protein, 2084 aa, synthetic construct
  source 1..2084: note = Description of Artificial Sequence: Synthetic polypeptide
MPAAKRVKLDGGDKKYSIGLDIGTNSVGWAVITDEYKVPSKKFKVLGNTDRHSIKKNLIGALLFDSGETAEATRLKRTARRRYTRRKNRICYLQEIFSNEMAKVDDSFFHRLEESFLVEEDKKHERHPIFGNIVDEVAYHEKYPTIYHLRKKLVDSTDKADLRLIYLALAHMIKFRGHFLIEGDLNPDNSDVDKLFIQLVQTYNQLFEENPINASGVDAKAILSARLSKSRRLENLIAQLPGEKKNGLFGNLIALSLGLTPNFKSNFDLAEDAKLQLSKDTYDDDLDNLLAQIGDQYADLFLAAKNLSDAILLSDILRVNTEITKAPLSASMIKRYDEHHQDLTLLKALVRQQLPEKYKEIFFDQSKNGYAGYIDGGASQEEFYKFIKPILEKMDGTEELLVKLNREDLLRKQRTFDNGSIPHQIHLGELHAILRRQEDFYPFLKDNREKIEKILTFRIPYYVGPLARGNSRFAWMTRKSEETITPWNFEEVVDKGASAQSFIERMTNFDKNLPNEKVLPKHSLLYEYFTVYNELTKVKYVTEGMRKPAFLSGEQKKAIVDLLFKTNRKVTVKQLKEDYFKKIECFDSVEISGVEDRFNASLGTYHDLLKIIKDKDFLDNEENEDILEDIVLTLTLFEDREMIEERLKTYAHLFDDKVMKQLKRRRYTGWGRLSRKLINGIRDKQSGKTILDFLKSDGFANRNFMQLIHDDSLTFKEDIQKAQVSGQGDSLHEHIANLAGSPAIKKGILQTVKVVDELVKVMGRHKPENIVIEMARENQTTQKGQKNSRERMKRIEEGIKELGSQILKEHPVENTQLQNEKLYLYYLQNGRDMYVDQELDINRLSDYDVDHIVPQSFLKDDSIDNKVLTRSDKARGKSDNVPSEEVVKKMKNYWRQLLNAKLITQRKFDNLTKAERGGLSELDKAGFIKRQLVETRQITKHVAQILDSRMNTKYDENDKLIREVKVITLKSKLVSDFRKDFQFYKVREINNYHHAHDAYLNAVVGTALIKKYPKLESEFVYGDYKVYDVRKMIAKSEQEIGKATAKYFFYSNIMNFFKTEITLANGEIRKRPLIETNGETGEIVWDKGRDFATVRKVLSMPQVNIVKKTEVQTGGFSKESILPKRNSDKLIARKKDWDPKKYGGFDSPTVAYSVLVVAKVEKGKSKKLKSVKELLGITIMERSSFEKNPIDFLEAKGYKEVKKDLIIKLPKYSLFELENGRKRMLASAGELQKGNELALPSKYVNFLYLASHYEKLKGSPEDNEQKQLFVEQHKHYLDEIIEQISEFSKRVILADANLDKVLSAYNKHRDKPIREQAENIIHLFTLTNLGAPAAFKYFDTTIDRKRYTSTKEVLDATLIHQSITGLYETRIDLSQLGGDGGEAAAKPAPGGVPWLTQQPLQLTILVPLQEYQEKILSKTALPEDQKQQLKTLFVKYDNLWQHWENQVGHRKIRPHNIATGDYPPRPQKQYPINPKAKPSIQIVIDDLLKQGVLTPQNSTMNTPVYPVPKPDGRWRMVLDYREVNKTIPLTAAQNQHSAGILATIVRQKYKTTLDLANGFWAHPITPESYWLTAFTWQGKQYCWTRLPQGFLNSPALFNADVVDLLKEIPNVQVYVDDIYLSHDDPKEHVQQLEKVFQILLQAGYVVSLKKSEIGQKTVEFLGFNITKEGRGLTDTFKTKLLNITPPKDLKQLQSILGLLNFARNFIPNFAELVQPLYNLIAPAKGKYIEWSEENTKQLNMVIEALNTASNLEERLPEQRLVIKVNTSPSAGYVRYYNETGKKPIMYLNYVFSKAELKFSMLEKLLTTMHKALIKAMDLAMGQEILVYSPIVSMTKIQKTPLPERKALPIRWITWMTYLEDPRIQFHYDKTLPELKHIPDVYTSSQSPVKHPSQYEGVFYTDGSAIKSPDPTKSNNAGMGIVHATYKPEYQVLNQWSIPLGNHTAQMAEIAAVEFACKKALKIPGPVLVITDSFYVAESANKELPYWKSNGFVNNKKKPLKHISKWKSIAECLSMKPDITIQHEKGISLQIPVFILKGNALADKLATQGSYVVNAGKRTADGSEFEKRTADGSEFESPKKKAKVE

SEQ ID NO: 1302 - protein, 2087 aa, synthetic construct
  source 1..2087: note = Description of Artificial Sequence: Synthetic polypeptide
MPAAKRVKLDGGDKKYSIGLDIGTNSVGWAVITDEYKVPSKKFKVLGNTDRHSIKKNLIGALLFDSGETAEATRLKRTARRRYTRRKNRICYLQEIFSNEMAKVDDSFFHRLEESFLVEEDKKHERHPIFGNIVDEVAYHEKYPTIYHLRKKLVDSTDKADLRLIYLALAHMIKFRGHFLIEGDLNPDNSDVDKLFIQLVQTYNQLFEENPINASGVDAKAILSARLSKSRRLENLIAQLPGEKKNGLFGNLIALSLGLTPNFKSNFDLAEDAKLQLSKDTYDDDLDNLLAQIGDQYADLFLAAKNLSDAILLSDILRVNTEITKAPLSASMIKRYDEHHQDLTLLKALVRQQLPEKYKEIFFDQSKNGYAGYIDGGASQEEFYKFIKPILEKMDGTEELLVKLNREDLLRKQRTFDNGSIPHQIHLGELHAILRRQEDFYPFLKDNREKIEKILTFRIPYYVGPLARGNSRFAWMTRKSEETITPWNFEEVVDKGASAQSFIERMTNFDKNLPNEKVLPKHSLLYEYFTVYNELTKVKYVTEGMRKPAFLSGEQKKAIVDLLFKTNRKVTVKQLKEDYFKKIECFDSVEISGVEDRFNASLGTYHDLLKIIKDKDFLDNEENEDILEDIVLTLTLFEDREMIEERLKTYAHLFDDKVMKQLKRRRYTGWGRLSRKLINGIRDKQSGKTILDFLKSDGFANRNFMQLIHDDSLTFKEDIQKAQVSGQGDSLHEHIANLAGSPAIKKGILQTVKVVDELVKVMGRHKPENIVIEMARENQTTQKGQKNSRERMKRIEEGIKELGSQILKEHPVENTQLQNEKLYLYYLQNGRDMYVDQELDINRLSDYDVDHIVPQSFLKDDSIDNKVLTRSDKARGKSDNVPSEEVVKKMKNYWRQLLNAKLITQRKFDNLTKAERGGLSELDKAGFIKRQLVETRQITKHVAQILDSRMNTKYDENDKLIREVKVITLKSKLVSDFRKDFQFYKVREINNYHHAHDAYLNAVVGTALIKKYPKLESEFVYGDYKVYDVRKMIAKSEQEIGKATAKYFFYSNIMNFFKTEITLANGEIRKRPLIETNGETGEIVWDKGRDFATVRKVLSMPQVNIVKKTEVQTGGFSKESILPKRNSDKLIARKKDWDPKKYGGFDSPTVAYSVLVVAKVEKGKSKKLKSVKELLGITIMERSSFEKNPIDFLEAKGYKEVKKDLIIKLPKYSLFELENGRKRMLASAGELQKGNELALPSKYVNFLYLASHYEKLKGSPEDNEQKQLFVEQHKHYLDEIIEQISEFSKRVILADANLDKVLSAYNKHRDKPIREQAENIIHLFTLTNLGAPAAFKYFDTTIDRKRYTSTKEVLDATLIHQSITGLYETRIDLSQLGGDGGPAPGSSEAAAKGGVPWLTQQPLQLTILVPLQEYQEKILSKTALPEDQKQQLKTLFVKYDNLWQHWENQVGHRKIRPHNIATGDYPPRPQKQYPINPKAKPSIQIVIDDLLKQGVLTPQNSTMNTPVYPVPKPDGRWRMVLDYREVNKTIPLTAAQNQHSAGILATIVRQKYKTTLDLANGFWAHPITPESYWLTAFTWQGKQYCWTRLPQGFLNSPALFNADVVDLLKEIPNVQVYVDDIYLSHDDPKEHVQQLEKVFQILLQAGYVVSLKKSEIGQKTVEFLGFNITKEGRGLTDTFKTKLLNITPPKDLKQLQSILGLLNFARNFIPNFAELVQPLYNLIAPAKGKYIEWSEENTKQLNMVIEALNTASNLEERLPEQRLVIKVNTSPSAGYVRYYNETGKKPIMYLNYVFSKAELKFSMLEKLLTTMHKALIKAMDLAMGQEILVYSPIVSMTKIQKTPLPERKALPIRWITWMTYLEDPRIQFHYDKTLPELKHIPDVYTSSQSPVKHPSQYEGVFYTDGSAIKSPDPTKSNNAGMGIVHATYKPEYQVLNQWSIPLGNHTAQMAEIAAVEFACKKALKIPGPVLVITDSFYVAESANKELPYWKSNGFVNNKKKPLKHISKWKSIAECLSMKPDITIQHEKGISLQIPVFILKGNALADKLATQGSYVVNAGKRTADGSEFEKRTADGSEFESPKKKAKVE

SEQ ID NO: 1303 - protein, 2091 aa, synthetic construct
  source 1..2091: note = Description of Artificial Sequence: Synthetic polypeptide
MPAAKRVKLDGGDKKYSIGLDIGTNSVGWAVITDEYKVPSKKFKVLGNTDRHSIKKNLIGALLFDSGETAEATRLKRTARRRYTRRKNRICYLQEIFSNEMAKVDDSFFHRLEESFLVEEDKKHERHPIFGNIVDEVAYHEKYPTIYHLRKKLVDSTDKADLRLIYLALAHMIKFRGHFLIEGDLNPDNSDVDKLFIQLVQTYNQLFEENPINASGVDAKAILSARLSKSRRLENLIAQLPGEKKNGLFGNLIALSLGLTPNFKSNFDLAEDAKLQLSKDTYDDDLDNLLAQIGDQYADLFLAAKNLSDAILLSDILRVNTEITKAPLSASMIKRYDEHHQDLTLLKALVRQQLPEKYKEIFFDQSKNGYAGYIDGGASQEEFYKFIKPILEKMDGTEELLVKLNREDLLRKQRTFDNGSIPHQIHLGELHAILRRQEDFYPFLKDNREKIEKILTFRIPYYVGPLARGNSRFAWMTRKSEETITPWNFEEVVDKGASAQSFIERMTNFDKNLPNEKVLPKHSLLYEYFTVYNELTKVKYVTEGMRKPAFLSGEQKKAIVDLLFKTNRKVTVKQLKEDYFKKIECFDSVEISGVEDRFNASLGTYHDLLKIIKDKDFLDNEENEDILEDIVLTLTLFEDREMIEERLKTYAHLFDDKVMKQLKRRRYTGWGRLSRKLINGIRDKQSGKTILDFLKSDGFANRNFMQLIHDDSLTFKEDIQKAQVSGQGDSLHEHIANLAGSPAIKKGILQTVKVVDELVKVMGRHKPENIVIEMARENQTTQKGQKNSRERMKRIEEGIKELGSQILKEHPVENTQLQNEKLYLYYLQNGRDMYVDQELDINRLSDYDVDHIVPQSFLKDDSIDNKVLTRSDKARGKSDNVPSEEVVKKMKNYWRQLLNAKLITQRKFDNLTKAERGGLSELDKAGFIKRQLVETRQITKHVAQILDSRMNTKYDENDKLIREVKVITLKSKLVSDFRKDFQFYKVREINNYHHAHDAYLNAVVGTALIKKYPKLESEFVYGDYKVYDVRKMIAKSEQEIGKATAKYFFYSNIMNFFKTEITLANGEIRKRPLIETNGETGEIVWDKGRDFATVRKVLSMPQVNIVKKTEVQTGGFSKESILPKRNSDKLIARKKDWDPKKYGGFDSPTVAYSVLVVAKVEKGKSKKLKSVKELLGITIMERSSFEKNPIDFLEAKGYKEVKKDLIIKLPKYSLFELENGRKRMLASAGELQKGNELALPSKYVNFLYLASHYEKLKGSPEDNEQKQLFVEQHKHYLDEIIEQISEFSKRVILADANLDKVLSAYNKHRDKPIREQAENIIHLFTLTNLGAPAAFKYFDTTIDRKRYTSTKEVLDATLIHQSITGLYETRIDLSQLGGDGGGSSGSSGSSGSSGSSGGVPWLTQQPLQLTILVPLQEYQEKILSKTALPEDQKQQLKTLFVKYDNLWQHWENQVGHRKIRPHNIATGDYPPRPQKQYPINPKAKPSIQIVIDDLLKQGVLTPQNSTMNTPVYPVPKPDGRWRMVLDYREVNKTIPLTAAQNQHSAGILATIVRQKYKTTLDLANGFWAHPITPESYWLTAFTWQGKQYCWTRLPQGFLNSPALFNADVVDLLKEIPNVQVYVDDIYLSHDDPKEHVQQLEKVFQILLQAGYVVSLKKSEIGQKTVEFLGFNITKEGRGLTDTFKTKLLNITPPKDLKQLQSILGLLNFARNFIPNFAELVQPLYNLIAPAKGKYIEWSEENTKQLNMVIEALNTASNLEERLPEQRLVIKVNTSPSAGYVRYYNETGKKPIMYLNYVFSKAELKFSMLEKLLTTMHKALIKAMDLAMGQEILVYSPIVSMTKIQKTPLPERKALPIRWITWMTYLEDPRIQFHYDKTLPELKHIPDVYTSSQSPVKHPSQYEGVFYTDGSAIKSPDPTKSNNAGMGIVHATYKPEYQVLNQWSIPLGNHTAQMAEIAAVEFACKKALKIPGPVLVITDSFYVAESANKELPYWKSNGFVNNKKKPLKHISKWKSIAECLSMKPDITIQHEKGISLQIPVFILKGNALADKLATQGSYVVNAGKRTADGSEFEKRTADGSEFESPKKKAKVE

SEQ ID NO: 1304 - protein, 2085 aa, synthetic construct
  source 1..2085: note = Description of Artificial Sequence: Synthetic polypeptide
MPAAKRVKLDGGDKKYSIGLDIGTNSVGWAVITDEYKVPSKKFKVLGNTDRHSIKKNLIGALLFDSGETAEATRLKRTARRRYTRRKNRICYLQEIFSNEMAKVDDSFFHRLEESFLVEEDKKHERHPIFGNIVDEVAYHEKYPTIYHLRKKLVDSTDKADLRLIYLALAHMIKFRGHFLIEGDLNPDNSDVDKLFIQLVQTYNQLFEENPINASGVDAKAILSARLSKSRRLENLIAQLPGEKKNGLFGNLIALSLGLTPNFKSNFDLAEDAKLQLSKDTYDDDLDNLLAQIGDQYADLFLAAKNLSDAILLSDILRVNTEITKAPLSASMIKRYDEHHQDLTLLKALVRQQLPEKYKEIFFDQSKNGYAGYIDGGASQEEFYKFIKPILEKMDGTEELLVKLNREDLLRKQRTFDNGSIPHQIHLGELHAILRRQEDFYPFLKDNREKIEKILTFRIPYYVGPLARGNSRFAWMTRKSEETITPWNFEEVVDKGASAQSFIERMTNFDKNLPNEKVLPKHSLLYEYFTVYNELTKVKYVTEGMRKPAFLSGEQKKAIVDLLFKTNRKVTVKQLKEDYFKKIECFDSVEISGVEDRFNASLGTYHDLLKIIKDKDFLDNEENEDILEDIVLTLTLFEDREMIEERLKTYAHLFDDKVMKQLKRRRYTGWGRLSRKLINGIRDKQSGKTILDFLKSDGFANRNFMQLIHDDSLTFKEDIQKAQVSGQGDSLHEHIANLAGSPAIKKGILQTVKVVDELVKVMGRHKPENIVIEMARENQTTQKGQKNSRERMKRIEEGIKELGSQILKEHPVENTQLQNEKLYLYYLQNGRDMYVDQELDINRLSDYDVDHIVPQSFLKDDSIDNKVLTRSDKARGKSDNVPSEEVVKKMKNYWRQLLNAKLITQRKFDNLTKAERGGLSELDKAGFIKRQLVETRQITKHVAQILDSRMNTKYDENDKLIREVKVITLKSKLVSDFRKDFQFYKVREINNYHHAHDAYLNAVVGTALIKKYPKLESEFVYGDYKVYDVRKMIAKSEQEIGKATAKYFFYSNIMNFFKTEITLANGEIRKRPLIETNGETGEIVWDKGRDFATVRKVLSMPQVNIVKKTEVQTGGFSKESILPKRNSDKLIARKKDWDPKKYGGFDSPTVAYSVLVVAKVEKGKSKKLKSVKELLGITIMERSSFEKNPIDFLEAKGYKEVKKDLIIKLPKYSLFELENGRKRMLASAGELQKGNELALPSKYVNFLYLASHYEKLKGSPEDNEQKQLFVEQHKHYLDEIIEQISEFSKRVILADANLDKVLSAYNKHRDKPIREQAENIIHLFTLTNLGAPAAFKYFDTTIDRKRYTSTKEVLDATLIHQSITGLYETRIDLSQLGGDGGGGSGGSGGSGGVPWLTQQPLQLTILVPLQEYQEKILSKTALPEDQKQQLKTLFVKYDNLWQHWENQVGHRKIRPHNIATGDYPPRPQKQYPINPKAKPSIQIVIDDLLKQGVLTPQNSTMNTPVYPVPKPDGRWRMVLDYREVNKTIPLTAAQNQHSAGILATIVRQKYKTTLDLANGFWAHPITPESYWLTAFTWQGKQYCWTRLPQGFLNSPALFNADVVDLLKEIPNVQVYVDDIYLSHDDPKEHVQQLEKVFQILLQAGYVVSLKKSEIGQKTVEFLGFNITKEGRGLTDTFKTKLLNITPPKDLKQLQSILGLLNFARNFIPNFAELVQPLYNLIAPAKGKYIEWSEENTKQLNMVIEALNTASNLEERLPEQRLVIKVNTSPSAGYVRYYNETGKKPIMYLNYVFSKAELKFSMLEKLLTTMHKALIKAMDLAMGQEILVYSPIVSMTKIQKTPLPERKALPIRWITWMTYLEDPRIQFHYDKTLPELKHIPDVYTSSQSPVKHPSQYEGVFYTDGSAIKSPDPTKSNNAGMGIVHATYKPEYQVLNQWSIPLGNHTAQMAEIAAVEFACKKALKIPGPVLVITDSFYVAESANKELPYWKSNGFVNNKKKPLKHISKWKSIAECLSMKPDITIQHEKGISLQIPVFILKGNALADKLATQGSYVVNAGKRTADGSEFEKRTADGSEFESPKKKAKVE

SEQ ID NO: 1305 - protein, 2085 aa, synthetic construct
  source 1..2085: note = Description of Artificial Sequence: Synthetic polypeptide
MPAAKRVKLDGGDKKYSIGLDIGTNSVGWAVITDEYKVPSKKFKVLGNTDRHSIKKNLIGALLFDSGETAEATRLKRTARRRYTRRKNRICYLQEIFSNEMAKVDDSFFHRLEESFLVEEDKKHERHPIFGNIVDEVAYHEKYPTIYHLRKKLVDSTDKADLRLIYLALAHMIKFRGHFLIEGDLNPDNSDVDKLFIQLVQTYNQLFEENPINASGVDAKAILSARLSKSRRLENLIAQLPGEKKNGLFGNLIALSLGLTPNFKSNFDLAEDAKLQLSKDTYDDDLDNLLAQIGDQYADLFLAAKNLSDAILLSDILRVNTEITKAPLSASMIKRYDEHHQDLTLLKALVRQQLPEKYKEIFFDQSKNGYAGYIDGGASQEEFYKFIKPILEKMDGTEELLVKLNREDLLRKQRTFDNGSIPHQIHLGELHAILRRQEDFYPFLKDNREKIEKILTFRIPYYVGPLARGNSRFAWMTRKSEETITPWNFEEVVDKGASAQSFIERMTNFDKNLPNEKVLPKHSLLYEYFTVYNELTKVKYVTEGMRKPAFLSGEQKKAIVDLLFKTNRKVTVKQLKEDYFKKIECFDSVEISGVEDRFNASLGTYHDLLKIIKDKDFLDNEENEDILEDIVLTLTLFEDREMIEERLKTYAHLFDDKVMKQLKRRRYTGWGRLSRKLINGIRDKQSGKTILDFLKSDGFANRNFMQLIHDDSLTFKEDIQKAQVSGQGDSLHEHIANLAGSPAIKKGILQTVKVVDELVKVMGRHKPENIVIEMARENQTTQKGQKNSRERMKRIEEGIKELGSQILKEHPVENTQLQNEKLYLYYLQNGRDMYVDQELDINRLSDYDVDHIVPQSFLKDDSIDNKVLTRSDKARGKSDNVPSEEVVKKMKNYWRQLLNAKLITQRKFDNLTKAERGGLSELDKAGFIKRQLVETRQITKHVAQILDSRMNTKYDENDKLIREVKVITLKSKLVSDFRKDFQFYKVREINNYHHAHDAYLNAVVGTALIKKYPKLESEFVYGDYKVYDVRKMIAKSEQEIGKATAKYFFYSNIMNFFKTEITLANGEIRKRPLIETNGETGEIVWDKGRDFATVRKVLSMPQVNIVKKTEVQTGGFSKESILPKRNSDKLIARKKDWDPKKYGGFDSPTVAYSVLVVAKVEKGKSKKLKSVKELLGITIMERSSFEKNPIDFLEAKGYKEVKKDLIIKLPKYSLFELENGRKRMLASAGELQKGNELALPSKYVNFLYLASHYEKLKGSPEDNEQKQLFVEQHKHYLDEIIEQISEFSKRVILADANLDKVLSAYNKHRDKPIREQAENIIHLFTLTNLGAPAAFKYFDTTIDRKRYTSTKEVLDATLIHQSITGLYETRIDLSQLGGDGGGGGGSSPAPGGVPWLTQQPLQLTILVPLQEYQEKILSKTALPEDQKQQLKTLFVKYDNLWQHWENQVGHRKIRPHNIATGDYPPRPQKQYPINPKAKPSIQIVIDDLLKQGVLTPQNSTMNTPVYPVPKPDGRWRMVLDYREVNKTIPLTAAQNQHSAGILATIVRQKYKTTLDLANGFWAHPITPESYWLTAFTWQGKQYCWTRLPQGFLNSPALFNADVVDLLKEIPNVQVYVDDIYLSHDDPKEHVQQLEKVFQILLQAGYVVSLKKSEIGQKTVEFLGFNITKEGRGLTDTFKTKLLNITPPKDLKQLQSILGLLNFARNFIPNFAELVQPLYNLIAPAKGKYIEWSEENTKQLNMVIEALNTASNLEERLPEQRLVIKVNTSPSAGYVRYYNETGKKPIMYLNYVFSKAELKFSMLEKLLTTMHKALIKAMDLAMGQEILVYSPIVSMTKIQKTPLPERKALPIRWITWMTYLEDPRIQFHYDKTLPELKHIPDVYTSSQSPVKHPSQYEGVFYTDGSAIKSPDPTKSNNAGMGIVHATYKPEYQVLNQWSIPLGNHTAQMAEIAAVEFACKKALKIPGPVLVITDSFYVAESANKELPYWKSNGFVNNKKKPLKHISKWKSIAECLSMKPDITIQHEKGISLQIPVFILKGNALADKLATQGSYVVNAGKRTADGSEFEKRTADGSEFESPKKKAKVE

SEQ ID NO: 1306 - protein, 2087 aa, synthetic construct
  source 1..2087: note = Description of Artificial Sequence: Synthetic polypeptide
MPAAKRVKLDGGDKKYSIGLDIGTNSVGWAVITDEYKVPSKKFKVLGNTDRHSIKKNLIGALLFDSGETAEATRLKRTARRRYTRRKNRICYLQEIFSNEMAKVDDSFFHRLEESFLVEEDKKHERHPIFGNIVDEVAYHEKYPTIYHLRKKLVDSTDKADLRLIYLALAHMIKFRGHFLIEGDLNPDNSDVDKLFIQLVQTYNQLFEENPINASGVDAKAILSARLSKSRRLENLIAQLPGEKKNGLFGNLIALSLGLTPNFKSNFDLAEDAKLQLSKDTYDDDLDNLLAQIGDQYADLFLAAKNLSDAILLSDILRVNTEITKAPLSASMIKRYDEHHQDLTLLKALVRQQLPEKYKEIFFDQSKNGYAGYIDGGASQEEFYKFIKPILEKMDGTEELLVKLNREDLLRKQRTFDNGSIPHQIHLGELHAILRRQEDFYPFLKDNREKIEKILTFRIPYYVGPLARGNSRFAWMTRKSEETITPWNFEEVVDKGASAQSFIERMTNFDKNLPNEKVLPKHSLLYEYFTVYNELTKVKYVTEGMRKPAFLSGEQKKAIVDLLFKTNRKVTVKQLKEDYFKKIECFDSVEISGVEDRFNASLGTYHDLLKIIKDKDFLDNEENEDILEDIVLTLTLFEDREMIEERLKTYAHLFDDKVMKQLKRRRYTGWGRLSRKLINGIRDKQSGKTILDFLKSDGFANRNFMQLIHDDSLTFKEDIQKAQVSGQGDSLHEHIANLAGSPAIKKGILQTVKVVDELVKVMGRHKPENIVIEMARENQTTQKGQKNSRERMKRIEEGIKELGSQILKEHPVENTQLQNEKLYLYYLQNGRDMYVDQELDINRLSDYDVDHIVPQSFLKDDSIDNKVLTRSDKARGKSDNVPSEEVVKKMKNYWRQLLNAKLITQRKFDNLTKAERGGLSELDKAGFIKRQLVETRQITKHVAQILDSRMNTKYDENDKLIREVKVITLKSKLVSDFRKDFQFYKVREINNYHHAHDAYLNAVVGTALIKKYPKLESEFVYGDYKVYDVRKMIAKSEQEIGKATAKYFFYSNIMNFFKTEITLANGEIRKRPLIETNGETGEIVWDKGRDFATVRKVLSMPQVNIVKKTEVQTGGFSKESILPKRNSDKLIARKKDWDPKKYGGFDSPTVAYSVLVVAKVEKGKSKKLKSVKELLGITIMERSSFEKNPIDFLEAKGYKEVKKDLIIKLPKYSLFELENGRKRMLASAGELQKGNELALPSKYVNFLYLASHYEKLKGSPEDNEQKQLFVEQHKHYLDEIIEQISEFSKRVILADANLDKVLSAYNKHRDKPIREQAENIIHLFTLTNLGAPAAFKYFDTTIDRKRYTSTKEVLDATLIHQSITGLYETRIDLSQLGGDGGGSSGGSEAAAKGGVPWLTQQPLQLTILVPLQEYQEKILSKTALPEDQKQQLKTLFVKYDNLWQHWENQVGHRKIRPHNIATGDYPPRPQKQYPINPKAKPSIQIVIDDLLKQGVLTPQNSTMNTPVYPVPKPDGRWRMVLDYREVNKTIPLTAAQNQHSAGILATIVRQKYKTTLDLANGFWAHPITPESYWLTAFTWQGKQYCWTRLPQGFLNSPALFNADVVDLLKEIPNVQVYVDDIYLSHDDPKEHVQQLEKVFQILLQAGYVVSLKKSEIGQKTVEFLGFNITKEGRGLTDTFKTKLLNITPPKDLKQLQSILGLLNFARNFIPNFAELVQPLYNLIAPAKGKYIEWSEENTKQLNMVIEALNTASNLEERLPEQRLVIKVNTSPSAGYVRYYNETGKKPIMYLNYVFSKAELKFSMLEKLLTTMHKALIKAMDLAMGQEILVYSPIVSMTKIQKTPLPERKALPIRWITWMTYLEDPRIQFHYDKTLPELKHIPDVYTSSQSPVKHPSQYEGVFYTDGSAIKSPDPTKSNNAGMGIVHATYKPEYQVLNQWSIPLGNHTAQMAEIAAVEFACKKALKIPGPVLVITDSFYVAESANKELPYWKSNGFVNNKKKPLKHISKWKSIAECLSMKPDITIQHEKGISLQIPVFILKGNALADKLATQGSYVVNAGKRTADGSEFEKRTADGSEFESPKKKAKVE

SEQ ID NO: 1307 - protein, 2085 aa, synthetic construct
  source 1..2085: note = Description of Artificial Sequence: Synthetic polypeptide
MPAAKRVKLDGGDKKYSIGLDIGTNSVGWAVITDEYKVPSKKFKVLGNTDRHSIKKNLIGALLFDSGETAEATRLKRTARRRYTRRKNRICYLQEIFSNEMAKVDDSFFHRLEESFLVEEDKKHERHPIFGNIVDEVAYHEKYPTIYHLRKKLVDSTDKADLRLIYLALAHMIKFRGHFLIEGDLNPDNSDVDKLFIQLVQTYNQLFEENPINASGVDAKAILSARLSKSRRLENLIAQLPGEKKNGLFGNLIALSLGLTPNFKSNFDLAEDAKLQLSKDTYDDDLDNLLAQIGDQYADLFLAAKNLSDAILLSDILRVNTEITKAPLSASMIKRYDEHHQDLTLLKALVRQQLPEKYKEIFFDQSKNGYAGYIDGGASQEEFYKFIKPILEKMDGTEELLVKLNREDLLRKQRTFDNGSIPHQIHLGELHAILRRQEDFYPFLKDNREKIEKILTFRIPYYVGPLARGNSRFAWMTRKSEETITPWNFEEVVDKGASAQSFIERMTNFDKNLPNEKVLPKHSLLYEYFTVYNELTKVKYVTEGMRKPAFLSGEQKKAIVDLLFKTNRKVTVKQLKEDYFKKIECFDSVEISGVEDRFNASLGTYHDLLKIIKDKDFLDNEENEDILEDIVLTLTLFEDREMIEERLKTYAHLFDDKVMKQLKRRRYTGWGRLSRKLINGIRDKQSGKTILDFLKSDGFANRNFMQLIHDDSLTFKEDIQKAQVSGQGDSLHEHIANLAGSPAIKKGILQTVKVVDELVKVMGRHKPENIVIEMARENQTTQKGQKNSRERMKRIEEGIKELGSQILKEHPVENTQLQNEKLYLYYLQNGRDMYVDQELDINRLSDYDVDHIVPQSFLKDDSIDNKVLTRSDKARGKSDNVPSEEVVKKMKNYWRQLLNAKLITQRKFDNLTKAERGGLSELDKAGFIKRQLVETRQITKHVAQILDSRMNTKYDENDKLIREVKVITLKSKLVSDFRKDFQFYKVREINNYHHAHDAYLNAVVGTALIKKYPKLESEFVYGDYKVYDVRKMIAKSEQEIGKATAKYFFYSNIMNFFKTEITLANGEIRKRPLIETNGETGEIVWDKGRDFATVRKVLSMPQVNIVKKTEVQTGGFSKESILPKRNSDKLIARKKDWDPKKYGGFDSPTVAYSVLVVAKVEKGKSKKLKSVKELLGITIMERSSFEKNPIDFLEAKGYKEVKKDLIIKLPKYSLFELENGRKRMLASAGELQKGNELALPSKYVNFLYLASHYEKLKGSPEDNEQKQLFVEQHKHYLDEIIEQISEFSKRVILADANLDKVLSAYNKHRDKPIREQAENIIHLFTLTNLGAPAAFKYFDTTIDRKRYTSTKEVLDATLIHQSITGLYETRIDLSQLGGDGGGSSPAPGGSGGVPWLTQQPLQLTILVPLQEYQEKILSKTALPEDQKQQLKTLFVKYDNLWQHWENQVGHRKIRPHNIATGDYPPRPQKQYPINPKAKPSIQIVIDDLLKQGVLTPQNSTMNTPVYPVPKPDGRWRMVLDYREVNKTIPLTAAQNQHSAGILATIVRQKYKTTLDLANGFWAHPITPESYWLTAFTWQGKQYCWTRLPQGFLNSPALFNADVVDLLKEIPNVQVYVDDIYLSHDDPKEHVQQLEKVFQILLQAGYVVSLKKSEIGQKTVEFLGFNITKEGRGLTDTFKTKLLNITPPKDLKQLQSILGLLNFARNFIPNFAELVQPLYNLIAPAKGKYIEWSEENTKQLNMVIEALNTASNLEERLPEQRLVIKVNTSPSAGYVRYYNETGKKPIMYLNYVFSKAELKFSMLEKLLTTMHKALIKAMDLAMGQEILVYSPIVSMTKIQKTPLPERKALPIRWITWMTYLEDPRIQFHYDKTLPELKHIPDVYTSSQSPVKHPSQYEGVFYTDGSAIKSPDPTKSNNAGMGIVHATYKPEYQVLNQWSIPLGNHTAQMAEIAAVEFACKKALKIPGPVLVITDSFYVAESANKELPYWKSNGFVNNKKKPLKHISKWKSIAECLSMKPDITIQHEKGISLQIPVFILKGNALADKLATQGSYVVNAGKRTADGSEFEKRTADGSEFESPKKKAKVE

SEQ ID NO: 1308 - protein, 2086 aa, synthetic construct
  source 1..2086: note = Description of Artificial Sequence: Synthetic polypeptide
MPAAKRVKLDGGDKKYSIGLDIGTNSVGWAVITDEYKVPSKKFKVLGNTDRHSIKKNLIGALLFDSGETAEATRLKRTARRRYTRRKNRICYLQEIFSNEMAKVDDSFFHRLEESFLVEEDKKHERHPIFGNIVDEVAYHEKYPTIYHLRKKLVDSTDKADLRLIYLALAHMIKFRGHFLIEGDLNPDNSDVDKLFIQLVQTYNQLFEENPINASGVDAKAILSARLSKSRRLENLIAQLPGEKKNGLFGNLIALSLGLTPNFKSNFDLAEDAKLQLSKDTYDDDLDNLLAQIGDQYADLFLAAKNLSDAILLSDILRVNTEITKAPLSASMIKRYDEHHQDLTLLKALVRQQLPEKYKEIFFDQSKNGYAGYIDGGASQEEFYKFIKPILEKMDGTEELLVKLNREDLLRKQRTFDNGSIPHQIHLGELHAILRRQEDFYPFLKDNREKIEKILTFRIPYYVGPLARGNSRFAWMTRKSEETITPWNFEEVVDKGASAQSFIERMTNFDKNLPNEKVLPKHSLLYEYFTVYNELTKVKYVTEGMRKPAFLSGEQKKAIVDLLFKTNRKVTVKQLKEDYFKKIECFDSVEISGVEDRFNASLGTYHDLLKIIKDKDFLDNEENEDILEDIVLTLTLFEDREMIEERLKTYAHLFDDKVMKQLKRRRYTGWGRLSRKLINGIRDKQSGKTILDFLKSDGFANRNFMQLIHDDSLTFKEDIQKAQVSGQGDSLHEHIANLAGSPAIKKGILQTVKVVDELVKVMGRHKPENIVIEMARENQTTQKGQKNSRERMKRIEEGIKELGSQILKEHPVENTQLQNEKLYLYYLQNGRDMYVDQELDINRLSDYDVDHIVPQSFLKDDSIDNKVLTRSDKARGKSDNVPSEEVVKKMKNYWRQLLNAKLITQRKFDNLTKAERGGLSELDKAGFIKRQLVETRQITKHVAQILDSRMNTKYDENDKLIREVKVITLKSKLVSDFRKDFQFYKVREINNYHHAHDAYLNAVVGTALIKKYPKLESEFVYGDYKVYDVRKMIAKSEQEIGKATAKYFFYSNIMNFFKTEITLANGEIRKRPLIETNGETGEIVWDKGRDFATVRKVLSMPQVNIVKKTEVQTGGFSKESILPKRNSDKLIARKKDWDPKKYGGFDSPTVAYSVLVVAKVEKGKSKKLKSVKELLGITIMERSSFEKNPIDFLEAKGYKEVKKDLIIKLPKYSLFELENGRKRMLASAGELQKGNELALPSKYVNFLYLASHYEKLKGSPEDNEQKQLFVEQHKHYLDEIIEQISEFSKRVILADANLDKVLSAYNKHRDKPIREQAENIIHLFTLTNLGAPAAFKYFDTTIDRKRYTSTKEVLDATLIHQSITGLYETRIDLSQLGGDGGEAAAKEAAAKGGVPWLTQQPLQLTILVPLQEYQEKILSKTALPEDQKQQLKTLFVKYDNLWQHWENQVGHRKIRPHNIATGDYPPRPQKQYPINPKAKPSIQIVIDDLLKQGVLTPQNSTMNTPVYPVPKPDGRWRMVLDYREVNKTIPLTAAQNQHSAGILATIVRQKYKTTLDLANGFWAHPITPESYWLTAFTWQGKQYCWTRLPQGFLNSPALFNADVVDLLKEIPNVQVYVDDIYLSHDDPKEHVQQLEKVFQILLQAGYVVSLKKSEIGQKTVEFLGFNITKEGRGLTDTFKTKLLNITPPKDLKQLQSILGLLNFARNFIPNFAELVQPLYNLIAPAKGKYIEWSEENTKQLNMVIEALNTASNLEERLPEQRLVIKVNTSPSAGYVRYYNETGKKPIMYLNYVFSKAELKFSMLEKLLTTMHKALIKAMDLAMGQEILVYSPIVSMTKIQKTPLPERKALPIRWITWMTYLEDPRIQFHYDKTLPELKHIPDVYTSSQSPVKHPSQYEGVFYTDGSAIKSPDPTKSNNAGMGIVHATYKPEYQVLNQWSIPLGNHTAQMAEIAAVEFACKKALKIPGPVLVITDSFYVAESANKELPYWKSNGFVNNKKKPLKHISKWKSIAECLSMKPDITIQHEKGISLQIPVFILKGNALADKLATQGSYVVNAGKRTADGSEFEKRTADGSEFESPKKKAKVE

SEQ ID NO: 1309 - protein, 2087 aa, synthetic construct
  source 1..2087: note = Description of Artificial Sequence: Synthetic polypeptide
MPAAKRVKLDGGDKKYSIGLDIGTNSVGWAVITDEYKVPSKKFKVLGNTDRHSIKKNLIGALLFDSGETAEATRLKRTARRRYTRRKNRICYLQEIFSNEMAKVDDSFFHRLEESFLVEEDKKHERHPIFGNIVDEVAYHEKYPTIYHLRKKLVDSTDKADLRLIYLALAHMIKFRGHFLIEGDLNPDNSDVDKLFIQLVQTYNQLFEENPINASGVDAKAILSARLSKSRRLENLIAQLPGEKKNGLFGNLIALSLGLTPNFKSNFDLAEDAKLQLSKDTYDDDLDNLLAQIGDQYADLFLAAKNLSDAILLSDILRVNTEITKAPLSASMIKRYDEHHQDLTLLKALVRQQLPEKYKEIFFDQSKNGYAGYIDGGASQEEFYKFIKPILEKMDGTEELLVKLNREDLLRKQRTFDNGSIPHQIHLGELHAILRRQEDFYPFLKDNREKIEKILTFRIPYYVGPLARGNSRFAWMTRKSEETITPWNFEEVVDKGASAQSFIERMTNFDKNLPNEKVLPKHSLLYEYFTVYNELTKVKYVTEGMRKPAFLSGEQKKAIVDLLFKTNRKVTVKQLKEDYFKKIECFDSVEISGVEDRFNASLGTYHDLLKIIKDKDFLDNEENEDILEDIVLTLTLFEDREMIEERLKTYAHLFDDKVMKQLKRRRYTGWGRLSRKLINGIRDKQSGKTILDFLKSDGFANRNFMQLIHDDSLTFKEDIQKAQVSGQGDSLHEHIANLAGSPAIKKGILQTVKVVDELVKVMGRHKPENIVIEMARENQTTQKGQKNSRERMKRIEEGIKELGSQILKEHPVENTQLQNEKLYLYYLQNGRDMYVDQELDINRLSDYDVDHIVPQSFLKDDSIDNKVLTRSDKARGKSDNVPSEEVVKKMKNYWRQLLNAKLITQRKFDNLTKAERGGLSELDKAGFIKRQLVETRQITKHVAQILDSRMNTKYDENDKLIREVKVITLKSKLVSDFRKDFQFYKVREINNYHHAHDAYLNAVVGTALIKKYPKLESEFVYGDYKVYDVRKMIAKSEQEIGKATAKYFFYSNIMNFFKTEITLANGEIRKRPLIETNGETGEIVWDKGRDFATVRKVLSMPQVNIVKKTEVQTGGFSKESILPKRNSDKLIARKKDWDPKKYGGFDSPTVAYSVLVVAKVEKGKSKKLKSVKELLGITIMERSSFEKNPIDFLEAKGYKEVKKDLIIKLPKYSLFELENGRKRMLASAGELQKGNELALPSKYVNFLYLASHYEKLKGSPEDNEQKQLFVEQHKHYLDEIIEQISEFSKRVILADANLDKVLSAYNKHRDKPIREQAENIIHLFTLTNLGAPAAFKYFDTTIDRKRYTSTKEVLDATLIHQSITGLYETRIDLSQLGGDGGGGGEAAAKPAPGGVPWLTQQPLQLTILVPLQEYQEKILSKTALPEDQKQQLKTLFVKYDNLWQHWENQVGHRKIRPHNIATGDYPPRPQKQYPINPKAKPSIQIVIDDLLKQGVLTPQNSTMNTPVYPVPKPDGRWRMVLDYREVNKTIPLTAAQNQHSAGILATIVRQKYKTTLDLANGFWAHPITPESYWLTAFTWQGKQYCWTRLPQGFLNSPALFNADVVDLLKEIPNVQVYVDDIYLSHDDPKEHVQQLEKVFQILLQAGYVVSLKKSEIGQKTVEFLGFNITKEGRGLTDTFKTKLLNITPPKDLKQLQSILGLLNFARNFIPNFAELVQPLYNLIAPAKGKYIEWSEENTKQLNMVIEALNTASNLEERLPEQRLVIKVNTSPSAGYVRYYNETGKKPIMYLNYVFSKAELKFSMLEKLLTTMHKALIKAMDLAMGQEILVYSPIVSMTKIQKTPLPERKALPIRWITWMTYLEDPRIQFHYDKTLPELKHIPDVYTSSQSPVKHPSQYEGVFYTDGSAIKSPDPTKSNNAGMGIVHATYKPEYQVLNQWSIPLGNHTAQMAEIAAVEFACKKALKIPGPVLVITDSFYVAESANKELPYWKSNGFVNNKKKPLKHISKWKSIAECLSMKPDITIQHEKGISLQIPVFILKGNALADKLATQGSYVVNAGKRTADGSEFEKRTADGSEFESPKKKAKVE

SEQ ID NO: 1310 - protein, 2085 aa, synthetic construct
  source 1..2085: note = Description of Artificial Sequence: Synthetic polypeptide
MPAAKRVKLDGGDKKYSIGLDIGTNSVGWAVITDEYKVPSKKFKVLGNTDRHSIKKNLIGALLFDSGETAEATRLKRTARRRYTRRKNRICYLQEIFSNEMAKVDDSFFHRLEESFLVEEDKKHERHPIFGNIVDEVAYHEKYPTIYHLRKKLVDSTDKADLRLIYLALAHMIKFRGHFLIEGDLNPDNSDVDKLFIQLVQTYNQLFEENPINASGVDAKAILSARLSKSRRLENLIAQLPGEKKNGLFGNLIALSLGLTPNFKSNFDLAEDAKLQLSKDTYDDDLDNLLAQIGDQYADLFLAAKNLSDAILLSDILRVNTEITKAPLSASMIKRYDEHHQDLTLLKALVRQQLPEKYKEIFFDQSKNGYAGYIDGGASQEEFYKFIKPILEKMDGTEELLVKLNREDLLRKQRTFDNGSIPHQIHLGELHAILRRQEDFYPFLKDNREKIEKILTFRIPYYVGPLARGNSRFAWMTRKSEETITPWNFEEVVDKGASAQSFIERMTNFDKNLPNEKVLPKHSLLYEYFTVYNELTKVKYVTEGMRKPAFLSGEQKKAIVDLLFKTNRKVTVKQLKEDYFKKIECFDSVEISGVEDRFNASLGTYHDLLKIIKDKDFLDNEENEDILEDIVLTLTLFEDREMIEERLKTYAHLFDDKVMKQLKRRRYTGWGRLSRKLINGIRDKQSGKTILDFLKSDGFANRNFMQLIHDDSLTFKEDIQKAQVSGQGDSLHEHIANLAGSPAIKKGILQTVKVVDELVKVMGRHKPENIVIEMARENQTTQKGQKNSRERMKRIEEGIKELGSQILKEHPVENTQLQNEKLYLYYLQNGRDMYVDQELDINRLSDYDVDHIVPQSFLKDDSIDNKVLTRSDKARGKSDNVPSEEVVKKMKNYWRQLLNAKLITQRKFDNLTKAERGGLSELDKAGFIKRQLVETRQITKHVAQILDSRMNTKYDENDKLIREVKVITLKSKLVSDFRKDFQFYKVREINNYHHAHDAYLNAVVGTALIKKYPKLESEFVYGDYKVYDVRKMIAKSEQEIGKATAKYFFYSNIMNFFKTEITLANGEIRKRPLIETNGETGEIVWDKGRDFATVRKVLSMPQVNIVKKTEVQTGGFSKESILPKRNSDKLIARKKDWDPKKYGGFDSPTVAYSVLVVAKVEKGKSKKLKSVKELLGITIMERSSFEKNPIDFLEAKGYKEVKKDLIIKLPKYSLFELENGRKRMLASAGELQKGNELALPSKYVNFLYLASHYEKLKGSPEDNEQKQLFVEQHKHYLDEIIEQISEFSKRVILADANLDKVLSAYNKHRDKPIREQAENIIHLFTLTNLGAPAAFKYFDTTIDRKRYTSTKEVLDATLIHQSITGLYETRIDLSQLGGDGGGGSGGGPAPGGVPWLTQQPLQLTILVPLQEYQEKILSKTALPEDQKQQLKTLFVKYDNLWQHWENQVGHRKIRPHNIATGDYPPRPQKQYPINPKAKPSIQIVIDDLLKQGVLTPQNSTMNTPVYPVPKPDGRWRMVLDYREVNKTIPLTAAQNQHSAGILATIVRQKYKTTLDLANGFWAHPITPESYWLTAFTWQGKQYCWTRLPQGFLNSPALFNADVVDLLKEIPNVQVYVDDIYLSHDDPKEHVQQLEKVFQILLQAGYVVSLKKSEIGQKTVEFLGFNITKEGRGLTDTFKTKLLNITPPKDLKQLQSILGLLNFARNFIPNFAELVQPLYNLIAPAKGKYIEWSEENTKQLNMVIEALNTASNLEERLPEQRLVIKVNTSPSAGYVRYYNETGKKPIMYLNYVFSKAELKFSMLEKLLTTMHKALIKAMDLAMGQEILVYSPIVSMTKIQKTPLPERKALPIRWITWMTYLEDPRIQFHYDKTLPELKHIPDVYTSSQSPVKHPSQYEGVFYTDGSAIKSPDPTKSNNAGMGIVHATYKPEYQVLNQWSIPLGNHTAQMAEIAAVEFACKKALKIPGPVLVITDSFYVAESANKELPYWKSNGFVNNKKKPLKHISKWKSIAECLSMKPDITIQHEKGISLQIPVFILKGNALADKLATQGSYVVNAGKRTADGSEFEKRTADGSEFESPKKKAKVE

SEQ ID NO: 1311 - protein, 2122 aa, synthetic construct
  source 1..2122: note = Description of Artificial Sequence: Synthetic polypeptide
MPAAKRVKLDGGDKKYSIGLDIGTNSVGWAVITDEYKVPSKKFKVLGNTDRHSIKKNLIGALLFDSGETAEATRLKRTARRRYTRRKNRICYLQEIFSNEMAKVDDSFFHRLEESFLVEEDKKHERHPIFGNIVDEVAYHEKYPTIYHLRKKLVDSTDKADLRLIYLALAHMIKFRGHFLIEGDLNPDNSDVDKLFIQLVQTYNQLFEENPINASGVDAKAILSARLSKSRRLENLIAQLPGEKKNGLFGNLIALSLGLTPNFKSNFDLAEDAKLQLSKDTYDDDLDNLLAQIGDQYADLFLAAKNLSDAILLSDILRVNTEITKAPLSASMIKRYDEHHQDLTLLKALVRQQLPEKYKEIFFDQSKNGYAGYIDGGASQEEFYKFIKPILEKMDGTEELLVKLNREDLLRKQRTFDNGSIPHQIHLGELHAILRRQEDFYPFLKDNREKIEKILTFRIPYYVGPLARGNSRFAWMTRKSEETITPWNFEEVVDKGASAQSFIERMTNFDKNLPNEKVLPKHSLLYEYFTVYNELTKVKYVTEGMRKPAFLSGEQKKAIVDLLFKTNRKVTVKQLKEDYFKKIECFDSVEISGVEDRFNASLGTYHDLLKIIKDKDFLDNEENEDILEDIVLTLTLFEDREMIEERLKTYAHLFDDKVMKQLKRRRYTGWGRLSRKLINGIRDKQSGKTILDFLKSDGFANRNFMQLIHDDSLTFKEDIQKAQVSGQGDSLHEHIANLAGSPAIKKGILQTVKVVDELVKVMGRHKPENIVIEMARENQTTQKGQKNSRERMKRIEEGIKELGSQILKEHPVENTQLQNEKLYLYYLQNGRDMYVDQELDINRLSDYDVDHIVPQSFLKDDSIDNKVLTRSDKARGKSDNVPSEEVVKKMKNYWRQLLNAKLITQRKFDNLTKAERGGLSELDKAGFIKRQLVETRQITKHVAQILDSRMNTKYDENDKLIREVKVITLKSKLVSDFRKDFQFYKVREINNYHHAHDAYLNAVVGTALIKKYPKLESEFVYGDYKVYDVRKMIAKSEQEIGKATAKYFFYSNIMNFFKTEITLANGEIRKRPLIETNGETGEIVWDKGRDFATVRKVLSMPQVNIVKKTEVQTGGFSKESILPKRNSDKLIARKKDWDPKKYGGFDSPTVAYSVLVVAKVEKGKSKKLKSVKELLGITIMERSSFEKNPIDFLEAKGYKEVKKDLIIKLPKYSLFELENGRKRMLASAGELQKGNELALPSKYVNFLYLASHYEKLKGSPEDNEQKQLFVEQHKHYLDEIIEQISEFSKRVILADANLDKVLSAYNKHRDKPIREQAENIIHLFTLTNLGAPAAFKYFDTTIDRKRYTSTKEVLDATLIHQSITGLYETRIDLSQLGGDGGAEAAAKEAAAKEAAAKEAAAKALEAEAAAKEAAAKEAAAKEAAAKAGGVPWLTQQPLQLTILVPLQEYQEKILSKTALPEDQKQQLKTLFVKYDNLWQHWENQVGHRKIRPHNIATGDYPPRPQKQYPINPKAKPSIQIVIDDLLKQGVLTPQNSTMNTPVYPVPKPDGRWRMVLDYREVNKTIPLTAAQNQHSAGILATIVRQKYKTTLDLANGFWAHPITPESYWLTAFTWQGKQYCWTRLPQGFLNSPALFNADVVDLLKEIPNVQVYVDDIYLSHDDPKEHVQQLEKVFQILLQAGYVVSLKKSEIGQKTVEFLGFNITKEGRGLTDTFKTKLLNITPPKDLKQLQSILGKLNFARNFIPNFAELVQPLYNLIAPAKGKYIEWSEENTKQLNMVIEALNTASNLEERLPEQRLVIKVNTSPSAGYVRYYNETGKKPIMYLNYVFSKAELKFSMLEKLLTTMHKALIKAMDLAMGQEILVYSPIVSMTKIQKTPLPERKALPIRWITWMTYLEDPRIQFHYDKTLPELKHIPDVYTSSQSPVKHPSQYEGVFYTDGSAIKSPDPTKSNNAGMGIVHATYKPEYQVLNQWSIPLGNHTAQMAEIAAVEFACKKALKIPGPVLVITDSFYVAESANKELPYWKSNGFVNNKKKPLKHISKWKSIAECLSMKPDITIQHEKGISLQIPVFILKGNALADKLATQGSYVVNAGKRTADGSEFEKRTADGSEFESPKKKAKVE

SEQ ID NO: 1312 - protein, 2092 aa, synthetic construct
  source 1..2092: note = Description of Artificial Sequence: Synthetic polypeptide
MPAAKRVKLDGGDKKYSIGLDIGTNSVGWAVITDEYKVPSKKFKVLGNTDRHSIKKNLIGALLFDSGETAEATRLKRTARRRYTRRKNRICYLQEIFSNEMAKVDDSFFHRLEESFLVEEDKKHERHPIFGNIVDEVAYHEKYPTIYHLRKKLVDSTDKADLRLIYLALAHMIKFRGHFLIEGDLNPDNSDVDKLFIQLVQTYNQLFEENPINASGVDAKAILSARLSKSRRLENLIAQLPGEKKNGLFGNLIALSLGLTPNFKSNFDLAEDAKLQLSKDTYDDDLDNLLAQIGDQYADLFLAAKNLSDAILLSDILRVNTEITKAPLSASMIKRYDEHHQDLTLLKALVRQQLPEKYKEIFFDQSKNGYAGYIDGGASQEEFYKFIKPILEKMDGTEELLVKLNREDLLRKQRTFDNGSIPHQIHLGELHAILRRQEDFYPFLKDNREKIEKILTFRIPYYVGPLARGNSRFAWMTRKSEETITPWNFEEVVDKGASAQSFIERMTNFDKNLPNEKVLPKHSLLYEYFTVYNELTKVKYVTEGMRKPAFLSGEQKKAIVDLLFKTNRKVTVKQLKEDYFKKIECFDSVEISGVEDRFNASLGTYHDLLKIIKDKDFLDNEENEDILEDIVLTLTLFEDREMIEERLKTYAHLFDDKVMKQLKRRRYTGWGRLSRKLINGIRDKQSGKTILDFLKSDGFANRNFMQLIHDDSLTFKEDIQKAQVSGQGDSLHEHIANLAGSPAIKKGILQTVKVVDELVKVMGRHKPENIVIEMARENQTTQKGQKNSRERMKRIEEGIKELGSQILKEHPVENTQLQNEKLYLYYLQNGRDMYVDQELDINRLSDYDVDHIVPQSFLKDDSIDNKVLTRSDKARGKSDNVPSEEVVKKMKNYWRQLLNAKLITQRKFDNLTKAERGGLSELDKAGFIKRQLVETRQITKHVAQILDSRMNTKYDENDKLIREVKVITLKSKLVSDFRKDFQFYKVREINNYHHAHDAYLNAVVGTALIKKYPKLESEFVYGDYKVYDVRKMIAKSEQEIGKATAKYFFYSNIMNFFKTEITLANGEIRKRPLIETNGETGEIVWDKGRDFATVRKVLSMPQVNIVKKTEVQTGGFSKESILPKRNSDKLIARKKDWDPKKYGGFDSPTVAYSVLVVAKVEKGKSKKLKSVKELLGITIMERSSFEKNPIDFLEAKGYKEVKKDLIIKLPKYSLFELENGRKRMLASAGELQKGNELALPSKYVNFLYLASHYEKLKGSPEDNEQKQLFVEQHKHYLDEIIEQISEFSKRVILADANLDKVLSAYNKHRDKPIREQAENIIHLFTLTNLGAPAAFKYFDTTIDRKRYTSTKEVLDATLIHQSITGLYETRIDLSQLGGDGGSGSETPGTSESATPESGGVPWLTQQPLQLTILVPLQEYQEKILSKTALPEDQKQQLKTLFVKYDNLWQHWENQVGHRKIRPHNIATGDYPPRPQKQYPINPKAKPSIQIVIDDLLKQGVLTPQNSTMNTPVYPVPKPDGRWRMVLDYREVNKTIPLTAAQNQHSAGILATIVRQKYKTTLDLANGFWAHPITPESYWLTAFTWQGKQYCWTRLPQGFLNSPALFNADVVDLLKEIPNVQVYVDDIYLSHDDPKEHVQQLEKVFQILLQAGYVVSLKKSEIGQKTVEFLGFNITKEGRGLTDTFKTKLLNITPPKDLKQLQSILGKLNFARNFIPNFAELVQPLYNLIAPAKGKYIEWSEENTKQLNMVIEALNTASNLEERLPEQRLVIKVNTSPSAGYVRYYNETGKKPIMYLNYVFSKAELKFSMLEKLLTTMHKALIKAMDLAMGQEILVYSPIVSMTKIQKTPLPERKALPIRWITWMTYLEDPRIQFHYDKTLPELKHIPDVYTSSQSPVKHPSQYEGVFYTDGSAIKSPDPTKSNNAGMGIVHATYKPEYQVLNQWSIPLGNHTAQMAEIAAVEFACKKALKIPGPVLVITDSFYVAESANKELPYWKSNGFVNNKKKPLKHISKWKSIAECLSMKPDITIQHEKGISLQIPVFILKGNALADKLATQGSYVVNAGKRTADGSEFEKRTADGSEFESPKKKAKVE

SEQ ID NO: 1313 - protein, 2096 aa, synthetic construct
  source 1..2096: note = Description of Artificial Sequence: Synthetic polypeptide
MPAAKRVKLDGGDKKYSIGLDIGTNSVGWAVITDEYKVPSKKFKVLGNTDRHSIKKNLIGALLFDSGETAEATRLKRTARRRYTRRKNRICYLQEIFSNEMAKVDDSFFHRLEESFLVEEDKKHERHPIFGNIVDEVAYHEKYPTIYHLRKKLVDSTDKADLRLIYLALAHMIKFRGHFLIEGDLNPDNSDVDKLFIQLVQTYNQLFEENPINASGVDAKAILSARLSKSRRLENLIAQLPGEKKNGLFGNLIALSLGLTPNFKSNFDLAEDAKLQLSKDTYDDDLDNLLAQIGDQYADLFLAAKNLSDAILLSDILRVNTEITKAPLSASMIKRYDEHHQDLTLLKALVRQQLPEKYKEIFFDQSKNGYAGYIDGGASQEEFYKFIKPILEKMDGTEELLVKLNREDLLRKQRTFDNGSIPHQIHLGELHAILRRQEDFYPFLKDNREKIEKILTFRIPYYVGPLARGNSRFAWMTRKSEETITPWNFEEVVDKGASAQSFIERMTNFDKNLPNEKVLPKHSLLYEYFTVYNELTKVKYVTEGMRKPAFLSGEQKKAIVDLLFKTNRKVTVKQLKEDYFKKIECFDSVEISGVEDRFNASLGTYHDLLKIIKDKDFLDNEENEDILEDIVLTLTLFEDREMIEERLKTYAHLFDDKVMKQLKRRRYTGWGRLSRKLINGIRDKQSGKTILDFLKSDGFANRNFMQLIHDDSLTFKEDIQKAQVSGQGDSLHEHIANLAGSPAIKKGILQTVKVVDELVKVMGRHKPENIVIEMARENQTTQKGQKNSRERMKRIEEGIKELGSQILKEHPVENTQLQNEKLYLYYLQNGRDMYVDQELDINRLSDYDVDHIVPQSFLKDDSIDNKVLTRSDKARGKSDNVPSEEVVKKMKNYWRQLLNAKLITQRKFDNLTKAERGGLSELDKAGFIKRQLVETRQITKHVAQILDSRMNTKYDENDKLIREVKVITLKSKLVSDFRKDFQFYKVREINNYHHAHDAYLNAVVGTALIKKYPKLESEFVYGDYKVYDVRKMIAKSEQEIGKATAKYFFYSNIMNFFKTEITLANGEIRKRPLIETNGETGEIVWDKGRDFATVRKVLSMPQVNIVKKTEVQTGGFSKESILPKRNSDKLIARKKDWDPKKYGGFDSPTVAYSVLVVAKVEKGKSKKLKSVKELLGITIMERSSFEKNPIDFLEAKGYKEVKKDLIIKLPKYSLFELENGRKRMLASAGELQKGNELALPSKYVNFLYLASHYEKLKGSPEDNEQKQLFVEQHKHYLDEIIEQISEFSKRVILADANLDKVLSAYNKHRDKPIREQAENIIHLFTLTNLGAPAAFKYFDTTIDRKRYTSTKEVLDATLIHQSITGLYETRIDLSQLGGDGGEAAAKEAAAKEAAAKEAAAKGGVPWLTQQPLQLTILVPLQEYQEKILSKTALPEDQKQQLKTLFVKYDNLWQHWENQVGHRKIRPHNIATGDYPPRPQKQYPINPKAKPSIQIVIDDLLKQGVLTPQNSTMNTPVYPVPKPDGRWRMVLDYREVNKTIPLTAAQNQHSAGILATIVRQKYKTTLDLANGFWAHPITPESYWLTAFTWQGKQYCWTRLPQGFLNSPALFNADVVDLLKEIPNVQVYVDDIYLSHDDPKEHVQQLEKVFQILLQAGYVVSLKKSEIGQKTVEFLGFNITKEGRGLTDTFKTKLLNITPPKDLKQLQSILGKLNFARNFIPNFAELVQPLYNLIAPAKGKYIEWSEENTKQLNMVIEALNTASNLEERLPEQRLVIKVNTSPSAGYVRYYNETGKKPIMYLNYVFSKAELKFSMLEKLLTTMHKALIKAMDLAMGQEILVYSPIVSMTKIQKTPLPERKALPIRWITWMTYLEDPRIQFHYDKTLPELKHIPDVYTSSQSPVKHPSQYEGVFYTDGSAIKSPDPTKSNNAGMGIVHATYKPEYQVLNQWSIPLGNHTAQMAEIAAVEFACKKALKIPGPVLVITDSFYVAESANKELPYWKSNGFVNNKKKPLKHISKWKSIAECLSMKPDITIQHEKGISLQIPVFILKGNALADKLATQGSYVVNAGKRTADGSEFEKRTADGSEFESPKKKAKVE

SEQ ID NO: 1314 - protein, 2096 aa, synthetic construct
  source 1..2096: note = Description of Artificial Sequence: Synthetic polypeptide
MPAAKRVKLDGGDKKYSIGLDIGTNSVGWAVITDEYKVPSKKFKVLGNTDRHSIKKNLIGALLFDSGETAEATRLKRTARRRYTRRKNRICYLQEIFSNEMAKVDDSFFHRLEESFLVEEDKKHERHPIFGNIVDEVAYHEKYPTIYHLRKKLVDSTDKADLRLIYLALAHMIKFRGHFLIEGDLNPDNSDVDKLFIQLVQTYNQLFEENPINASGVDAKAILSARLSKSRRLENLIAQLPGEKKNGLFGNLIALSLGLTPNFKSNFDLAEDAKLQLSKDTYDDDLDNLLAQIGDQYADLFLAAKNLSDAILLSDILRVNTEITKAPLSASMIKRYDEHHQDLTLLKALVRQQLPEKYKEIFFDQSKNGYAGYIDGGASQEEFYKFIKPILEKMDGTEELLVKLNREDLLRKQRTFDNGSIPHQIHLGELHAILRRQEDFYPFLKDNREKIEKILTFRIPYYVGPLARGNSRFAWMTRKSEETITPWNFEEVVDKGASAQSFIERMTNFDKNLPNEKVLPKHSLLYEYFTVYNELTKVKYVTEGMRKPAFLSGEQKKAIVDLLFKTNRKVTVKQLKEDYFKKIECFDSVEISGVEDRFNASLGTYHDLLKIIKDKDFLDNEENEDILEDIVLTLTLFEDREMIEERLKTYAHLFDDKVMKQLKRRRYTGWGRLSRKLINGIRDKQSGKTILDFLKSDGFANRNFMQLIHDDSLTFKEDIQKAQVSGQGDSLHEHIANLAGSPAIKKGILQTVKVVDELVKVMGRHKPENIVIEMARENQTTQKGQKNSRERMKRIEEGIKELGSQILKEHPVENTQLQNEKLYLYYLQNGRDMYVDQELDINRLSDYDVDHIVPQSFLKDDSIDNKVLTRSDKARGKSDNVPSEEVVKKMKNYWRQLLNAKLITQRKFDNLTKAERGGLSELDKAGFIKRQLVETRQITKHVAQILDSRMNTKYDENDKLIREVKVITLKSKLVSDFRKDFQFYKVREINNYHHAHDAYLNAVVGTALIKKYPKLESEFVYGDYKVYDVRKMIAKSEQEIGKATAKYFFYSNIMNFFKTEITLANGEIRKRPLIETNGETGEIVWDKGRDFATVRKVLSMPQVNIVKKTEVQTGGFSKESILPKRNSDKLIARKKDWDPKKYGGFDSPTVAYSVLVVAKVEKGKSKKLKSVKELLGITIMERSSFEKNPIDFLEAKGYKEVKKDLIIKLPKYSLFELENGRKRMLASAGELQKGNELALPSKYVNFLYLASHYEKLKGSPEDNEQKQLFVEQHKHYLDEIIEQISEFSKRVILADANLDKVLSAYNKHRDKPIREQAENIIHLFTLTNLGAPAAFKYFDTTIDRKRYTSTKEVLDATLIHQSITGLYETRIDLSQLGGDGGGGGGSGGGGSGGGGSGGGGSGGVPWLTQQPLQLTILVPLQEYQEKILSKTALPEDQKQQLKTLFVKYDNLWQHWENQVGHRKIRPHNIATGDYPPRPQKQYPINPKAKPSIQIVIDDLLKQGVLTPQNSTMNTPVYPVPKPDGRWRMVLDYREVNKTIPLTAAQNQHSAGILATIVRQKYKTTLDLANGFWAHPITPESYWLTAFTWQGKQYCWTRLPQGFLNSPALFNADVVDLLKEIPNVQVYVDDIYLSHDDPKEHVQQLEKVFQILLQAGYVVSLKKSEIGQKTVEFLGFNITKEGRGLTDTFKTKLLNITPPKDLKQLQSILGKLNFARNFIPNFAELVQPLYNLIAPAKGKYIEWSEENTKQLNMVIEALNTASNLEERLPEQRLVIKVNTSPSAGYVRYYNETGKKPIMYLNYVFSKAELKFSMLEKLLTTMHKALIKAMDLAMGQEILVYSPIVSMTKIQKTPLPERKALPIRWITWMTYLEDPRIQFHYDKTLPELKHIPDVYTSSQSPVKHPSQYEGVFYTDGSAIKSPDPTKSNNAGMGIVHATYKPEYQVLNQWSIPLGNHTAQMAEIAAVEFACKKALKIPGPVLVITDSFYVAESANKELPYWKSNGFVNNKKKPLKHISKWKSIAECLSMKPDITIQHEKGISLQIPVFILKGNALADKLATQGSYVVNAGKRTADGSEFEKRTADGSEFESPKKKAKVE

SEQ ID NO: 1315 - protein, 2087 aa, synthetic construct
  source 1..2087: note = Description of Artificial Sequence: Synthetic polypeptide
MPAAKRVKLDGGDKKYSIGLDIGTNSVGWAVITDEYKVPSKKFKVLGNTDRHSIKKNLIGALLFDSGETAEATRLKRTARRRYTRRKNRICYLQEIFSNEMAKVDDSFFHRLEESFLVEEDKKHERHPIFGNIVDEVAYHEKYPTIYHLRKKLVDSTDKADLRLIYLALAHMIKFRGHFLIEGDLNPDNSDVDKLFIQLVQTYNQLFEENPINASGVDAKAILSARLSKSRRLENLIAQLPGEKKNGLFGNLIALSLGLTPNFKSNFDLAEDAKLQLSKDTYDDDLDNLLAQIGDQYADLFLAAKNLSDAILLSDILRVNTEITKAPLSASMIKRYDEHHQDLTLLKALVRQQLPEKYKEIFFDQSKNGYAGYIDGGASQEEFYKFIKPILEKMDGTEELLVKLNREDLLRKQRTFDNGSIPHQIHLGELHAILRRQEDFYPFLKDNREKIEKILTFRIPYYVGPLARGNSRFAWMTRKSEETITPWNFEEVVDKGASAQSFIERMTNFDKNLPNEKVLPKHSLLYEYFTVYNELTKVKYVTEGMRKPAFLSGEQKKAIVDLLFKTNRKVTVKQLKEDYFKKIECFDSVEISGVEDRFNASLGTYHDLLKIIKDKDFLDNEENEDILEDIVLTLTLFEDREMIEERLKTYAHLFDDKVMKQLKRRRYTGWGRLSRKLINGIRDKQSGKTILDFLKSDGFANRNFMQLIHDDSLTFKEDIQKAQVSGQGDSLHEHIANLAGSPAIKKGILQTVKVVDELVKVMGRHKPENIVIEMARENQTTQKGQKNSRERMKRIEEGIKELGSQILKEHPVENTQLQNEKLYLYYLQNGRDMYVDQELDINRLSDYDVDHIVPQSFLKDDSIDNKVLTRSDKARGKSDNVPSEEVVKKMKNYWRQLLNAKLITQRKFDNLTKAERGGLSELDKAGFIKRQLVETRQITKHVAQILDSRMNTKYDENDKLIREVKVITLKSKLVSDFRKDFQFYKVREINNYHHAHDAYLNAVVGTALIKKYPKLESEFVYGDYKVYDVRKMIAKSEQEIGKATAKYFFYSNIMNFFKTEITLANGEIRKRPLIETNGETGEIVWDKGRDFATVRKVLSMPQVNIVKKTEVQTGGFSKESILPKRNSDKLIARKKDWDPKKYGGFDSPTVAYSVLVVAKVEKGKSKKLKSVKELLGITIMERSSFEKNPIDFLEAKGYKEVKKDLIIKLPKYSLFELENGRKRMLASAGELQKGNELALPSKYVNFLYLASHYEKLKGSPEDNEQKQLFVEQHKHYLDEIIEQISEFSKRVILADANLDKVLSAYNKHRDKPIREQAENIIHLFTLTNLGAPAAFKYFDTTIDRKRYTSTKEVLDATLIHQSITGLYETRIDLSQLGGDGGGSSPAPEAAAKGGVPWLTQQPLQLTILVPLQEYQEKILSKTALPEDQKQQLKTLFVKYDNLWQHWENQVGHRKIRPHNIATGDYPPRPQKQYPINPKAKPSIQIVIDDLLKQGVLTPQNSTMNTPVYPVPKPDGRWRMVLDYREVNKTIPLTAAQNQHSAGILATIVRQKYKTTLDLANGFWAHPITPESYWLTAFTWQGKQYCWTRLPQGFLNSPALFNADVVDLLKEIPNVQVYVDDIYLSHDDPKEHVQQLEKVFQILLQAGYVVSLKKSEIGQKTVEFLGFNITKEGRGLTDTFKTKLLNITPPKDLKQLQSILGKLNFARNFIPNFAELVQPLYNLIAPAKGKYIEWSEENTKQLNMVIEALNTASNLEERLPEQRLVIKVNTSPSAGYVRYYNETGKKPIMYLNYVFSKAELKFSMLEKLLTTMHKALIKAMDLAMGQEILVYSPIVSMTKIQKTPLPERKALPIRWITWMTYLEDPRIQFHYDKTLPELKHIPDVYTSSQSPVKHPSQYEGVFYTDGSAIKSPDPTKSNNAGMGIVHATYKPEYQVLNQWSIPLGNHTAQMAEIAAVEFACKKALKIPGPVLVITDSFYVAESANKELPYWKSNGFVNNKKKPLKHISKWKSIAECLSMKPDITIQHEKGISLQIPVFILKGNALADKLATQGSYVVNAGKRTADGSEFEKRTADGSEFESPKKKAKVE

SEQ ID NO: 1316 - protein, 2086 aa, synthetic construct
  source 1..2086: note = Description of Artificial Sequence: Synthetic polypeptide
MPAAKRVKLDGGDKKYSIGLDIGTNSVGWAVITDEYKVPSKKFKVLGNTDRHSIKKNLIGALLFDSGETAEATRLKRTARRRYTRRKNRICYLQEIFSNEMAKVDDSFFHRLEESFLVEEDKKHERHPIFGNIVDEVAYHEKYPTIYHLRKKLVDSTDKADLRLIYLALAHMIKFRGHFLIEGDLNPDNSDVDKLFIQLVQTYNQLFEENPINASGVDAKAILSARLSKSRRLENLIAQLPGEKKNGLFGNLIALSLGLTPNFKSNFDLAEDAKLQLSKDTYDDDLDNLLAQIGDQYADLFLAAKNLSDAILLSDILRVNTEITKAPLSASMIKRYDEHHQDLTLLKALVRQQLPEKYKEIFFDQSKNGYAGYIDGGASQEEFYKFIKPILEKMDGTEELLVKLNREDLLRKQRTFDNGSIPHQIHLGELHAILRRQEDFYPFLKDNREKIEKILTFRIPYYVGPLARGNSRFAWMTRKSEETITPWNFEEVVDKGASAQSFIERMTNFDKNLPNEKVLPKHSLLYEYFTVYNELTKVKYVTEGMRKPAFLSGEQKKAIVDLLFKTNRKVTVKQLKEDYFKKIECFDSVEISGVEDRFNASLGTYHDLLKIIKDKDFLDNEENEDILEDIVLTLTLFEDREMIEERLKTYAHLFDDKVMKQLKRRRYTGWGRLSRKLINGIRDKQSGKTILDFLKSDGFANRNFMQLIHDDSLTFKEDIQKAQVSGQGDSLHEHIANLAGSPAIKKGILQTVKVVDELVKVMGRHKPENIVIEMARENQTTQKGQKNSRERMKRIEEGIKELGSQILKEHPVENTQLQNEKLYLYYLQNGRDMYVDQELDINRLSDYDVDHIVPQSFLKDDSIDNKVLTRSDKARGKSDNVPSEEVVKKMKNYWRQLLNAKLITQRKFDNLTKAERGGLSELDKAGFIKRQLVETRQITKHVAQILDSRMNTKYDENDKLIREVKVITLKSKLVSDFRKDFQFYKVREINNYHHAHDAYLNAVVGTALIKKYPKLESEFVYGDYKVYDVRKMIAKSEQEIGKATAKYFFYSNIMNFFKTEITLANGEIRKRPLIETNGETGEIVWDKGRDFATVRKVLSMPQVNIVKKTEVQTGGFSKESILPKRNSDKLIARKKDWDPKKYGGFDSPTVAYSVLVVAKVEKGKSKKLKSVKELLGITIMERSSFEKNPIDFLEAKGYKEVKKDLIIKLPKYSLFELENGRKRMLASAGELQKGNELALPSKYVNFLYLASHYEKLKGSPEDNEQKQLFVEQHKHYLDEIIEQISEFSKRVILADANLDKVLSAYNKHRDKPIREQAENIIHLFTLTNLGAPAAFKYFDTTIDRKRYTSTKEVLDATLIHQSITGLYETRIDLSQLGGDGGGGGGSGGGGSGGVPWLTQQPLQLTILVPLQEYQEKILSKTALPEDQKQQLKTLFVKYDNLWQHWENQVGHRKIRPHNIATGDYPPRPQKQYPINPKAKPSIQIVIDDLLKQGVLTPQNSTMNTPVYPVPKPDGRWRMVLDYREVNKTIPLTAAQNQHSAGILATIVRQKYKTTLDLANGFWAHPITPESYWLTAFTWQGKQYCWTRLPQGFLNSPALFNADVVDLLKEIPNVQVYVDDIYLSHDDPKEHVQQLEKVFQILLQAGYVVSLKKSEIGQKTVEFLGFNITKEGRGLTDTFKTKLLNITPPKDLKQLQSILGKLNFARNFIPNFAELVQPLYNLIAPAKGKYIEWSEENTKQLNMVIEALNTASNLEERLPEQRLVIKVNTSPSAGYVRYYNETGKKPIMYLNYVFSKAELKFSMLEKLLTTMHKALIKAMDLAMGQEILVYSPIVSMTKIQKTPLPERKALPIRWITWMTYLEDPRIQFHYDKTLPELKHIPDVYTSSQSPVKHPSQYEGVFYTDGSAIKSPDPTKSNNAGMGIVHATYKPEYQVLNQWSIPLGNHTAQMAEIAAVEFACKKALKIPGPVLVITDSFYVAESANKELPYWKSNGFVNNKKKPLKHISKWKSIAECLSMKPDITIQHEKGISLQIPVFILKGNALADKLATQGSYVVNAGKRTADGSEFEKRTADGSEFESPKKKAKVE

SEQ ID NO: 1317 - protein, 2087 aa, synthetic construct
  source 1..2087: note = Description of Artificial Sequence: Synthetic polypeptide
MPAAKRVKLDGGDKKYSIGLDIGTNSVGWAVITDEYKVPSKKFKVLGNTDRHSIKKNLIGALLFDSGETAEATRLKRTARRRYTRRKNRICYLQEIFSNEMAKVDDSFFHRLEESFLVEEDKKHERHPIFGNIVDEVAYHEKYPTIYHLRKKLVDSTDKADLRLIYLALAHMIKFRGHFLIEGDLNPDNSDVDKLFIQLVQTYNQLFEENPINASGVDAKAILSARLSKSRRLENLIAQLPGEKKNGLFGNLIALSLGLTPNFKSNFDLAEDAKLQLSKDTYDDDLDNLLAQIGDQYADLFLAAKNLSDAILLSDILRVNTEITKAPLSASMIKRYDEHHQDLTLLKALVRQQLPEKYKEIFFDQSKNGYAGYIDGGASQEEFYKFIKPILEKMDGTEELLVKLNREDLLRKQRTFDNGSIPHQIHLGELHAILRRQEDFYPFLKDNREKIEKILTFRIPYYVGPLARGNSRFAWMTRKSEETITPWNFEEVVDKGASAQSFIERMTNFDKNLPNEKVLPKHSLLYEYFTVYNELTKVKYVTEGMRKPAFLSGEQKKAIVDLLFKTNRKVTVKQLKEDYFKKIECFDSVEISGVEDRFNASLGTYHDLLKIIKDKDFLDNEENEDILEDIVLTLTLFEDREMIEERLKTYAHLFDDKVMKQLKRRRYTGWGRLSRKLINGIRDKQSGKTILDFLKSDGFANRNFMQLIHDDSLTFKEDIQKAQVSGQGDSLHEHIANLAGSPAIKKGILQTVKVVDELVKVMGRHKPENIVIEMARENQTTQKGQKNSRERMKRIEEGIKELGSQILKEHPVENTQLQNEKLYLYYLQNGRDMYVDQELDINRLSDYDVDHIVPQSFLKDDSIDNKVLTRSDKARGKSDNVPSEEVVKKMKNYWRQLLNAKLITQRKFDNLTKAERGGLSELDKAGFIKRQLVETRQITKHVAQILDSRMNTKYDENDKLIREVKVITLKSKLVSDFRKDFQFYKVREINNYHHAHDAYLNAVVGTALIKKYPKLESEFVYGDYKVYDVRKMIAKSEQEIGKATAKYFFYSNIMNFFKTEITLANGEIRKRPLIETNGETGEIVWDKGRDFATVRKVLSMPQVNIVKKTEVQTGGFSKESILPKRNSDKLIARKKDWDPKKYGGFDSPTVAYSVLVVAKVEKGKSKKLKSVKELLGITIMERSSFEKNPIDFLEAKGYKEVKKDLIIKLPKYSLFELENGRKRMLASAGELQKGNELALPSKYVNFLYLASHYEKLKGSPEDNEQKQLFVEQHKHYLDEIIEQISEFSKRVILADANLDKVLSAYNKHRDKPIREQAENIIHLFTLTNLGAPAAFKYFDTTIDRKRYTSTKEVLDATLIHQSITGLYETRIDLSQLGGDGGPAPGSSEAAAKGGVPWLTQQPLQLTILVPLQEYQEKILSKTALPEDQKQQLKTLFVKYDNLWQHWENQVGHRKIRPHNIATGDYPPRPQKQYPINPKAKPSIQIVIDDLLKQGVLTPQNSTMNTPVYPVPKPDGRWRMVLDYREVNKTIPLTAAQNQHSAGILATIVRQKYKTTLDLANGFWAHPITPESYWLTAFTWQGKQYCWTRLPQGFLNSPALFNADVVDLLKEIPNVQVYVDDIYLSHDDPKEHVQQLEKVFQILLQAGYVVSLKKSEIGQKTVEFLGFNITKEGRGLTDTFKTKLLNITPPKDLKQLQSILGKLNFARNFIPNFAELVQPLYNLIAPAKGKYIEWSEENTKQLNMVIEALNTASNLEERLPEQRLVIKVNTSPSAGYVRYYNETGKKPIMYLNYVFSKAELKFSMLEKLLTTMHKALIKAMDLAMGQEILVYSPIVSMTKIQKTPLPERKALPIRWITWMTYLEDPRIQFHYDKTLPELKHIPDVYTSSQSPVKHPSQYEGVFYTDGSAIKSPDPTKSNNAGMGIVHATYKPEYQVLNQWSIPLGNHTAQMAEIAAVEFACKKALKIPGPVLVITDSFYVAESANKELPYWKSNGFVNNKKKPLKHISKWKSIAECLSMKPDITIQHEKGISLQIPVFILKGNALADKLATQGSYVVNAGKRTADGSEFEKRTADGSEFESPKKKAKVE

SEQ ID NO: 1318 - protein, 2087 aa, synthetic construct
  source 1..2087: note = Description of Artificial Sequence: Synthetic polypeptide
MPAAKRVKLDGGDKKYSIGLDIGTNSVGWAVITDEYKVPSKKFKVLGNTDRHSIKKNLIGALLFDSGETAEATRLKRTARRRYTRRKNRICYLQEIFSNEMAKVDDSFFHRLEESFLVEEDKKHERHPIFGNIVDEVAYHEKYPTIYHLRKKLVDSTDKADLRLIYLALAHMIKFRGHFLIEGDLNPDNSDVDKLFIQLVQTYNQLFEENPINASGVDAKAILSARLSKSRRLENLIAQLPGEKKNGLFGNLIALSLGLTPNFKSNFDLAEDAKLQLSKDTYDDDLDNLLAQIGDQYADLFLAAKNLSDAILLSDILRVNTEITKAPLSASMIKRYDEHHQDLTLLKALVRQQLPEKYKEIFFDQSKNGYAGYIDGGASQEEFYKFIKPILEKMDGTEELLVKLNREDLLRKQRTFDNGSIPHQIHLGELHAILRRQEDFYPFLKDNREKIEKILTFRIPYYVGPLARGNSRFAWMTRKSEETITPWNFEEVVDKGASAQSFIERMTNFDKNLPNEKVLPKHSLLYEYFTVYNELTKVKYVTEGMRKPAFLSGEQKKAIVDLLFKTNRKVTVKQLKEDYFKKIECFDSVEISGVEDRFNASLGTYHDLLKIIKDKDFLDNEENEDILEDIVLTLTLFEDREMIEERLKTYAHLFDDKVMKQLKRRRYTGWGRLSRKLINGIRDKQSGKTILDFLKSDGFANRNFMQLIHDDSLTFKEDIQKAQVSGQGDSLHEHIANLAGSPAIKKGILQTVKVVDELVKVMGRHKPENIVIEMARENQTTQKGQKNSRERMKRIEEGIKELGSQILKEHPVENTQLQNEKLYLYYLQNGRDMYVDQELDINRLSDYDVDHIVPQSFLKDDSIDNKVLTRSDKARGKSDNVPSEEVVKKMKNYWRQLLNAKLITQRKFDNLTKAERGGLSELDKAGFIKRQLVETRQITKHVAQILDSRMNTKYDENDKLIREVKVITLKSKLVSDFRKDFQFYKVREINNYHHAHDAYLNAVVGTALIKKYPKLESEFVYGDYKVYDVRKMIAKSEQEIGKATAKYFFYSNIMNFFKTEITLANGEIRKRPLIETNGETGEIVWDKGRDFATVRKVLSMPQVNIVKKTEVQTGGFSKESILPKRNSDKLIARKKDWDPKKYGGFDSPTVAYSVLVVAKVEKGKSKKLKSVKELLGITIMERSSFEKNPIDFLEAKGYKEVKKDLIIKLPKYSLFELENGRKRMLASAGELQKGNELALPSKYVNFLYLASHYEKLKGSPEDNEQKQLFVEQHKHYLDEIIEQISEFSKRVILADANLDKVLSAYNKHRDKPIREQAENIIHLFTLTNLGAPAAFKYFDTTIDRKRYTSTKEVLDATLIHQSITGLYETRIDLSQLGGDGGPAPAPAPAPAPGGVPWLTQQPLQLTILVPLQEYQEKILSKTALPEDQKQQLKTLFVKYDNLWQHWENQVGHRKIRPHNIATGDYPPRPQKQYPINPKAKPSIQIVIDDLLKQGVLTPQNSTMNTPVYPVPKPDGRWRMVLDYREVNKTIPLTAAQNQHSAGILATIVRQKYKTTLDLANGFWAHPITPESYWLTAFTWQGKQYCWTRLPQGFLNSPALFNADVVDLLKEIPNVQVYVDDIYLSHDDPKEHVQQLEKVFQILLQAGYVVSLKKSEIGQKTVEFLGFNITKEGRGLTDTFKTKLLNITPPKDLKQLQSILGKLNFARNFIPNFAELVQPLYNLIAPAKGKYIEWSEENTKQLNMVIEALNTASNLEERLPEQRLVIKVNTSPSAGYVRYYNETGKKPIMYLNYVFSKAELKFSMLEKLLTTMHKALIKAMDLAMGQEILVYSPIVSMTKIQKTPLPERKALPIRWITWMTYLEDPRIQFHYDKTLPELKHIPDVYTSSQSPVKHPSQYEGVFYTDGSAIKSPDPTKSNNAGMGIVHATYKPEYQVLNQWSIPLGNHTAQMAEIAAVEFACKKALKIPGPVLVITDSFYVAESANKELPYWKSNGFVNNKKKPLKHISKWKSIAECLSMKPDITIQHEKGISLQIPVFILKGNALADKLATQGSYVVNAGKRTADGSEFEKRTADGSEFESPKKKAKVE

SEQ ID NO: 1319 - protein, 2085 aa, synthetic construct
  source 1..2085: note = Description of Artificial Sequence: Synthetic polypeptide
MPAAKRVKLDGGDKKYSIGLDIGTNSVGWAVITDEYKVPSKKFKVLGNTDRHSIKKNLIGALLFDSGETAEATRLKRTARRRYTRRKNRICYLQEIFSNEMAKVDDSFFHRLEESFLVEEDKKHERHPIFGNIVDEVAYHEKYPTIYHLRKKLVDSTDKADLRLIYLALAHMIKFRGHFLIEGDLNPDNSDVDKLFIQLVQTYNQLFEENPINASGVDAKAILSARLSKSRRLENLIAQLPGEKKNGLFGNLIALSLGLTPNFKSNFDLAEDAKLQLSKDTYDDDLDNLLAQIGDQYADLFLAAKNLSDAILLSDILRVNTEITKAPLSASMIKRYDEHHQDLTLLKALVRQQLPEKYKEIFFDQSKNGYAGYIDGGASQEEFYKFIKPILEKMDGTEELLVKLNREDLLRKQRTFDNGSIPHQIHLGELHAILRRQEDFYPFLKDNREKIEKILTFRIPYYVGPLARGNSRFAWMTRKSEETITPWNFEEVVDKGASAQSFIERMTNFDKNLPNEKVLPKHSLLYEYFTVYNELTKVKYVTEGMRKPAFLSGEQKKAIVDLLFKTNRKVTVKQLKEDYFKKIECFDSVEISGVEDRFNASLGTYHDLLKIIKDKDFLDNEENEDILEDIVLTLTLFEDREMIEERLKTYAHLFDDKVMKQLKRRRYTGWGRLSRKLINGIRDKQSGKTILDFLKSDGFANRNFMQLIHDDSLTFKEDIQKAQVSGQGDSLHEHIANLAGSPAIKKGILQTVKVVDELVKVMGRHKPENIVIEMARENQTTQKGQKNSRERMKRIEEGIKELGSQILKEHPVENTQLQNEKLYLYYLQNGRDMYVDQELDINRLSDYDVDHIVPQSFLKDDSIDNKVLTRSDKARGKSDNVPSEEVVKKMKNYWRQLLNAKLITQRKFDNLTKAERGGLSELDKAGFIKRQLVETRQITKHVAQILDSRMNTKYDENDKLIREVKVITLKSKLVSDFRKDFQFYKVREINNYHHAHDAYLNAVVGTALIKKYPKLESEFVYGDYKVYDVRKMIAKSEQEIGKATAKYFFYSNIMNFFKTEITLANGEIRKRPLIETNGETGEIVWDKGRDFATVRKVLSMPQVNIVKKTEVQTGGFSKESILPKRNSDKLIARKKDWDPKKYGGFDSPTVAYSVLVVAKVEKGKSKKLKSVKELLGITIMERSSFEKNPIDFLEAKGYKEVKKDLIIKLPKYSLFELENGRKRMLASAGELQKGNELALPSKYVNFLYLASHYEKLKGSPEDNEQKQLFVEQHKHYLDEIIEQISEFSKRVILADANLDKVLSAYNKHRDKPIREQAENIIHLFTLTNLGAPAAFKYFDTTIDRKRYTSTKEVLDATLIHQSITGLYETRIDLSQLGGDGGPAPGSSGGGGGVPWLTQQPLQLTILVPLQEYQEKILSKTALPEDQKQQLKTLFVKYDNLWQHWENQVGHRKIRPHNIATGDYPPRPQKQYPINPKAKPSIQIVIDDLLKQGVLTPQNSTMNTPVYPVPKPDGRWRMVLDYREVNKTIPLTAAQNQHSAGILATIVRQKYKTTLDLANGFWAHPITPESYWLTAFTWQGKQYCWTRLPQGFLNSPALFNADVVDLLKEIPNVQVYVDDIYLSHDDPKEHVQQLEKVFQILLQAGYVVSLKKSEIGQKTVEFLGFNITKEGRGLTDTFKTKLLNITPPKDLKQLQSILGKLNFARNFIPNFAELVQPLYNLIAPAKGKYIEWSEENTKQLNMVIEALNTASNLEERLPEQRLVIKVNTSPSAGYVRYYNETGKKPIMYLNYVFSKAELKFSMLEKLLTTMHKALIKAMDLAMGQEILVYSPIVSMTKIQKTPLPERKALPIRWITWMTYLEDPRIQFHYDKTLPELKHIPDVYTSSQSPVKHPSQYEGVFYTDGSAIKSPDPTKSNNAGMGIVHATYKPEYQVLNQWSIPLGNHTAQMAEIAAVEFACKKALKIPGPVLVITDSFYVAESANKELPYWKSNGFVNNKKKPLKHISKWKSIAECLSMKPDITIQHEKGISLQIPVFILKGNALADKLATQGSYVVNAGKRTADGSEFEKRTADGSEFESPKKKAKVE

SEQ ID NO: 1320 - protein, 2176 aa, synthetic construct
  source 1..2176: note = Description of Artificial Sequence: Synthetic polypeptide
MPAAKRVKLDGGDKKYSIGLDIGTNSVGWAVITDEYKVPSKKFKVLGNTDRHSIKKNLIGALLFDSGETAEATRLKRTARRRYTRRKNRICYLQEIFSNEMAKVDDSFFHRLEESFLVEEDKKHERHPIFGNIVDEVAYHEKYPTIYHLRKKLVDSTDKADLRLIYLALAHMIKFRGHFLIEGDLNPDNSDVDKLFIQLVQTYNQLFEENPINASGVDAKAILSARLSKSRRLENLIAQLPGEKKNGLFGNLIALSLGLTPNFKSNFDLAEDAKLQLSKDTYDDDLDNLLAQIGDQYADLFLAAKNLSDAILLSDILRVNTEITKAPLSASMIKRYDEHHQDLTLLKALVRQQLPEKYKEIFFDQSKNGYAGYIDGGASQEEFYKFIKPILEKMDGTEELLVKLNREDLLRKQRTFDNGSIPHQIHLGELHAILRRQEDFYPFLKDNREKIEKILTFRIPYYVGPLARGNSRFAWMTRKSEETITPWNFEEVVDKGASAQSFIERMTNFDKNLPNEKVLPKHSLLYEYFTVYNELTKVKYVTEGMRKPAFLSGEQKKAIVDLLFKTNRKVTVKQLKEDYFKKIECFDSVEISGVEDRFNASLGTYHDLLKIIKDKDFLDNEENEDILEDIVLTLTLFEDREMIEERLKTYAHLFDDKVMKQLKRRRYTGWGRLSRKLINGIRDKQSGKTILDFLKSDGFANRNFMQLIHDDSLTFKEDIQKAQVSGQGDSLHEHIANLAGSPAIKKGILQTVKVVDELVKVMGRHKPENIVIEMARENQTTQKGQKNSRERMKRIEEGIKELGSQILKEHPVENTQLQNEKLYLYYLQNGRDMYVDQELDINRLSDYDVDHIVPQSFLKDDSIDNKVLTRSDKARGKSDNVPSEEVVKKMKNYWRQLLNAKLITQRKFDNLTKAERGGLSELDKAGFIKRQLVETRQITKHVAQILDSRMNTKYDENDKLIREVKVITLKSKLVSDFRKDFQFYKVREINNYHHAHDAYLNAVVGTALIKKYPKLESEFVYGDYKVYDVRKMIAKSEQEIGKATAKYFFYSNIMNFFKTEITLANGEIRKRPLIETNGETGEIVWDKGRDFATVRKVLSMPQVNIVKKTEVQTGGFSKESILPKRNSDKLIARKKDWDPKKYGGFDSPTVAYSVLVVAKVEKGKSKKLKSVKELLGITIMERSSFEKNPIDFLEAKGYKEVKKDLIIKLPKYSLFELENGRKRMLASAGELQKGNELALPSKYVNFLYLASHYEKLKGSPEDNEQKQLFVEQHKHYLDEIIEQISEFSKRVILADANLDKVLSAYNKHRDKPIREQAENIIHLFTLTNLGAPAAFKYFDTTIDRKRYTSTKEVLDATLIHQSITGLYETRIDLSQLGGDGGEAAAKPAPGSSGGMNPLQLLQPLPAEIKGTKLLAHWNSGATITCIPESFLEDEQPIKKTLIKTIHGEKQQNVYYVTFKVKGRKVEAEVIASPYEYILLSPTDVPWLTQQPLQLTILVPLQEYQEKILSKTALPEDQKQQLKTLFVKYDNLWQHWENQVGHRKIRPHNIATGDYPPRPQKQYPINPKAKPSIQIVIDDLLKQGVLTPQNSTMNTPVYPVPKPDGRWRMVLDYREVNKTIPLTAAQNQHSAGILATIVRQKYKTTLDLANGFWAHPITPESYWLTAFTWQGKQYCWTRLPQGFLNSPALFNADVVDLLKEIPNVQVYVDDIYLSHDDPKEHVQQLEKVFQILLQAGYVVSLKKSEIGQKTVEFLGFNITKEGRGLTDTFKTKLLNITPPKDLKQLQSILGLLNFARNFIPNFAELVQPLYNLIAPAKGKYIEWSEENTKQLNMVIEALNTASNLEERLPEQRLVIKVNTSPSAGYVRYYNETGKKPIMYLNYVFSKAELKFSMLEKLLTTMHKALIKAMDLAMGQEILVYSPIVSMTKIQKTPLPERKALPIRWITWMTYLEDPRIQFHYDKTLPELKHIPDVYTSSQSPVKHPSQYEGVFYTDGSAIKSPDPTKSNNAGMGIVHATYKPEYQVLNQWSIPLGNHTAQMAEIAAVEFACKKALKIPGPVLVITDSFYVAESANKELPYWKSNGFVNNKKKPLKHISKWKSIAECLSMKPDITIQHEKGISLQIPVFILKGNALADKLATQGSYVVNAGKRTADGSEFEKRTADGSEFESPKKKAKVE

SEQ ID NO: 1321 - protein, 2178 aa, synthetic construct
  source 1..2178: note = Description of Artificial Sequence: Synthetic polypeptide
MPAAKRVKLDGGDKKYSIGLDIGTNSVGWAVITDEYKVPSKKFKVLGNTDRHSIKKNLIGALLFDSGETAEATRLKRTARRRYTRRKNRICYLQEIFSNEMAKVDDSFFHRLEESFLVEEDKKHERHPIFGNIVDEVAYHEKYPTIYHLRKKLVDSTDKADLRLIYLALAHMIKFRGHFLIEGDLNPDNSDVDKLFIQLVQTYNQLFEENPINASGVDAKAILSARLSKSRRLENLIAQLPGEKKNGLFGNLIALSLGLTPNFKSNFDLAEDAKLQLSKDTYDDDLDNLLAQIGDQYADLFLAAKNLSDAILLSDILRVNTEITKAPLSASMIKRYDEHHQDLTLLKALVRQQLPEKYKEIFFDQSKNGYAGYIDGGASQEEFYKFIKPILEKMDGTEELLVKLNREDLLRKQRTFDNGSIPHQIHLGELHAILRRQEDFYPFLKDNREKIEKILTFRIPYYVGPLARGNSRFAWMTRKSEETITPWNFEEVVDKGASAQSFIERMTNFDKNLPNEKVLPKHSLLYEYFTVYNELTKVKYVTEGMRKPAFLSGEQKKAIVDLLFKTNRKVTVKQLKEDYFKKIECFDSVEISGVEDRFNASLGTYHDLLKIIKDKDFLDNEENEDILEDIVLTLTLFEDREMIEERLKTYAHLFDDKVMKQLKRRRYTGWGRLSRKLINGIRDKQSGKTILDFLKSDGFANRNFMQLIHDDSLTFKEDIQKAQVSGQGDSLHEHIANLAGSPAIKKGILQTVKVVDELVKVMGRHKPENIVIEMARENQTTQKGQKNSRERMKRIEEGIKELGSQILKEHPVENTQLQNEKLYLYYLQNGRDMYVDQELDINRLSDYDVDHIVPQSFLKDDSIDNKVLTRSDKARGKSDNVPSEEVVKKMKNYWRQLLNAKLITQRKFDNLTKAERGGLSELDKAGFIKRQLVETRQITKHVAQILDSRMNTKYDENDKLIREVKVITLKSKLVSDFRKDFQFYKVREINNYHHAHDAYLNAVVGTALIKKYPKLESEFVYGDYKVYDVRKMIAKSEQEIGKATAKYFFYSNIMNFFKTEITLANGEIRKRPLIETNGETGEIVWDKGRDFATVRKVLSMPQVNIVKKTEVQTGGFSKESILPKRNSDKLIARKKDWDPKKYGGFDSPTVAYSVLVVAKVEKGKSKKLKSVKELLGITIMERSSFEKNPIDFLEAKGYKEVKKDLIIKLPKYSLFELENGRKRMLASAGELQKGNELALPSKYVNFLYLASHYEKLKGSPEDNEQKQLFVEQHKHYLDEIIEQISEFSKRVILADANLDKVLSAYNKHRDKPIREQAENIIHLFTLTNLGAPAAFKYFDTTIDRKRYTSTKEVLDATLIHQSITGLYETRIDLSQLGGDGGPAPAPAPAPAPAPGGMNPLQLLQPLPAEIKGTKLLAHWNSGATITCIPESFLEDEQPIKKTLIKTIHGEKQQNVYYVTFKVKGRKVEAEVIASPYEYILLSPTDVPWLTQQPLQLTILVPLQEYQEKILSKTALPEDQKQQLKTLFVKYDNLWQHWENQVGHRKIRPHNIATGDYPPRPQKQYPINPKAKPSIQIVIDDLLKQGVLTPQNSTMNTPVYPVPKPDGRWRMVLDYREVNKTIPLTAAQNQHSAGILATIVRQKYKTTLDLANGFWAHPITPESYWLTAFTWQGKQYCWTRLPQGFLNSPALFNADVVDLLKEIPNVQVYVDDIYLSHDDPKEHVQQLEKVFQILLQAGYVVSLKKSEIGQKTVEFLGFNITKEGRGLTDTFKTKLLNITPPKDLKQLQSILGLLNFARNFIPNFAELVQPLYNLIAPAKGKYIEWSEENTKQLNMVIEALNTASNLEERLPEQRLVIKVNTSPSAGYVRYYNETGKKPIMYLNYVFSKAELKFSMLEKLLTTMHKALIKAMDLAMGQEILVYSPIVSMTKIQKTPLPERKALPIRWITWMTYLEDPRIQFHYDKTLPELKHIPDVYTSSQSPVKHPSQYEGVFYTDGSAIKSPDPTKSNNAGMGIVHATYKPEYQVLNQWSIPLGNHTAQMAEIAAVEFACKKALKIPGPVLVITDSFYVAESANKELPYWKSNGFVNNKKKPLKHISKWKSIAECLSMKPDITIQHEKGISLQIPVFILKGNALADKLATQGSYVVNAGKRTADGSEFEKRTADGSEFESPKKKAKVE

SEQ ID NO: 1322 - protein, 2174 aa, synthetic construct
  source 1..2174: note = Description of Artificial Sequence: Synthetic polypeptide
MPAAKRVKLDGGDKKYSIGLDIGTNSVGWAVITDEYKVPSKKFKVLGNTDRHSIKKNLIGALLFDSGETAEATRLKRTARRRYTRRKNRICYLQEIFSNEMAKVDDSFFHRLEESFLVEEDKKHERHPIFGNIVDEVAYHEKYPTIYHLRKKLVDSTDKADLRLIYLALAHMIKFRGHFLIEGDLNPDNSDVDKLFIQLVQTYNQLFEENPINASGVDAKAILSARLSKSRRLENLIAQLPGEKKNGLFGNLIALSLGLTPNFKSNFDLAEDAKLQLSKDTYDDDLDNLLAQIGDQYADLFLAAKNLSDAILLSDILRVNTEITKAPLSASMIKRYDEHHQDLTLLKALVRQQLPEKYKEIFFDQSKNGYAGYIDGGASQEEFYKFIKPILEKMDGTEELLVKLNREDLLRKQRTFDNGSIPHQIHLGELHAILRRQEDFYPFLKDNREKIEKILTFRIPYYVGPLARGNSRFAWMTRKSEETITPWNFEEVVDKGASAQSFIERMTNFDKNLPNEKVLPKHSLLYEYFTVYNELTKVKYVTEGMRKPAFLSGEQKKAIVDLLFKTNRKVTVKQLKEDYFKKIECFDSVEISGVEDRFNASLGTYHDLLKIIKDKDFLDNEENEDILEDIVLTLTLFEDREMIEERLKTYAHLFDDKVMKQLKRRRYTGWGRLSRKLINGIRDKQSGKTILDFLKSDGFANRNFMQLIHDDSLTFKEDIQKAQVSGQGDSLHEHIANLAGSPAIKKGILQTVKVVDELVKVMGRHKPENIVIEMARENQTTQKGQKNSRERMKRIEEGIKELGSQILKEHPVENTQLQNEKLYLYYLQNGRDMYVDQELDINRLSDYDVDHIVPQSFLKDDSIDNKVLTRSDKARGKSDNVPSEEVVKKMKNYWRQLLNAKLITQRKFDNLTKAERGGLSELDKAGFIKRQLVETRQITKHVAQILDSRMNTKYDENDKLIREVKVITLKSKLVSDFRKDFQFYKVREINNYHHAHDAYLNAVVGTALIKKYPKLESEFVYGDYKVYDVRKMIAKSEQEIGKATAKYFFYSNIMNFFKTEITLANGEIRKRPLIETNGETGEIVWDKGRDFATVRKVLSMPQVNIVKKTEVQTGGFSKESILPKRNSDKLIARKKDWDPKKYGGFDSPTVAYSVLVVAKVEKGKSKKLKSVKELLGITIMERSSFEKNPIDFLEAKGYKEVKKDLIIKLPKYSLFELENGRKRMLASAGELQKGNELALPSKYVNFLYLASHYEKLKGSPEDNEQKQLFVEQHKHYLDEIIEQISEFSKRVILADANLDKVLSAYNKHRDKPIREQAENIIHLFTLTNLGAPAAFKYFDTTIDRKRYTSTKEVLDATLIHQSITGLYETRIDLSQLGGDGGGGSGGGPAPGGMNPLQLLQPLPAEIKGTKLLAHWNSGATITCIPESFLEDEQPIKKTLIKTIHGEKQQNVYYVTFKVKGRKVEAEVIASPYEYILLSPTDVPWLTQQPLQLTILVPLQEYQEKILSKTALPEDQKQQLKTLFVKYDNLWQHWENQVGHRKIRPHNIATGDYPPRPQKQYPINPKAKPSIQIVIDDLLKQGVLTPQNSTMNTPVYPVPKPDGRWRMVLDYREVNKTIPLTAAQNQHSAGILATIVRQKYKTTLDLANGFWAHPITPESYWLTAFTWQGKQYCWTRLPQGFLNSPALFNADVVDLLKEIPNVQVYVDDIYLSHDDPKEHVQQLEKVFQILLQAGYVVSLKKSEIGQKTVEFLGFNITKEGRGLTDTFKTKLLNITPPKDLKQLQSILGLLNFARNFIPNFAELVQPLYNLIAPAKGKYIEWSEENTKQLNMVIEALNTASNLEERLPEQRLVIKVNTSPSAGYVRYYNETGKKPIMYLNYVFSKAELKFSMLEKLLTTMHKALIKAMDLAMGQEILVYSPIVSMTKIQKTPLPERKALPIRWITWMTYLEDPRIQFHYDKTLPELKHIPDVYTSSQSPVKHPSQYEGVFYTDGSAIKSPDPTKSNNAGMGIVHATYKPEYQVLNQWSIPLGNHTAQMAEIAAVEFACKKALKIPGPVLVITDSFYVAESANKELPYWKSNGFVNNKKKPLKHISKWKSIAECLSMKPDITIQHEKGISLQIPVFILKGNALADKLATQGSYVVNAGKRTADGSEFEKRTADGSEFESPKKKAKVE

SEQ ID NO: 1323 - protein, 2176 aa, synthetic construct
  source 1..2176: note = Description of Artificial Sequence: Synthetic polypeptide
MPAAKRVKLDGGDKKYSIGLDIGTNSVGWAVITDEYKVPSKKFKVLGNTDRHSIKKNLIGALLFDSGETAEATRLKRTARRRYTRRKNRICYLQEIFSNEMAKVDDSFFHRLEESFLVEEDKKHERHPIFGNIVDEVAYHEKYPTIYHLRKKLVDSTDKADLRLIYLALAHMIKFRGHFLIEGDLNPDNSDVDKLFIQLVQTYNQLFEENPINASGVDAKAILSARLSKSRRLENLIAQLPGEKKNGLFGNLIALSLGLTPNFKSNFDLAEDAKLQLSKDTYDDDLDNLLAQIGDQYADLFLAAKNLSDAILLSDILRVNTEITKAPLSASMIKRYDEHHQDLTLLKALVRQQLPEKYKEIFFDQSKNGYAGYIDGGASQEEFYKFIKPILEKMDGTEELLVKLNREDLLRKQRTFDNGSIPHQIHLGELHAILRRQEDFYPFLKDNREKIEKILTFRIPYYVGPLARGNSRFAWMTRKSEETITPWNFEEVVDKGASAQSFIERMTNFDKNLPNEKVLPKHSLLYEYFTVYNELTKVKYVTEGMRKPAFLSGEQKKAIVDLLFKTNRKVTVKQLKEDYFKKIECFDSVEISGVEDRFNASLGTYHDLLKIIKDKDFLDNEENEDILEDIVLTLTLFEDREMIEERLKTYAHLFDDKVMKQLKRRRYTGWGRLSRKLINGIRDKQSGKTILDFLKSDGFANRNFMQLIHDDSLTFKEDIQKAQVSGQGDSLHEHIANLAGSPAIKKGILQTVKVVDELVKVMGRHKPENIVIEMARENQTTQKGQKNSRERMKRIEEGIKELGSQILKEHPVENTQLQNEKLYLYYLQNGRDMYVDQELDINRLSDYDVDHIVPQSFLKDDSIDNKVLTRSDKARGKSDNVPSEEVVKKMKNYWRQLLNAKLITQRKFDNLTKAERGGLSELDKAGFIKRQLVETRQITKHVAQILDSRMNTKYDENDKLIREVKVITLKSKLVSDFRKDFQFYKVREINNYHHAHDAYLNAVVGTALIKKYPKLESEFVYGDYKVYDVRKMIAKSEQEIGKATAKYFFYSNIMNFFKTEITLANGEIRKRPLIETNGETGEIVWDKGRDFATVRKVLSMPQVNIVKKTEVQTGGFSKESILPKRNSDKLIARKKDWDPKKYGGFDSPTVAYSVLVVAKVEKGKSKKLKSVKELLGITIMERSSFEKNPIDFLEAKGYKEVKKDLIIKLPKYSLFELENGRKRMLASAGELQKGNELALPSKYVNFLYLASHYEKLKGSPEDNEQKQLFVEQHKHYLDEIIEQISEFSKRVILADANLDKVLSAYNKHRDKPIREQAENIIHLFTLTNLGAPAAFKYFDTTIDRKRYTSTKEVLDATLIHQSITGLYETRIDLSQLGGDGGGGSEAAAKGGGGGMNPLQLLQPLPAEIKGTKLLAHWNSGATITCIPESFLEDEQPIKKTLIKTIHGEKQQNVYYVTFKVKGRKVEAEVIASPYEYILLSPTDVPWLTQQPLQLTILVPLQEYQEKILSKTALPEDQKQQLKTLFVKYDNLWQHWENQVGHRKIRPHNIATGDYPPRPQKQYPINPKAKPSIQIVIDDLLKQGVLTPQNSTMNTPVYPVPKPDGRWRMVLDYREVNKTIPLTAAQNQHSAGILATIVRQKYKTTLDLANGFWAHPITPESYWLTAFTWQGKQYCWTRLPQGFLNSPALFNADVVDLLKEIPNVQVYVDDIYLSHDDPKEHVQQLEKVFQILLQAGYVVSLKKSEIGQKTVEFLGFNITKEGRGLTDTFKTKLLNITPPKDLKQLQSILGLLNFARNFIPNFAELVQPLYNLIAPAKGKYIEWSEENTKQLNMVIEALNTASNLEERLPEQRLVIKVNTSPSAGYVRYYNETGKKPIMYLNYVFSKAELKFSMLEKLLTTMHKALIKAMDLAMGQEILVYSPIVSMTKIQKTPLPERKALPIRWITWMTYLEDPRIQFHYDKTLPELKHIPDVYTSSQSPVKHPSQYEGVFYTDGSAIKSPDPTKSNNAGMGIVHATYKPEYQVLNQWSIPLGNHTAQMAEIAAVEFACKKALKIPGPVLVITDSFYVAESANKELPYWKSNGFVNNKKKPLKHISKWKSIAECLSMKPDITIQHEKGISLQIPVFILKGNALADKLATQGSYVVNAGKRTADGSEFEKRTADGSEFESPKKKAKVE

SEQ ID NO: 1324 - protein, 2176 aa, synthetic construct
  source 1..2176: note = Description of Artificial Sequence: Synthetic polypeptide
MPAAKRVKLDGGDKKYSIGLDIGTNSVGWAVITDEYKVPSKKFKVLGNTDRHSIKKNLIGALLFDSGETAEATRLKRTARRRYTRRKNRICYLQEIFSNEMAKVDDSFFHRLEESFLVEEDKKHERHPIFGNIVDEVAYHEKYPTIYHLRKKLVDSTDKADLRLIYLALAHMIKFRGHFLIEGDLNPDNSDVDKLFIQLVQTYNQLFEENPINASGVDAKAILSARLSKSRRLENLIAQLPGEKKNGLFGNLIALSLGLTPNFKSNFDLAEDAKLQLSKDTYDDDLDNLLAQIGDQYADLFLAAKNLSDAILLSDILRVNTEITKAPLSASMIKRYDEHHQDLTLLKALVRQQLPEKYKEIFFDQSKNGYAGYIDGGASQEEFYKFIKPILEKMDGTEELLVKLNREDLLRKQRTFDNGSIPHQIHLGELHAILRRQEDFYPFLKDNREKIEKILTFRIPYYVGPLARGNSRFAWMTRKSEETITPWNFEEVVDKGASAQSFIERMTNFDKNLPNEKVLPKHSLLYEYFTVYNELTKVKYVTEGMRKPAFLSGEQKKAIVDLLFKTNRKVTVKQLKEDYFKKIECFDSVEISGVEDRFNASLGTYHDLLKIIKDKDFLDNEENEDILEDIVLTLTLFEDREMIEERLKTYAHLFDDKVMKQLKRRRYTGWGRLSRKLINGIRDKQSGKTILDFLKSDGFANRNFMQLIHDDSLTFKEDIQKAQVSGQGDSLHEHIANLAGSPAIKKGILQTVKVVDELVKVMGRHKPENIVIEMARENQTTQKGQKNSRERMKRIEEGIKELGSQILKEHPVENTQLQNEKLYLYYLQNGRDMYVDQELDINRLSDYDVDHIVPQSFLKDDSIDNKVLTRSDKARGKSDNVPSEEVVKKMKNYWRQLLNAKLITQRKFDNLTKAERGGLSELDKAGFIKRQLVETRQITKHVAQILDSRMNTKYDENDKLIREVKVITLKSKLVSDFRKDFQFYKVREINNYHHAHDAYLNAVVGTALIKKYPKLESEFVYGDYKVYDVRKMIAKSEQEIGKATAKYFFYSNIMNFFKTEITLANGEIRKRPLIETNGETGEIVWDKGRDFATVRKVLSMPQVNIVKKTEVQTGGFSKESILPKRNSDKLIARKKDWDPKKYGGFDSPTVAYSVLVVAKVEKGKSKKLKSVKELLGITIMERSSFEKNPIDFLEAKGYKEVKKDLIIKLPKYSLFELENGRKRMLASAGELQKGNELALPSKYVNFLYLASHYEKLKGSPEDNEQKQLFVEQHKHYLDEIIEQISEFSKRVILADANLDKVLSAYNKHRDKPIREQAENIIHLFTLTNLGAPAAFKYFDTTIDRKRYTSTKEVLDATLIHQSITGLYETRIDLSQLGGDGGPAPEAAAKGGSGGMNPLQLLQPLPAEIKGTKLLAHWNSGATITCIPESFLEDEQPIKKTLIKTIHGEKQQNVYYVTFKVKGRKVEAEVIASPYEYILLSPTDVPWLTQQPLQLTILVPLQEYQEKILSKTALPEDQKQQLKTLFVKYDNLWQHWENQVGHRKIRPHNIATGDYPPRPQKQYPINPKAKPSIQIVIDDLLKQGVLTPQNSTMNTPVYPVPKPDGRWRMVLDYREVNKTIPLTAAQNQHSAGILATIVRQKYKTTLDLANGFWAHPITPESYWLTAFTWQGKQYCWTRLPQGFLNSPALFNADVVDLLKEIPNVQVYVDDIYLSHDDPKEHVQQLEKVFQILLQAGYVVSLKKSEIGQKTVEFLGFNITKEGRGLTDTFKTKLLNITPPKDLKQLQSILGLLNFARNFIPNFAELVQPLYNLIAPAKGKYIEWSEENTKQLNMVIEALNTASNLEERLPEQRLVIKVNTSPSAGYVRYYNETGKKPIMYLNYVFSKAELKFSMLEKLLTTMHKALIKAMDLAMGQEILVYSPIVSMTKIQKTPLPERKALPIRWITWMTYLEDPRIQFHYDKTLPELKHIPDVYTSSQSPVKHPSQYEGVFYTDGSAIKSPDPTKSNNAGMGIVHATYKPEYQVLNQWSIPLGNHTAQMAEIAAVEFACKKALKIPGPVLVITDSFYVAESANKELPYWKSNGFVNNKKKPLKHISKWKSIAECLSMKPDITIQHEKGISLQIPVFILKGNALADKLATQGSYVVNAGKRTADGSEFEKRTADGSEFESPKKKAKVE

SEQ ID NO: 1325 - protein, 2176 aa, synthetic construct
  source 1..2176: note = Description of Artificial Sequence: Synthetic polypeptide
MPAAKRVKLDGGDKKYSIGLDIGTNSVGWAVITDEYKVPSKKFKVLGNTDRHSIKKNLIGALLFDSGETAEATRLKRTARRRYTRRKNRICYLQEIFSNEMAKVDDSFFHRLEESFLVEEDKKHERHPIFGNIVDEVAYHEKYPTIYHLRKKLVDSTDKADLRLIYLALAHMIKFRGHFLIEGDLNPDNSDVDKLFIQLVQTYNQLFEENPINASGVDAKAILSARLSKSRRLENLIAQLPGEKKNGLFGNLIALSLGLTPNFKSNFDLAEDAKLQLSKDTYDDDLDNLLAQIGDQYADLFLAAKNLSDAILLSDILRVNTEITKAPLSASMIKRYDEHHQDLTLLKALVRQQLPEKYKEIFFDQSKNGYAGYIDGGASQEEFYKFIKPILEKMDGTEELLVKLNREDLLRKQRTFDNGSIPHQIHLGELHAILRRQEDFYPFLKDNREKIEKILTFRIPYYVGPLARGNSRFAWMTRKSEETITPWNFEEVVDKGASAQSFIERMTNFDKNLPNEKVLPKHSLLYEYFTVYNELTKVKYVTEGMRKPAFLSGEQKKAIVDLLFKTNRKVTVKQLKEDYFKKIECFDSVEISGVEDRFNASLGTYHDLLKIIKDKDFLDNEENEDILEDIVLTLTLFEDREMIEERLKTYAHLFDDKVMKQLKRRRYTGWGRLSRKLINGIRDKQSGKTILDFLKSDGFANRNFMQLIHDDSLTFKEDIQKAQVSGQGDSLHEHIANLAGSPAIKKGILQTVKVVDELVKVMGRHKPENIVIEMARENQTTQKGQKNSRERMKRIEEGIKELGSQILKEHPVENTQLQNEKLYLYYLQNGRDMYVDQELDINRLSDYDVDHIVPQSFLKDDSIDNKVLTRSDKARGKSDNVPSEEVVKKMKNYWRQLLNAKLITQRKFDNLTKAERGGLSELDKAGFIKRQLVETRQITKHVAQILDSRMNTKYDENDKLIREVKVITLKSKLVSDFRKDFQFYKVREINNYHHAHDAYLNAVVGTALIKKYPKLESEFVYGDYKVYDVRKMIAKSEQEIGKATAKYFFYSNIMNFFKTEITLANGEIRKRPLIETNGETGEIVWDKGRDFATVRKVLSMPQVNIVKKTEVQTGGFSKESILPKRNSDKLIARKKDWDPKKYGGFDSPTVAYSVLVVAKVEKGKSKKLKSVKELLGITIMERSSFEKNPIDFLEAKGYKEVKKDLIIKLPKYSLFELENGRKRMLASAGELQKGNELALPSKYVNFLYLASHYEKLKGSPEDNEQKQLFVEQHKHYLDEIIEQISEFSKRVILADANLDKVLSAYNKHRDKPIREQAENIIHLFTLTNLGAPAAFKYFDTTIDRKRYTSTKEVLDATLIHQSITGLYETRIDLSQLGGDGGEAAAKGGSPAPGGMNPLQLLQPLPAEIKGTKLLAHWNSGATITCIPESFLEDEQPIKKTLIKTIHGEKQQNVYYVTFKVKGRKVEAEVIASPYEYILLSPTDVPWLTQQPLQLTILVPLQEYQEKILSKTALPEDQKQQLKTLFVKYDNLWQHWENQVGHRKIRPHNIATGDYPPRPQKQYPINPKAKPSIQIVIDDLLKQGVLTPQNSTMNTPVYPVPKPDGRWRMVLDYREVNKTIPLTAAQNQHSAGILATIVRQKYKTTLDLANGFWAHPITPESYWLTAFTWQGKQYCWTRLPQGFLNSPALFNADVVDLLKEIPNVQVYVDDIYLSHDDPKEHVQQLEKVFQILLQAGYVVSLKKSEIGQKTVEFLGFNITKEGRGLTDTFKTKLLNITPPKDLKQLQSILGLLNFARNFIPNFAELVQPLYNLIAPAKGKYIEWSEENTKQLNMVIEALNTASNLEERLPEQRLVIKVNTSPSAGYVRYYNETGKKPIMYLNYVFSKAELKFSMLEKLLTTMHKALIKAMDLAMGQEILVYSPIVSMTKIQKTPLPERKALPIRWITWMTYLEDPRIQFHYDKTLPELKHIPDVYTSSQSPVKHPSQYEGVFYTDGSAIKSPDPTKSNNAGMGIVHATYKPEYQVLNQWSIPLGNHTAQMAEIAAVEFACKKALKIPGPVLVITDSFYVAESANKELPYWKSNGFVNNKKKPLKHISKWKSIAECLSMKPDITIQHEKGISLQIPVFILKGNALADKLATQGSYVVNAGKRTADGSEFEKRTADGSEFESPKKKAKVE

SEQ ID NO: 1326 - protein, 2176 aa, synthetic construct
  source 1..2176: note = Description of Artificial Sequence: Synthetic polypeptide
MPAAKRVKLDGGDKKYSIGLDIGTNSVGWAVITDEYKVPSKKFKVLGNTDRHSIKKNLIGALLFDSGETAEATRLKRTARRRYTRRKNRICYLQEIFSNEMAKVDDSFFHRLEESFLVEEDKKHERHPIFGNIVDEVAYHEKYPTIYHLRKKLVDSTDKADLRLIYLALAHMIKFRGHFLIEGDLNPDNSDVDKLFIQLVQTYNQLFEENPINASGVDAKAILSARLSKSRRLENLIAQLPGEKKNGLFGNLIALSLGLTPNFKSNFDLAEDAKLQLSKDTYDDDLDNLLAQIGDQYADLFLAAKNLSDAILLSDILRVNTEITKAPLSASMIKRYDEHHQDLTLLKALVRQQLPEKYKEIFFDQSKNGYAGYIDGGASQEEFYKFIKPILEKMDGTEELLVKLNREDLLRKQRTFDNGSIPHQIHLGELHAILRRQEDFYPFLKDNREKIEKILTFRIPYYVGPLARGNSRFAWMTRKSEETITPWNFEEVVDKGASAQSFIERMTNFDKNLPNEKVLPKHSLLYEYFTVYNELTKVKYVTEGMRKPAFLSGEQKKAIVDLLFKTNRKVTVKQLKEDYFKKIECFDSVEISGVEDRFNASLGTYHDLLKIIKDKDFLDNEENEDILEDIVLTLTLFEDREMIEERLKTYAHLFDDKVMKQLKRRRYTGWGRLSRKLINGIRDKQSGKTILDFLKSDGFANRNFMQLIHDDSLTFKEDIQKAQVSGQGDSLHEHIANLAGSPAIKKGILQTVKVVDELVKVMGRHKPENIVIEMARENQTTQKGQKNSRERMKRIEEGIKELGSQILKEHPVENTQLQNEKLYLYYLQNGRDMYVDQELDINRLSDYDVDHIVPQSFLKDDSIDNKVLTRSDKARGKSDNVPSEEVVKKMKNYWRQLLNAKLITQRKFDNLTKAERGGLSELDKAGFIKRQLVETRQITKHVAQILDSRMNTKYDENDKLIREVKVITLKSKLVSDFRKDFQFYKVREINNYHHAHDAYLNAVVGTALIKKYPKLESEFVYGDYKVYDVRKMIAKSEQEIGKATAKYFFYSNIMNFFKTEITLANGEIRKRPLIETNGETGEIVWDKGRDFATVRKVLSMPQVNIVKKTEVQTGGFSKESILPKRNSDKLIARKKDWDPKKYGGFDSPTVAYSVLVVAKVEKGKSKKLKSVKELLGITIMERSSFEKNPIDFLEAKGYKEVKKDLIIKLPKYSLFELENGRKRMLASAGELQKGNELALPSKYVNFLYLASHYEKLKGSPEDNEQKQLFVEQHKHYLDEIIEQISEFSKRVILADANLDKVLSAYNKHRDKPIREQAENIIHLFTLTNLGAPAAFKYFDTTIDRKRYTSTKEVLDATLIHQSITGLYETRIDLSQLGGDGGGGGGGSEAAAKGGMNPLQLLQPLPAEIKGTKLLAHWNSGATITCIPESFLEDEQPIKKTLIKTIHGEKQQNVYYVTFKVKGRKVEAEVIASPYEYILLSPTDVPWLTQQPLQLTILVPLQEYQEKILSKTALPEDQKQQLKTLFVKYDNLWQHWENQVGHRKIRPHNIATGDYPPRPQKQYPINPKAKPSIQIVIDDLLKQGVLTPQNSTMNTPVYPVPKPDGRWRMVLDYREVNKTIPLTAAQNQHSAGILATIVRQKYKTTLDLANGFWAHPITPESYWLTAFTWQGKQYCWTRLPQGFLNSPALFNADVVDLLKEIPNVQVYVDDIYLSHDDPKEHVQQLEKVFQILLQAGYVVSLKKSEIGQKTVEFLGFNITKEGRGLTDTFKTKLLNITPPKDLKQLQSILGLLNFARNFIPNFAELVQPLYNLIAPAKGKYIEWSEENTKQLNMVIEALNTASNLEERLPEQRLVIKVNTSPSAGYVRYYNETGKKPIMYLNYVFSKAELKFSMLEKLLTTMHKALIKAMDLAMGQEILVYSPIVSMTKIQKTPLPERKALPIRWITWMTYLEDPRIQFHYDKTLPELKHIPDVYTSSQSPVKHPSQYEGVFYTDGSAIKSPDPTKSNNAGMGIVHATYKPEYQVLNQWSIPLGNHTAQMAEIAAVEFACKKALKIPGPVLVITDSFYVAESANKELPYWKSNGFVNNKKKPLKHISKWKSIAECLSMKPDITIQHEKGISLQIPVFILKGNALADKLATQGSYVVNAGKRTADGSEFEKRTADGSEFESPKKKAKVE

SEQ ID NO: 1327 - protein, 2176 aa, synthetic construct
  source 1..2176: note = Description of Artificial Sequence: Synthetic polypeptide
MPAAKRVKLDGGDKKYSIGLDIGTNSVGWAVITDEYKVPSKKFKVLGNTDRHSIKKNLIGALLFDSGETAEATRLKRTARRRYTRRKNRICYLQEIFSNEMAKVDDSFFHRLEESFLVEEDKKHERHPIFGNIVDEVAYHEKYPTIYHLRKKLVDSTDKADLRLIYLALAHMIKFRGHFLIEGDLNPDNSDVDKLFIQLVQTYNQLFEENPINASGVDAKAILSARLSKSRRLENLIAQLPGEKKNGLFGNLIALSLGLTPNFKSNFDLAEDAKLQLSKDTYDDDLDNLLAQIGDQYADLFLAAKNLSDAILLSDILRVNTEITKAPLSASMIKRYDEHHQDLTLLKALVRQQLPEKYKEIFFDQSKNGYAGYIDGGASQEEFYKFIKPILEKMDGTEELLVKLNREDLLRKQRTFDNGSIPHQIHLGELHAILRRQEDFYPFLKDNREKIEKILTFRIPYYVGPLARGNSRFAWMTRKSEETITPWNFEEVVDKGASAQSFIERMTNFDKNLPNEKVLPKHSLLYEYFTVYNELTKVKYVTEGMRKPAFLSGEQKKAIVDLLFKTNRKVTVKQLKEDYFKKIECFDSVEISGVEDRFNASLGTYHDLLKIIKDKDFLDNEENEDILEDIVLTLTLFEDREMIEERLKTYAHLFDDKVMKQLKRRRYTGWGRLSRKLINGIRDKQSGKTILDFLKSDGFANRNFMQLIHDDSLTFKEDIQKAQVSGQGDSLHEHIANLAGSPAIKKGILQTVKVVDELVKVMGRHKPENIVIEMARENQTTQKGQKNSRERMKRIEEGIKELGSQILKEHPVENTQLQNEKLYLYYLQNGRDMYVDQELDINRLSDYDVDHIVPQSFLKDDSIDNKVLTRSDKARGKSDNVPSEEVVKKMKNYWRQLLNAKLITQRKFDNLTKAERGGLSELDKAGFIKRQLVETRQITKHVAQILDSRMNTKYDENDKLIREVKVITLKSKLVSDFRKDFQFYKVREINNYHHAHDAYLNAVVGTALIKKYPKLESEFVYGDYKVYDVRKMIAKSEQEIGKATAKYFFYSNIMNFFKTEITLANGEIRKRPLIETNGETGEIVWDKGRDFATVRKVLSMPQVNIVKKTEVQTGGFSKESILPKRNSDKLIARKKDWDPKKYGGFDSPTVAYSVLVVAKVEKGKSKKLKSVKELLGITIMERSSFEKNPIDFLEAKGYKEVKKDLIIKLPKYSLFELENGRKRMLASAGELQKGNELALPSKYVNFLYLASHYEKLKGSPEDNEQKQLFVEQHKHYLDEIIEQISEFSKRVILADANLDKVLSAYNKHRDKPIREQAENIIHLFTLTNLGAPAAFKYFDTTIDRKRYTSTKEVLDATLIHQSITGLYETRIDLSQLGGDGGEAAAKGSSPAPGGMNPLQLLQPLPAEIKGTKLLAHWNSGATITCIPESFLEDEQPIKKTLIKTIHGEKQQNVYYVTFKVKGRKVEAEVIASPYEYILLSPTDVPWLTQQPLQLTILVPLQEYQEKILSKTALPEDQKQQLKTLFVKYDNLWQHWENQVGHRKIRPHNIATGDYPPRPQKQYPINPKAKPSIQIVIDDLLKQGVLTPQNSTMNTPVYPVPKPDGRWRMVLDYREVNKTIPLTAAQNQHSAGILATIVRQKYKTTLDLANGFWAHPITPESYWLTAFTWQGKQYCWTRLPQGFLNSPALFNADVVDLLKEIPNVQVYVDDIYLSHDDPKEHVQQLEKVFQILLQAGYVVSLKKSEIGQKTVEFLGFNITKEGRGLTDTFKTKLLNITPPKDLKQLQSILGLLNFARNFIPNFAELVQPLYNLIAPAKGKYIEWSEENTKQLNMVIEALNTASNLEERLPEQRLVIKVNTSPSAGYVRYYNETGKKPIMYLNYVFSKAELKFSMLEKLLTTMHKALIKAMDLAMGQEILVYSPIVSMTKIQKTPLPERKALPIRWITWMTYLEDPRIQFHYDKTLPELKHIPDVYTSSQSPVKHPSQYEGVFYTDGSAIKSPDPTKSNNAGMGIVHATYKPEYQVLNQWSIPLGNHTAQMAEIAAVEFACKKALKIPGPVLVITDSFYVAESANKELPYWKSNGFVNNKKKPLKHISKWKSIAECLSMKPDITIQHEKGISLQIPVFILKGNALADKLATQGSYVVNAGKRTADGSEFEKRTADGSEFESPKKKAKVE

SEQ ID NO: 1328 - protein, 2176 aa, synthetic construct
  source 1..2176: note = Description of Artificial Sequence: Synthetic polypeptide
MPAAKRVKLDGGDKKYSIGLDIGTNSVGWAVITDEYKVPSKKFKVLGNTDRHSIKKNLIGALLFDSGETAEATRLKRTARRRYTRRKNRICYLQEIFSNEMAKVDDSFFHRLEESFLVEEDKKHERHPIFGNIVDEVAYHEKYPTIYHLRKKLVDSTDKADLRLIYLALAHMIKFRGHFLIEGDLNPDNSDVDKLFIQLVQTYNQLFEENPINASGVDAKAILSARLSKSRRLENLIAQLPGEKKNGLFGNLIALSLGLTPNFKSNFDLAEDAKLQLSKDTYDDDLDNLLAQIGDQYADLFLAAKNLSDAILLSDILRVNTEITKAPLSASMIKRYDEHHQDLTLLKALVRQQLPEKYKEIFFDQSKNGYAGYIDGGASQEEFYKFIKPILEKMDGTEELLVKLNREDLLRKQRTFDNGSIPHQIHLGELHAILRRQEDFYPFLKDNREKIEKILTFRIPYYVGPLARGNSRFAWMTRKSEETITPWNFEEVVDKGASAQSFIERMTNFDKNLPNEKVLPKHSLLYEYFTVYNELTKVKYVTEGMRKPAFLSGEQKKAIVDLLFKTNRKVTVKQLKEDYFKKIECFDSVEISGVEDRFNASLGTYHDLLKIIKDKDFLDNEENEDILEDIVLTLTLFEDREMIEERLKTYAHLFDDKVMKQLKRRRYTGWGRLSRKLINGIRDKQSGKTILDFLKSDGFANRNFMQLIHDDSLTFKEDIQKAQVSGQGDSLHEHIANLAGSPAIKKGILQTVKVVDELVKVMGRHKPENIVIEMARENQTTQKGQKNSRERMKRIEEGIKELGSQILKEHPVENTQLQNEKLYLYYLQNGRDMYVDQELDINRLSDYDVDHIVPQSFLKDDSIDNKVLTRSDKARGKSDNVPSEEVVKKMKNYWRQLLNAKLITQRKFDNLTKAERGGLSELDKAGFIKRQLVETRQITKHVAQILDSRMNTKYDENDKLIREVKVITLKSKLVSDFRKDFQFYKVREINNYHHAHDAYLNAVVGTALIKKYPKLESEFVYGDYKVYDVRKMIAKSEQEIGKATAKYFFYSNIMNFFKTEITLANGEIRKRPLIETNGETGEIVWDKGRDFATVRKVLSMPQVNIVKKTEVQTGGFSKESILPKRNSDKLIARKKDWDPKKYGGFDSPTVAYSVLVVAKVEKGKSKKLKSVKELLGITIMERSSFEKNPIDFLEAKGYKEVKKDLIIKLPKYSLFELENGRKRMLASAGELQKGNELALPSKYVNFLYLASHYEKLKGSPEDNEQKQLFVEQHKHYLDEIIEQISEFSKRVILADANLDKVLSAYNKHRDKPIREQAENIIHLFTLTNLGAPAAFKYFDTTIDRKRYTSTKEVLDATLIHQSITGLYETRIDLSQLGGDGGGGSPAPEAAAKGGMNPLQLLQPLPAEIKGTKLLAHWNSGATITCIPESFLEDEQPIKKTLIKTIHGEKQQNVYYVTFKVKGRKVEAEVIASPYEYILLSPTDVPWLTQQPLQLTILVPLQEYQEKILSKTALPEDQKQQLKTLFVKYDNLWQHWENQVGHRKIRPHNIATGDYPPRPQKQYPINPKAKPSIQIVIDDLLKQGVLTPQNSTMNTPVYPVPKPDGRWRMVLDYREVNKTIPLTAAQNQHSAGILATIVRQKYKTTLDLANGFWAHPITPESYWLTAFTWQGKQYCWTRLPQGFLNSPALFNADVVDLLKEIPNVQVYVDDIYLSHDDPKEHVQQLEKVFQILLQAGYVVSLKKSEIGQKTVEFLGFNITKEGRGLTDTFKTKLLNITPPKDLKQLQSILGLLNFARNFIPNFAELVQPLYNLIAPAKGKYIEWSEENTKQLNMVIEALNTASNLEERLPEQRLVIKVNTSPSAGYVRYYNETGKKPIMYLNYVFSKAELKFSMLEKLLTTMHKALIKAMDLAMGQEILVYSPIVSMTKIQKTPLPERKALPIRWITWMTYLEDPRIQFHYDKTLPELKHIPDVYTSSQSPVKHPSQYEGVFYTDGSAIKSPDPTKSNNAGMGIVHATYKPEYQVLNQWSIPLGNHTAQMAEIAAVEFACKKALKIPGPVLVITDSFYVAESANKELPYWKSNGFVNNKKKPLKHISKWKSIAECLSMKPDITIQHEKGISLQIPVFILKGNALADKLATQGSYVVNAGKRTADGSEFEKRTADGSEFESPKKKAKVE

SEQ ID NO: 1329 - protein, 2176 aa, synthetic construct
  source 1..2176: note = Description of Artificial Sequence: Synthetic polypeptide
MPAAKRVKLDGGDKKYSIGLDIGTNSVGWAVITDEYKVPSKKFKVLGNTDRHSIKKNLIGALLFDSGETAEATRLKRTARRRYTRRKNRICYLQEIFSNEMAKVDDSFFHRLEESFLVEEDKKHERHPIFGNIVDEVAYHEKYPTIYHLRKKLVDSTDKADLRLIYLALAHMIKFRGHFLIEGDLNPDNSDVDKLFIQLVQTYNQLFEENPINASGVDAKAILSARLSKSRRLENLIAQLPGEKKNGLFGNLIALSLGLTPNFKSNFDLAEDAKLQLSKDTYDDDLDNLLAQIGDQYADLFLAAKNLSDAILLSDILRVNTEITKAPLSASMIKRYDEHHQDLTLLKALVRQQLPEKYKEIFFDQSKNGYAGYIDGGASQEEFYKFIKPILEKMDGTEELLVKLNREDLLRKQRTFDNGSIPHQIHLGELHAILRRQEDFYPFLKDNREKIEKILTFRIPYYVGPLARGNSRFAWMTRKSEETITPWNFEEVVDKGASAQSFIERMTNFDKNLPNEKVLPKHSLLYEYFTVYNELTKVKYVTEGMRKPAFLSGEQKKAIVDLLFKTNRKVTVKQLKEDYFKKIECFDSVEISGVEDRFNASLGTYHDLLKIIKDKDFLDNEENEDILEDIVLTLTLFEDREMIEERLKTYAHLFDDKVMKQLKRRRYTGWGRLSRKLINGIRDKQSGKTILDFLKSDGFANRNFMQLIHDDSLTFKEDIQKAQVSGQGDSLHEHIANLAGSPAIKKGILQTVKVVDELVKVMGRHKPENIVIEMARENQTTQKGQKNSRERMKRIEEGIKELGSQILKEHPVENTQLQNEKLYLYYLQNGRDMYVDQELDINRLSDYDVDHIVPQSFLKDDSIDNKVLTRSDKARGKSDNVPSEEVVKKMKNYWRQLLNAKLITQRKFDNLTKAERGGLSELDKAGFIKRQLVETRQITKHVAQILDSRMNTKYDENDKLIREVKVITLKSKLVSDFRKDFQFYKVREINNYHHAHDAYLNAVVGTALIKKYPKLESEFVYGDYKVYDVRKMIAKSEQEIGKATAKYFFYSNIMNFFKTEITLANGEIRKRPLIETNGETGEIVWDKGRDFATVRKVLSMPQVNIVKKTEVQTGGFSKESILPKRNSDKLIARKKDWDPKKYGGFDSPTVAYSVLVVAKVEKGKSKKLKSVKELLGITIMERSSFEKNPIDFLEAKGYKEVKKDLIIKLPKYSLFELENGRKRMLASAGELQKGNELALPSKYVNFLYLASHYEKLKGSPEDNEQKQLFVEQHKHYLDEIIEQISEFSKRVILADANLDKVLSAYNKHRDKPIREQAENIIHLFTLTNLGAPAAFKYFDTTIDRKRYTSTKEVLDATLIHQSITGLYETRIDLSQLGGDGGEAAAKGGSGGGGGMNPLQLLQPLPAEIKGTKLLAHWNSGATITCIPESFLEDEQPIKKTLIKTIHGEKQQNVYYVTFKVKGRKVEAEVIASPYEYILLSPTDVPWLTQQPLQLTILVPLQEYQEKILSKTALPEDQKQQLKTLFVKYDNLWQHWENQVGHRKIRPHNIATGDYPPRPQKQYPINPKAKPSIQIVIDDLLKQGVLTPQNSTMNTPVYPVPKPDGRWRMVLDYREVNKTIPLTAAQNQHSAGILATIVRQKYKTTLDLANGFWAHPITPESYWLTAFTWQGKQYCWTRLPQGFLNSPALFNADVVDLLKEIPNVQVYVDDIYLSHDDPKEHVQQLEKVFQILLQAGYVVSLKKSEIGQKTVEFLGFNITKEGRGLTDTFKTKLLNITPPKDLKQLQSILGLLNFARNFIPNFAELVQPLYNLIAPAKGKYIEWSEENTKQLNMVIEALNTASNLEERLPEQRLVIKVNTSPSAGYVRYYNETGKKPIMYLNYVFSKAELKFSMLEKLLTTMHKALIKAMDLAMGQEILVYSPIVSMTKIQKTPLPERKALPIRWITWMTYLEDPRIQFHYDKTLPELKHIPDVYTSSQSPVKHPSQYEGVFYTDGSAIKSPDPTKSNNAGMGIVHATYKPEYQVLNQWSIPLGNHTAQMAEIAAVEFACKKALKIPGPVLVITDSFYVAESANKELPYWKSNGFVNNKKKPLKHISKWKSIAECLSMKPDITIQHEKGISLQIPVFILKGNALADKLATQGSYVVNAGKRTADGSEFEKRTADGSEFESPKKKAKVE

SEQ ID NO: 1330 - protein, 2180 aa, synthetic construct
  source 1..2180: note = Description of Artificial Sequence: Synthetic polypeptide
MPAAKRVKLDGGDKKYSIGLDIGTNSVGWAVITDEYKVPSKKFKVLGNTDRHSIKKNLIGALLFDSGETAEATRLKRTARRRYTRRKNRICYLQEIFSNEMAKVDDSFFHRLEESFLVEEDKKHERHPIFGNIVDEVAYHEKYPTIYHLRKKLVDSTDKADLRLIYLALAHMIKFRGHFLIEGDLNPDNSDVDKLFIQLVQTYNQLFEENPINASGVDAKAILSARLSKSRRLENLIAQLPGEKKNGLFGNLIALSLGLTPNFKSNFDLAEDAKLQLSKDTYDDDLDNLLAQIGDQYADLFLAAKNLSDAILLSDILRVNTEITKAPLSASMIKRYDEHHQDLTLLKALVRQQLPEKYKEIFFDQSKNGYAGYIDGGASQEEFYKFIKPILEKMDGTEELLVKLNREDLLRKQRTFDNGSIPHQIHLGELHAILRRQEDFYPFLKDNREKIEKILTFRIPYYVGPLARGNSRFAWMTRKSEETITPWNFEEVVDKGASAQSFIERMTNFDKNLPNEKVLPKHSLLYEYFTVYNELTKVKYVTEGMRKPAFLSGEQKKAIVDLLFKTNRKVTVKQLKEDYFKKIECFDSVEISGVEDRFNASLGTYHDLLKIIKDKDFLDNEENEDILEDIVLTLTLFEDREMIEERLKTYAHLFDDKVMKQLKRRRYTGWGRLSRKLINGIRDKQSGKTILDFLKSDGFANRNFMQLIHDDSLTFKEDIQKAQVSGQGDSLHEHIANLAGSPAIKKGILQTVKVVDELVKVMGRHKPENIVIEMARENQTTQKGQKNSRERMKRIEEGIKELGSQILKEHPVENTQLQNEKLYLYYLQNGRDMYVDQELDINRLSDYDVDHIVPQSFLKDDSIDNKVLTRSDKARGKSDNVPSEEVVKKMKNYWRQLLNAKLITQRKFDNLTKAERGGLSELDKAGFIKRQLVETRQITKHVAQILDSRMNTKYDENDKLIREVKVITLKSKLVSDFRKDFQFYKVREINNYHHAHDAYLNAVVGTALIKKYPKLESEFVYGDYKVYDVRKMIAKSEQEIGKATAKYFFYSNIMNFFKTEITLANGEIRKRPLIETNGETGEIVWDKGRDFATVRKVLSMPQVNIVKKTEVQTGGFSKESILPKRNSDKLIARKKDWDPKKYGGFDSPTVAYSVLVVAKVEKGKSKKLKSVKELLGITIMERSSFEKNPIDFLEAKGYKEVKKDLIIKLPKYSLFELENGRKRMLASAGELQKGNELALPSKYVNFLYLASHYEKLKGSPEDNEQKQLFVEQHKHYLDEIIEQISEFSKRVILADANLDKVLSAYNKHRDKPIREQAENIIHLFTLTNLGAPAAFKYFDTTIDRKRYTSTKEVLDATLIHQSITGLYETRIDLSQLGGDGGGGGGSEAAAKGGGGSGGMNPLQLLQPLPAEIKGTKLLAHWNSGATITCIPESFLEDEQPIKKTLIKTIHGEKQQNVYYVTFKVKGRKVEAEVIASPYEYILLSPTDVPWLTQQPLQLTILVPLQEYQEKILSKTALPEDQKQQLKTLFVKYDNLWQHWENQVGHRKIRPHNIATGDYPPRPQKQYPINPKAKPSIQIVIDDLLKQGVLTPQNSTMNTPVYPVPKPDGRWRMVLDYREVNKTIPLTAAQNQHSAGILATIVRQKYKTTLDLANGFWAHPITPESYWLTAFTWQGKQYCWTRLPQGFLNSPALFNADVVDLLKEIPNVQVYVDDIYLSHDDPKEHVQQLEKVFQILLQAGYVVSLKKSEIGQKTVEFLGFNITKEGRGLTDTFKTKLLNITPPKDLKQLQSILGLLNFARNFIPNFAELVQPLYNLIAPAKGKYIEWSEENTKQLNMVIEALNTASNLEERLPEQRLVIKVNTSPSAGYVRYYNETGKKPIMYLNYVFSKAELKFSMLEKLLTTMHKALIKAMDLAMGQEILVYSPIVSMTKIQKTPLPERKALPIRWITWMTYLEDPRIQFHYDKTLPELKHIPDVYTSSQSPVKHPSQYEGVFYTDGSAIKSPDPTKSNNAGMGIVHATYKPEYQVLNQWSIPLGNHTAQMAEIAAVEFACKKALKIPGPVLVITDSFYVAESANKELPYWKSNGFVNNKKKPLKHISKWKSIAECLSMKPDITIQHEKGISLQIPVFILKGNALADKLATQGSYVVNAGKRTADGSEFEKRTADGSEFESPKKKAKVE

SEQ ID NO: 1331 - protein, 2174 aa, synthetic construct
  source 1..2174: note = Description of Artificial Sequence: Synthetic polypeptide
MPAAKRVKLDGGDKKYSIGLDIGTNSVGWAVITDEYKVPSKKFKVLGNTDRHSIKKNLIGALLFDSGETAEATRLKRTARRRYTRRKNRICYLQEIFSNEMAKVDDSFFHRLEESFLVEEDKKHERHPIFGNIVDEVAYHEKYPTIYHLRKKLVDSTDKADLRLIYLALAHMIKFRGHFLIEGDLNPDNSDVDKLFIQLVQTYNQLFEENPINASGVDAKAILSARLSKSRRLENLIAQLPGEKKNGLFGNLIALSLGLTPNFKSNFDLAEDAKLQLSKDTYDDDLDNLLAQIGDQYADLFLAAKNLSDAILLSDILRVNTEITKAPLSASMIKRYDEHHQDLTLLKALVRQQLPEKYKEIFFDQSKNGYAGYIDGGASQEEFYKFIKPILEKMDGTEELLVKLNREDLLRKQRTFDNGSIPHQIHLGELHAILRRQEDFYPFLKDNREKIEKILTFRIPYYVGPLARGNSRFAWMTRKSEETITPWNFEEVVDKGASAQSFIERMTNFDKNLPNEKVLPKHSLLYEYFTVYNELTKVKYVTEGMRKPAFLSGEQKKAIVDLLFKTNRKVTVKQLKEDYFKKIECFDSVEISGVEDRFNASLGTYHDLLKIIKDKDFLDNEENEDILEDIVLTLTLFEDREMIEERLKTYAHLFDDKVMKQLKRRRYTGWGRLSRKLINGIRDKQSGKTILDFLKSDGFANRNFMQLIHDDSLTFKEDIQKAQVSGQGDSLHEHIANLAGSPAIKKGILQTVKVVDELVKVMGRHKPENIVIEMARENQTTQKGQKNSRERMKRIEEGIKELGSQILKEHPVENTQLQNEKLYLYYLQNGRDMYVDQELDINRLSDYDVDHIVPQSFLKDDSIDNKVLTRSDKARGKSDNVPSEEVVKKMKNYWRQLLNAKLITQRKFDNLTKAERGGLSELDKAGFIKRQLVETRQITKHVAQILDSRMNTKYDENDKLIREVKVITLKSKLVSDFRKDFQFYKVREINNYHHAHDAYLNAVVGTALIKKYPKLESEFVYGDYKVYDVRKMIAKSEQEIGKATAKYFFYSNIMNFFKTEITLANGEIRKRPLIETNGETGEIVWDKGRDFATVRKVLSMPQVNIVKKTEVQTGGFSKESILPKRNSDKLIARKKDWDPKKYGGFDSPTVAYSVLVVAKVEKGKSKKLKSVKELLGITIMERSSFEKNPIDFLEAKGYKEVKKDLIIKLPKYSLFELENGRKRMLASAGELQKGNELALPSKYVNFLYLASHYEKLKGSPEDNEQKQLFVEQHKHYLDEIIEQISEFSKRVILADANLDKVLSAYNKHRDKPIREQAENIIHLFTLTNLGAPAAFKYFDTTIDRKRYTSTKEVLDATLIHQSITGLYETRIDLSQLGGDGGGGSPAPGSSGGMNPLQLLQPLPAEIKGTKLLAHWNSGATITCIPESFLEDEQPIKKTLIKTIHGEKQQNVYYVTFKVKGRKVEAEVIASPYEYILLSPTDVPWLTQQPLQLTILVPLQEYQEKILSKTALPEDQKQQLKTLFVKYDNLWQHWENQVGHRKIRPHNIATGDYPPRPQKQYPINPKAKPSIQIVIDDLLKQGVLTPQNSTMNTPVYPVPKPDGRWRMVLDYREVNKTIPLTAAQNQHSAGILATIVRQKYKTTLDLANGFWAHPITPESYWLTAFTWQGKQYCWTRLPQGFLNSPALFNADVVDLLKEIPNVQVYVDDIYLSHDDPKEHVQQLEKVFQILLQAGYVVSLKKSEIGQKTVEFLGFNITKEGRGLTDTFKTKLLNITPPKDLKQLQSILGLLNFARNFIPNFAELVQPLYNLIAPAKGKYIEWSEENTKQLNMVIEALNTASNLEERLPEQRLVIKVNTSPSAGYVRYYNETGKKPIMYLNYVFSKAELKFSMLEKLLTTMHKALIKAMDLAMGQEILVYSPIVSMTKIQKTPLPERKALPIRWITWMTYLEDPRIQFHYDKTLPELKHIPDVYTSSQSPVKHPSQYEGVFYTDGSAIKSPDPTKSNNAGMGIVHATYKPEYQVLNQWSIPLGNHTAQMAEIAAVEFACKKALKIPGPVLVITDSFYVAESANKELPYWKSNGFVNNKKKPLKHISKWKSIAECLSMKPDITIQHEKGISLQIPVFILKGNALADKLATQGSYVVNAGKRTADGSEFEKRTADGSEFESPKKKAKVE

SEQ ID NO: 1332 - protein, 2177 aa, synthetic construct
  source 1..2177: note = Description of Artificial Sequence: Synthetic polypeptide
MPAAKRVKLDGGDKKYSIGLDIGTNSVGWAVITDEYKVPSKKFKVLGNTDRHSIKKNLIGALLFDSGETAEATRLKRTARRRYTRRKNRICYLQEIFSNEMAKVDDSFFHRLEESFLVEEDKKHERHPIFGNIVDEVAYHEKYPTIYHLRKKLVDSTDKADLRLIYLALAHMIKFRGHFLIEGDLNPDNSDVDKLFIQLVQTYNQLFEENPINASGVDAKAILSARLSKSRRLENLIAQLPGEKKNGLFGNLIALSLGLTPNFKSNFDLAEDAKLQLSKDTYDDDLDNLLAQIGDQYADLFLAAKNLSDAILLSDILRVNTEITKAPLSASMIKRYDEHHQDLTLLKALVRQQLPEKYKEIFFDQSKNGYAGYIDGGASQEEFYKFIKPILEKMDGTEELLVKLNREDLLRKQRTFDNGSIPHQIHLGELHAILRRQEDFYPFLKDNREKIEKILTFRIPYYVGPLARGNSRFAWMTRKSEETITPWNFEEVVDKGASAQSFIERMTNFDKNLPNEKVLPKHSLLYEYFTVYNELTKVKYVTEGMRKPAFLSGEQKKAIVDLLFKTNRKVTVKQLKEDYFKKIECFDSVEISGVEDRFNASLGTYHDLLKIIKDKDFLDNEENEDILEDIVLTLTLFEDREMIEERLKTYAHLFDDKVMKQLKRRRYTGWGRLSRKLINGIRDKQSGKTILDFLKSDGFANRNFMQLIHDDSLTFKEDIQKAQVSGQGDSLHEHIANLAGSPAIKKGILQTVKVVDELVKVMGRHKPENIVIEMARENQTTQKGQKNSRERMKRIEEGIKELGSQILKEHPVENTQLQNEKLYLYYLQNGRDMYVDQELDINRLSDYDVDHIVPQSFLKDDSIDNKVLTRSDKARGKSDNVPSEEVVKKMKNYWRQLLNAKLITQRKFDNLTKAERGGLSELDKAGFIKRQLVETRQITKHVAQILDSRMNTKYDENDKLIREVKVITLKSKLVSDFRKDFQFYKVREINNYHHAHDAYLNAVVGTALIKKYPKLESEFVYGDYKVYDVRKMIAKSEQEIGKATAKYFFYSNIMNFFKTEITLANGEIRKRPLIETNGETGEIVWDKGRDFATVRKVLSMPQVNIVKKTEVQTGGFSKESILPKRNSDKLIARKKDWDPKKYGGFDSPTVAYSVLVVAKVEKGKSKKLKSVKELLGITIMERSSFEKNPIDFLEAKGYKEVKKDLIIKLPKYSLFELENGRKRMLASAGELQKGNELALPSKYVNFLYLASHYEKLKGSPEDNEQKQLFVEQHKHYLDEIIEQISEFSKRVILADANLDKVLSAYNKHRDKPIREQAENIIHLFTLTNLGAPAAFKYFDTTIDRKRYTSTKEVLDATLIHQSITGLYETRIDLSQLGGDGGGSSGSSGSSGSSGGMNPLQLLQPLPAEIKGTKLLAHWNSGATITCIPESFLEDEQPIKKTLIKTIHGEKQQNVYYVTFKVKGRKVEAEVIASPYEYILLSPTDVPWLTQQPLQLTILVPLQEYQEKILSKTALPEDQKQQLKTLFVKYDNLWQHWENQVGHRKIRPHNIATGDYPPRPQKQYPINPKAKPSIQIVIDDLLKQGVLTPQNSTMNTPVYPVPKPDGRWRMVLDYREVNKTIPLTAAQNQHSAGILATIVRQKYKTTLDLANGFWAHPITPESYWLTAFTWQGKQYCWTRLPQGFLNSPALFNADVVDLLKEIPNVQVYVDDIYLSHDDPKEHVQQLEKVFQILLQAGYVVSLKKSEIGQKTVEFLGFNITKEGRGLTDTFKTKLLNITPPKDLKQLQSILGLLNFARNFIPNFAELVQPLYNLIAPAKGKYIEWSEENTKQLNMVIEALNTASNLEERLPEQRLVIKVNTSPSAGYVRYYNETGKKPIMYLNYVFSKAELKFSMLEKLLTTMHKALIKAMDLAMGQEILVYSPIVSMTKIQKTPLPERKALPIRWITWMTYLEDPRIQFHYDKTLPELKHIPDVYTSSQSPVKHPSQYEGVFYTDGSAIKSPDPTKSNNAGMGIVHATYKPEYQVLNQWSIPLGNHTAQMAEIAAVEFACKKALKIPGPVLVITDSFYVAESANKELPYWKSNGFVNNKKKPLKHISKWKSIAECLSMKPDITIQHEKGISLQIPVFILKGNALADKLATQGSYVVNAGKRTADGSEFEKRTADGSEFESPKKKAKVE

SEQ ID NO: 1333 - protein, 2174 aa, synthetic construct
  source 1..2174: note = Description of Artificial Sequence: Synthetic polypeptide
MPAAKRVKLDGGDKKYSIGLDIGTNSVGWAVITDEYKVPSKKFKVLGNTDRHSIKKNLIGALLFDSGETAEATRLKRTARRRYTRRKNRICYLQEIFSNEMAKVDDSFFHRLEESFLVEEDKKHERHPIFGNIVDEVAYHEKYPTIYHLRKKLVDSTDKADLRLIYLALAHMIKFRGHFLIEGDLNPDNSDVDKLFIQLVQTYNQLFEENPINASGVDAKAILSARLSKSRRLENLIAQLPGEKKNGLFGNLIALSLGLTPNFKSNFDLAEDAKLQLSKDTYDDDLDNLLAQIGDQYADLFLAAKNLSDAILLSDILRVNTEITKAPLSASMIKRYDEHHQDLTLLKALVRQQLPEKYKEIFFDQSKNGYAGYIDGGASQEEFYKFIKPILEKMDGTEELLVKLNREDLLRKQRTFDNGSIPHQIHLGELHAILRRQEDFYPFLKDNREKIEKILTFRIPYYVGPLARGNSRFAWMTRKSEETITPWNFEEVVDKGASAQSFIERMTNFDKNLPNEKVLPKHSLLYEYFTVYNELTKVKYVTEGMRKPAFLSGEQKKAIVDLLFKTNRKVTVKQLKEDYFKKIECFDSVEISGVEDRFNASLGTYHDLLKIIKDKDFLDNEENEDILEDIVLTLTLFEDREMIEERLKTYAHLFDDKVMKQLKRRRYTGWGRLSRKLINGIRDKQSGKTILDFLKSDGFANRNFMQLIHDDSLTFKEDIQKAQVSGQGDSLHEHIANLAGSPAIKKGILQTVKVVDELVKVMGRHKPENIVIEMARENQTTQKGQKNSRERMKRIEEGIKELGSQILKEHPVENTQLQNEKLYLYYLQNGRDMYVDQELDINRLSDYDVDHIVPQSFLKDDSIDNKVLTRSDKARGKSDNVPSEEVVKKMKNYWRQLLNAKLITQRKFDNLTKAERGGLSELDKAGFIKRQLVETRQITKHVAQILDSRMNTKYDENDKLIREVKVITLKSKLVSDFRKDFQFYKVREINNYHHAHDAYLNAVVGTALIKKYPKLESEFVYGDYKVYDVRKMIAKSEQEIGKATAKYFFYSNIMNFFKTEITLANGEIRKRPLIETNGETGEIVWDKGRDFATVRKVLSMPQVNIVKKTEVQTGGFSKESILPKRNSDKLIARKKDWDPKKYGGFDSPTVAYSVLVVAKVEKGKSKKLKSVKELLGITIMERSSFEKNPIDFLEAKGYKEVKKDLIIKLPKYSLFELENGRKRMLASAGELQKGNELALPSKYVNFLYLASHYEKLKGSPEDNEQKQLFVEQHKHYLDEIIEQISEFSKRVILADANLDKVLSAYNKHRDKPIREQAENIIHLFTLTNLGAPAAFKYFDTTIDRKRYTSTKEVLDATLIHQSITGLYETRIDLSQLGGDGGPAPGSSGGSGGMNPLQLLQPLPAEIKGTKLLAHWNSGATITCIPESFLEDEQPIKKTLIKTIHGEKQQNVYYVTFKVKGRKVEAEVIASPYEYILLSPTDVPWLTQQPLQLTILVPLQEYQEKILSKTALPEDQKQQLKTLFVKYDNLWQHWENQVGHRKIRPHNIATGDYPPRPQKQYPINPKAKPSIQIVIDDLLKQGVLTPQNSTMNTPVYPVPKPDGRWRMVLDYREVNKTIPLTAAQNQHSAGILATIVRQKYKTTLDLANGFWAHPITPESYWLTAFTWQGKQYCWTRLPQGFLNSPALFNADVVDLLKEIPNVQVYVDDIYLSHDDPKEHVQQLEKVFQILLQAGYVVSLKKSEIGQKTVEFLGFNITKEGRGLTDTFKTKLLNITPPKDLKQLQSILGLLNFARNFIPNFAELVQPLYNLIAPAKGKYIEWSEENTKQLNMVIEALNTASNLEERLPEQRLVIKVNTSPSAGYVRYYNETGKKPIMYLNYVFSKAELKFSMLEKLLTTMHKALIKAMDLAMGQEILVYSPIVSMTKIQKTPLPERKALPIRWITWMTYLEDPRIQFHYDKTLPELKHIPDVYTSSQSPVKHPSQYEGVFYTDGSAIKSPDPTKSNNAGMGIVHATYKPEYQVLNQWSIPLGNHTAQMAEIAAVEFACKKALKIPGPVLVITDSFYVAESANKELPYWKSNGFVNNKKKPLKHISKWKSIAECLSMKPDITIQHEKGISLQIPVFILKGNALADKLATQGSYVVNAGKRTADGSEFEKRTADGSEFESPKKKAKVE

SEQ ID NO: 1334 - protein, 2176 aa, synthetic construct
  source 1..2176: note = Description of Artificial Sequence: Synthetic polypeptide
MPAAKRVKLDGGDKKYSIGLDIGTNSVGWAVITDEYKVPSKKFKVLGNTDRHSIKKNLIGALLFDSGETAEATRLKRTARRRYTRRKNRICYLQEIFSNEMAKVDDSFFHRLEESFLVEEDKKHERHPIFGNIVDEVAYHEKYPTIYHLRKKLVDSTDKADLRLIYLALAHMIKFRGHFLIEGDLNPDNSDVDKLFIQLVQTYNQLFEENPINASGVDAKAILSARLSKSRRLENLIAQLPGEKKNGLFGNLIALSLGLTPNFKSNFDLAEDAKLQLSKDTYDDDLDNLLAQIGDQYADLFLAAKNLSDAILLSDILRVNTEITKAPLSASMIKRYDEHHQDLTLLKALVRQQLPEKYKEIFFDQSKNGYAGYIDGGASQEEFYKFIKPILEKMDGTEELLVKLNREDLLRKQRTFDNGSIPHQIHLGELHAILRRQEDFYPFLKDNREKIEKILTFRIPYYVGPLARGNSRFAWMTRKSEETITPWNFEEVVDKGASAQSFIERMTNFDKNLPNEKVLPKHSLLYEYFTVYNELTKVKYVTEGMRKPAFLSGEQKKAIVDLLFKTNRKVTVKQLKEDYFKKIECFDSVEISGVEDRFNASLGTYHDLLKIIKDKDFLDNEENEDILEDIVLTLTLFEDREMIEERLKTYAHLFDDKVMKQLKRRRYTGWGRLSRKLINGIRDKQSGKTILDFLKSDGFANRNFMQLIHDDSLTFKEDIQKAQVSGQGDSLHEHIANLAGSPAIKKGILQTVKVVDELVKVMGRHKPENIVIEMARENQTTQKGQKNSRERMKRIEEGIKELGSQILKEHPVENTQLQNEKLYLYYLQNGRDMYVDQELDINRLSDYDVDHIVPQSFLKDDSIDNKVLTRSDKARGKSDNVPSEEVVKKMKNYWRQLLNAKLITQRKFDNLTKAERGGLSELDKAGFIKRQLVETRQITKHVAQILDSRMNTKYDENDKLIREVKVITLKSKLVSDFRKDFQFYKVREINNYHHAHDAYLNAVVGTALIKKYPKLESEFVYGDYKVYDVRKMIAKSEQEIGKATAKYFFYSNIMNFFKTEITLANGEIRKRPLIETNGETGEIVWDKGRDFATVRKVLSMPQVNIVKKTEVQTGGFSKESILPKRNSDKLIARKKDWDPKKYGGFDSPTVAYSVLVVAKVEKGKSKKLKSVKELLGITIMERSSFEKNPIDFLEAKGYKEVKKDLIIKLPKYSLFELENGRKRMLASAGELQKGNELALPSKYVNFLYLASHYEKLKGSPEDNEQKQLFVEQHKHYLDEIIEQISEFSKRVILADANLDKVLSAYNKHRDKPIREQAENIIHLFTLTNLGAPAAFKYFDTTIDRKRYTSTKEVLDATLIHQSITGLYETRIDLSQLGGDGGEAAAKGGGGGSGGMNPLQLLQPLPAEIKGTKLLAHWNSGATITCIPESFLEDEQPIKKTLIKTIHGEKQQNVYYVTFKVKGRKVEAEVIASPYEYILLSPTDVPWLTQQPLQLTILVPLQEYQEKILSKTALPEDQKQQLKTLFVKYDNLWQHWENQVGHRKIRPHNIATGDYPPRPQKQYPINPKAKPSIQIVIDDLLKQGVLTPQNSTMNTPVYPVPKPDGRWRMVLDYREVNKTIPLTAAQNQHSAGILATIVRQKYKTTLDLANGFWAHPITPESYWLTAFTWQGKQYCWTRLPQGFLNSPALFNADVVDLLKEIPNVQVYVDDIYLSHDDPKEHVQQLEKVFQILLQAGYVVSLKKSEIGQKTVEFLGFNITKEGRGLTDTFKTKLLNITPPKDLKQLQSILGLLNFARNFIPNFAELVQPLYNLIAPAKGKYIEWSEENTKQLNMVIEALNTASNLEERLPEQRLVIKVNTSPSAGYVRYYNETGKKPIMYLNYVFSKAELKFSMLEKLLTTMHKALIKAMDLAMGQEILVYSPIVSMTKIQKTPLPERKALPIRWITWMTYLEDPRIQFHYDKTLPELKHIPDVYTSSQSPVKHPSQYEGVFYTDGSAIKSPDPTKSNNAGMGIVHATYKPEYQVLNQWSIPLGNHTAQMAEIAAVEFACKKALKIPGPVLVITDSFYVAESANKELPYWKSNGFVNNKKKPLKHISKWKSIAECLSMKPDITIQHEKGISLQIPVFILKGNALADKLATQGSYVVNAGKRTADGSEFEKRTADGSEFESPKKKAKVE

SEQ ID NO: 1335 - protein, 2176 aa, synthetic construct
  source 1..2176: note = Description of Artificial Sequence: Synthetic polypeptide
MPAAKRVKLDGGDKKYSIGLDIGTNSVGWAVITDEYKVPSKKFKVLGNTDRHSIKKNLIGALLFDSGETAEATRLKRTARRRYTRRKNRICYLQEIFSNEMAKVDDSFFHRLEESFLVEEDKKHERHPIFGNIVDEVAYHEKYPTIYHLRKKLVDSTDKADLRLIYLALAHMIKFRGHFLIEGDLNPDNSDVDKLFIQLVQTYNQLFEENPINASGVDAKAILSARLSKSRRLENLIAQLPGEKKNGLFGNLIALSLGLTPNFKSNFDLAEDAKLQLSKDTYDDDLDNLLAQIGDQYADLFLAAKNLSDAILLSDILRVNTEITKAPLSASMIKRYDEHHQDLTLLKALVRQQLPEKYKEIFFDQSKNGYAGYIDGGASQEEFYKFIKPILEKMDGTEELLVKLNREDLLRKQRTFDNGSIPHQIHLGELHAILRRQEDFYPFLKDNREKIEKILTFRIPYYVGPLARGNSRFAWMTRKSEETITPWNFEEVVDKGASAQSFIERMTNFDKNLPNEKVLPKHSLLYEYFTVYNELTKVKYVTEGMRKPAFLSGEQKKAIVDLLFKTNRKVTVKQLKEDYFKKIECFDSVEISGVEDRFNASLGTYHDLLKIIKDKDFLDNEENEDILEDIVLTLTLFEDREMIEERLKTYAHLFDDKVMKQLKRRRYTGWGRLSRKLINGIRDKQSGKTILDFLKSDGFANRNFMQLIHDDSLTFKEDIQKAQVSGQGDSLHEHIANLAGSPAIKKGILQTVKVVDELVKVMGRHKPENIVIEMARENQTTQKGQKNSRERMKRIEEGIKELGSQILKEHPVENTQLQNEKLYLYYLQNGRDMYVDQELDINRLSDYDVDHIVPQSFLKDDSIDNKVLTRSDKARGKSDNVPSEEVVKKMKNYWRQLLNAKLITQRKFDNLTKAERGGLSELDKAGFIKRQLVETRQITKHVAQILDSRMNTKYDENDKLIREVKVITLKSKLVSDFRKDFQFYKVREINNYHHAHDAYLNAVVGTALIKKYPKLESEFVYGDYKVYDVRKMIAKSEQEIGKATAKYFFYSNIMNFFKTEITLANGEIRKRPLIETNGETGEIVWDKGRDFATVRKVLSMPQVNIVKKTEVQTGGFSKESILPKRNSDKLIARKKDWDPKKYGGFDSPTVAYSVLVVAKVEKGKSKKLKSVKELLGITIMERSSFEKNPIDFLEAKGYKEVKKDLIIKLPKYSLFELENGRKRMLASAGELQKGNELALPSKYVNFLYLASHYEKLKGSPEDNEQKQLFVEQHKHYLDEIIEQISEFSKRVILADANLDKVLSAYNKHRDKPIREQAENIIHLFTLTNLGAPAAFKYFDTTIDRKRYTSTKEVLDATLIHQSITGLYETRIDLSQLGGDGGEAAAKGGGGSSGGMNPLQLLQPLPAEIKGTKLLAHWNSGATITCIPESFLEDEQPIKKTLIKTIHGEKQQNVYYVTFKVKGRKVEAEVIASPYEYILLSPTDVPWLTQQPLQLTILVPLQEYQEKILSKTALPEDQKQQLKTLFVKYDNLWQHWENQVGHRKIRPHNIATGDYPPRPQKQYPINPKAKPSIQIVIDDLLKQGVLTPQNSTMNTPVYPVPKPDGRWRMVLDYREVNKTIPLTAAQNQHSAGILATIVRQKYKTTLDLANGFWAHPITPESYWLTAFTWQGKQYCWTRLPQGFLNSPALFNADVVDLLKEIPNVQVYVDDIYLSHDDPKEHVQQLEKVFQILLQAGYVVSLKKSEIGQKTVEFLGFNITKEGRGLTDTFKTKLLNITPPKDLKQLQSILGLLNFARNFIPNFAELVQPLYNLIAPAKGKYIEWSEENTKQLNMVIEALNTASNLEERLPEQRLVIKVNTSPSAGYVRYYNETGKKPIMYLNYVFSKAELKFSMLEKLLTTMHKALIKAMDLAMGQEILVYSPIVSMTKIQKTPLPERKALPIRWITWMTYLEDPRIQFHYDKTLPELKHIPDVYTSSQSPVKHPSQYEGVFYTDGSAIKSPDPTKSNNAGMGIVHATYKPEYQVLNQWSIPLGNHTAQMAEIAAVEFACKKALKIPGPVLVITDSFYVAESANKELPYWKSNGFVNNKKKPLKHISKWKSIAECLSMKPDITIQHEKGISLQIPVFILKGNALADKLATQGSYVVNAGKRTADGSEFEKRTADGSEFESPKKKAKVE

SEQ ID NO: 1336 - protein, 2174 aa, synthetic construct
  source 1..2174: note = Description of Artificial Sequence: Synthetic polypeptide
MPAAKRVKLDGGDKKYSIGLDIGTNSVGWAVITDEYKVPSKKFKVLGNTDRHSIKKNLIGALLFDSGETAEATRLKRTARRRYTRRKNRICYLQEIFSNEMAKVDDSFFHRLEESFLVEEDKKHERHPIFGNIVDEVAYHEKYPTIYHLRKKLVDSTDKADLRLIYLALAHMIKFRGHFLIEGDLNPDNSDVDKLFIQLVQTYNQLFEENPINASGVDAKAILSARLSKSRRLENLIAQLPGEKKNGLFGNLIALSLGLTPNFKSNFDLAEDAKLQLSKDTYDDDLDNLLAQIGDQYADLFLAAKNLSDAILLSDILRVNTEITKAPLSASMIKRYDEHHQDLTLLKALVRQQLPEKYKEIFFDQSKNGYAGYIDGGASQEEFYKFIKPILEKMDGTEELLVKLNREDLLRKQRTFDNGSIPHQIHLGELHAILRRQEDFYPFLKDNREKIEKILTFRIPYYVGPLARGNSRFAWMTRKSEETITPWNFEEVVDKGASAQSFIERMTNFDKNLPNEKVLPKHSLLYEYFTVYNELTKVKYVTEGMRKPAFLSGEQKKAIVDLLFKTNRKVTVKQLKEDYFKKIECFDSVEISGVEDRFNASLGTYHDLLKIIKDKDFLDNEENEDILEDIVLTLTLFEDREMIEERLKTYAHLFDDKVMKQLKRRRYTGWGRLSRKLINGIRDKQSGKTILDFLKSDGFANRNFMQLIHDDSLTFKEDIQKAQVSGQGDSLHEHIANLAGSPAIKKGILQTVKVVDELVKVMGRHKPENIVIEMARENQTTQKGQKNSRERMKRIEEGIKELGSQILKEHPVENTQLQNEKLYLYYLQNGRDMYVDQELDINRLSDYDVDHIVPQSFLKDDSIDNKVLTRSDKARGKSDNVPSEEVVKKMKNYWRQLLNAKLITQRKFDNLTKAERGGLSELDKAGFIKRQLVETRQITKHVAQILDSRMNTKYDENDKLIREVKVITLKSKLVSDFRKDFQFYKVREINNYHHAHDAYLNAVVGTALIKKYPKLESEFVYGDYKVYDVRKMIAKSEQEIGKATAKYFFYSNIMNFFKTEITLANGEIRKRPLIETNGETGEIVWDKGRDFATVRKVLSMPQVNIVKKTEVQTGGFSKESILPKRNSDKLIARKKDWDPKKYGGFDSPTVAYSVLVVAKVEKGKSKKLKSVKELLGITIMERSSFEKNPIDFLEAKGYKEVKKDLIIKLPKYSLFELENGRKRMLASAGELQKGNELALPSKYVNFLYLASHYEKLKGSPEDNEQKQLFVEQHKHYLDEIIEQISEFSKRVILADANLDKVLSAYNKHRDKPIREQAENIIHLFTLTNLGAPAAFKYFDTTIDRKRYTSTKEVLDATLIHQSITGLYETRIDLSQLGGDGGGGGGSSPAPGGMNPLQLLQPLPAEIKGTKLLAHWNSGATITCIPESFLEDEQPIKKTLIKTIHGEKQQNVYYVTFKVKGRKVEAEVIASPYEYILLSPTDVPWLTQQPLQLTILVPLQEYQEKILSKTALPEDQKQQLKTLFVKYDNLWQHWENQVGHRKIRPHNIATGDYPPRPQKQYPINPKAKPSIQIVIDDLLKQGVLTPQNSTMNTPVYPVPKPDGRWRMVLDYREVNKTIPLTAAQNQHSAGILATIVRQKYKTTLDLANGFWAHPITPESYWLTAFTWQGKQYCWTRLPQGFLNSPALFNADVVDLLKEIPNVQVYVDDIYLSHDDPKEHVQQLEKVFQILLQAGYVVSLKKSEIGQKTVEFLGFNITKEGRGLTDTFKTKLLNITPPKDLKQLQSILGLLNFARNFIPNFAELVQPLYNLIAPAKGKYIEWSEENTKQLNMVIEALNTASNLEERLPEQRLVIKVNTSPSAGYVRYYNETGKKPIMYLNYVFSKAELKFSMLEKLLTTMHKALIKAMDLAMGQEILVYSPIVSMTKIQKTPLPERKALPIRWITWMTYLEDPRIQFHYDKTLPELKHIPDVYTSSQSPVKHPSQYEGVFYTDGSAIKSPDPTKSNNAGMGIVHATYKPEYQVLNQWSIPLGNHTAQMAEIAAVEFACKKALKIPGPVLVITDSFYVAESANKELPYWKSNGFVNNKKKPLKHISKWKSIAECLSMKPDITIQHEKGISLQIPVFILKGNALADKLATQGSYVVNAGKRTADGSEFEKRTADGSEFESPKKKAKVE

SEQ ID NO: 1337 - protein, 2176 aa, synthetic construct
  source 1..2176: note = Description of Artificial Sequence: Synthetic polypeptide
MPAAKRVKLDGGDKKYSIGLDIGTNSVGWAVITDEYKVPSKKFKVLGNTDRHSIKKNLIGALLFDSGETAEATRLKRTARRRYTRRKNRICYLQEIFSNEMAKVDDSFFHRLEESFLVEEDKKHERHPIFGNIVDEVAYHEKYPTIYHLRKKLVDSTDKADLRLIYLALAHMIKFRGHFLIEGDLNPDNSDVDKLFIQLVQTYNQLFEENPINASGVDAKAILSARLSKSRRLENLIAQLPGEKKNGLFGNLIALSLGLTPNFKSNFDLAEDAKLQLSKDTYDDDLDNLLAQIGDQYADLFLAAKNLSDAILLSDILRVNTEITKAPLSASMIKRYDEHHQDLTLLKALVRQQLPEKYKEIFFDQSKNGYAGYIDGGASQEEFYKFIKPILEKMDGTEELLVKLNREDLLRKQRTFDNGSIPHQIHLGELHAILRRQEDFYPFLKDNREKIEKILTFRIPYYVGPLARGNSRFAWMTRKSEETITPWNFEEVVDKGASAQSFIERMTNFDKNLPNEKVLPKHSLLYEYFTVYNELTKVKYVTEGMRKPAFLSGEQKKAIVDLLFKTNRKVTVKQLKEDYFKKIECFDSVEISGVEDRFNASLGTYHDLLKIIKDKDFLDNEENEDILEDIVLTLTLFEDREMIEERLKTYAHLFDDKVMKQLKRRRYTGWGRLSRKLINGIRDKQSGKTILDFLKSDGFANRNFMQLIHDDSLTFKEDIQKAQVSGQGDSLHEHIANLAGSPAIKKGILQTVKVVDELVKVMGRHKPENIVIEMARENQTTQKGQKNSRERMKRIEEGIKELGSQILKEHPVENTQLQNEKLYLYYLQNGRDMYVDQELDINRLSDYDVDHIVPQSFLKDDSIDNKVLTRSDKARGKSDNVPSEEVVKKMKNYWRQLLNAKLITQRKFDNLTKAERGGLSELDKAGFIKRQLVETRQITKHVAQILDSRMNTKYDENDKLIREVKVITLKSKLVSDFRKDFQFYKVREINNYHHAHDAYLNAVVGTALIKKYPKLESEFVYGDYKVYDVRKMIAKSEQEIGKATAKYFFYSNIMNFFKTEITLANGEIRKRPLIETNGETGEIVWDKGRDFATVRKVLSMPQVNIVKKTEVQTGGFSKESILPKRNSDKLIARKKDWDPKKYGGFDSPTVAYSVLVVAKVEKGKSKKLKSVKELLGITIMERSSFEKNPIDFLEAKGYKEVKKDLIIKLPKYSLFELENGRKRMLASAGELQKGNELALPSKYVNFLYLASHYEKLKGSPEDNEQKQLFVEQHKHYLDEIIEQISEFSKRVILADANLDKVLSAYNKHRDKPIREQAENIIHLFTLTNLGAPAAFKYFDTTIDRKRYTSTKEVLDATLIHQSITGLYETRIDLSQLGGDGGGGGGSSEAAAKGGMNPLQLLQPLPAEIKGTKLLAHWNSGATITCIPESFLEDEQPIKKTLIKTIHGEKQQNVYYVTFKVKGRKVEAEVIASPYEYILLSPTDVPWLTQQPLQLTILVPLQEYQEKILSKTALPEDQKQQLKTLFVKYDNLWQHWENQVGHRKIRPHNIATGDYPPRPQKQYPINPKAKPSIQIVIDDLLKQGVLTPQNSTMNTPVYPVPKPDGRWRMVLDYREVNKTIPLTAAQNQHSAGILATIVRQKYKTTLDLANGFWAHPITPESYWLTAFTWQGKQYCWTRLPQGFLNSPALFNADVVDLLKEIPNVQVYVDDIYLSHDDPKEHVQQLEKVFQILLQAGYVVSLKKSEIGQKTVEFLGFNITKEGRGLTDTFKTKLLNITPPKDLKQLQSILGLLNFARNFIPNFAELVQPLYNLIAPAKGKYIEWSEENTKQLNMVIEALNTASNLEERLPEQRLVIKVNTSPSAGYVRYYNETGKKPIMYLNYVFSKAELKFSMLEKLLTTMHKALIKAMDLAMGQEILVYSPIVSMTKIQKTPLPERKALPIRWITWMTYLEDPRIQFHYDKTLPELKHIPDVYTSSQSPVKHPSQYEGVFYTDGSAIKSPDPTKSNNAGMGIVHATYKPEYQVLNQWSIPLGNHTAQMAEIAAVEFACKKALKIPGPVLVITDSFYVAESANKELPYWKSNGFVNNKKKPLKHISKWKSIAECLSMKPDITIQHEKGISLQIPVFILKGNALADKLATQGSYVVNAGKRTADGSEFEKRTADGSEFESPKKKAKVE

SEQ ID NO: 1338 - protein, 2174 aa, synthetic construct
  source 1..2174: note = Description of Artificial Sequence: Synthetic polypeptide
MPAAKRVKLDGGDKKYSIGLDIGTNSVGWAVITDEYKVPSKKFKVLGNTDRHSIKKNLIGALLFDSGETAEATRLKRTARRRYTRRKNRICYLQEIFSNEMAKVDDSFFHRLEESFLVEEDKKHERHPIFGNIVDEVAYHEKYPTIYHLRKKLVDSTDKADLRLIYLALAHMIKFRGHFLIEGDLNPDNSDVDKLFIQLVQTYNQLFEENPINASGVDAKAILSARLSKSRRLENLIAQLPGEKKNGLFGNLIALSLGLTPNFKSNFDLAEDAKLQLSKDTYDDDLDNLLAQIGDQYADLFLAAKNLSDAILLSDILRVNTEITKAPLSASMIKRYDEHHQDLTLLKALVRQQLPEKYKEIFFDQSKNGYAGYIDGGASQEEFYKFIKPILEKMDGTEELLVKLNREDLLRKQRTFDNGSIPHQIHLGELHAILRRQEDFYPFLKDNREKIEKILTFRIPYYVGPLARGNSRFAWMTRKSEETITPWNFEEVVDKGASAQSFIERMTNFDKNLPNEKVLPKHSLLYEYFTVYNELTKVKYVTEGMRKPAFLSGEQKKAIVDLLFKTNRKVTVKQLKEDYFKKIECFDSVEISGVEDRFNASLGTYHDLLKIIKDKDFLDNEENEDILEDIVLTLTLFEDREMIEERLKTYAHLFDDKVMKQLKRRRYTGWGRLSRKLINGIRDKQSGKTILDFLKSDGFANRNFMQLIHDDSLTFKEDIQKAQVSGQGDSLHEHIANLAGSPAIKKGILQTVKVVDELVKVMGRHKPENIVIEMARENQTTQKGQKNSRERMKRIEEGIKELGSQILKEHPVENTQLQNEKLYLYYLQNGRDMYVDQELDINRLSDYDVDHIVPQSFLKDDSIDNKVLTRSDKARGKSDNVPSEEVVKKMKNYWRQLLNAKLITQRKFDNLTKAERGGLSELDKAGFIKRQLVETRQITKHVAQILDSRMNTKYDENDKLIREVKVITLKSKLVSDFRKDFQFYKVREINNYHHAHDAYLNAVVGTALIKKYPKLESEFVYGDYKVYDVRKMIAKSEQEIGKATAKYFFYSNIMNFFKTEITLANGEIRKRPLIETNGETGEIVWDKGRDFATVRKVLSMPQVNIVKKTEVQTGGFSKESILPKRNSDKLIARKKDWDPKKYGGFDSPTVAYSVLVVAKVEKGKSKKLKSVKELLGITIMERSSFEKNPIDFLEAKGYKEVKKDLIIKLPKYSLFELENGRKRMLASAGELQKGNELALPSKYVNFLYLASHYEKLKGSPEDNEQKQLFVEQHKHYLDEIIEQISEFSKRVILADANLDKVLSAYNKHRDKPIREQAENIIHLFTLTNLGAPAAFKYFDTTIDRKRYTSTKEVLDATLIHQSITGLYETRIDLSQLGGDGGGGGGGSGSSGGMNPLQLLQPLPAEIKGTKLLAHWNSGATITCIPESFLEDEQPIKKTLIKTIHGEKQQNVYYVTFKVKGRKVEAEVIASPYEYILLSPTDVPWLTQQPLQLTILVPLQEYQEKILSKTALPEDQKQQLKTLFVKYDNLWQHWENQVGHRKIRPHNIATGDYPPRPQKQYPINPKAKPSIQIVIDDLLKQGVLTPQNSTMNTPVYPVPKPDGRWRMVLDYREVNKTIPLTAAQNQHSAGILATIVRQKYKTTLDLANGFWAHPITPESYWLTAFTWQGKQYCWTRLPQGFLNSPALFNADVVDLLKEIPNVQVYVDDIYLSHDDPKEHVQQLEKVFQILLQAGYVVSLKKSEIGQKTVEFLGFNITKEGRGLTDTFKTKLLNITPPKDLKQLQSILGLLNFARNFIPNFAELVQPLYNLIAPAKGKYIEWSEENTKQLNMVIEALNTASNLEERLPEQRLVIKVNTSPSAGYVRYYNETGKKPIMYLNYVFSKAELKFSMLEKLLTTMHKALIKAMDLAMGQEILVYSPIVSMTKIQKTPLPERKALPIRWITWMTYLEDPRIQFHYDKTLPELKHIPDVYTSSQSPVKHPSQYEGVFYTDGSAIKSPDPTKSNNAGMGIVHATYKPEYQVLNQWSIPLGNHTAQMAEIAAVEFACKKALKIPGPVLVITDSFYVAESANKELPYWKSNGFVNNKKKPLKHISKWKSIAECLSMKPDITIQHEKGISLQIPVFILKGNALADKLATQGSYVVNAGKRTADGSEFEKRTADGSEFESPKKKAKVE

SEQ ID NO: 1339 - protein, 2176 aa, synthetic construct
  source 1..2176: note = Description of Artificial Sequence: Synthetic polypeptide
MPAAKRVKLDGGDKKYSIGLDIGTNSVGWAVITDEYKVPSKKFKVLGNTDRHSIKKNLIGALLFDSGETAEATRLKRTARRRYTRRKNRICYLQEIFSNEMAKVDDSFFHRLEESFLVEEDKKHERHPIFGNIVDEVAYHEKYPTIYHLRKKLVDSTDKADLRLIYLALAHMIKFRGHFLIEGDLNPDNSDVDKLFIQLVQTYNQLFEENPINASGVDAKAILSARLSKSRRLENLIAQLPGEKKNGLFGNLIALSLGLTPNFKSNFDLAEDAKLQLSKDTYDDDLDNLLAQIGDQYADLFLAAKNLSDAILLSDILRVNTEITKAPLSASMIKRYDEHHQDLTLLKALVRQQLPEKYKEIFFDQSKNGYAGYIDGGASQEEFYKFIKPILEKMDGTEELLVKLNREDLLRKQRTFDNGSIPHQIHLGELHAILRRQEDFYPFLKDNREKIEKILTFRIPYYVGPLARGNSRFAWMTRKSEETITPWNFEEVVDKGASAQSFIERMTNFDKNLPNEKVLPKHSLLYEYFTVYNELTKVKYVTEGMRKPAFLSGEQKKAIVDLLFKTNRKVTVKQLKEDYFKKIECFDSVEISGVEDRFNASLGTYHDLLKIIKDKDFLDNEENEDILEDIVLTLTLFEDREMIEERLKTYAHLFDDKVMKQLKRRRYTGWGRLSRKLINGIRDKQSGKTILDFLKSDGFANRNFMQLIHDDSLTFKEDIQKAQVSGQGDSLHEHIANLAGSPAIKKGILQTVKVVDELVKVMGRHKPENIVIEMARENQTTQKGQKNSRERMKRIEEGIKELGSQILKEHPVENTQLQNEKLYLYYLQNGRDMYVDQELDINRLSDYDVDHIVPQSFLKDDSIDNKVLTRSDKARGKSDNVPSEEVVKKMKNYWRQLLNAKLITQRKFDNLTKAERGGLSELDKAGFIKRQLVETRQITKHVAQILDSRMNTKYDENDKLIREVKVITLKSKLVSDFRKDFQFYKVREINNYHHAHDAYLNAVVGTALIKKYPKLESEFVYGDYKVYDVRKMIAKSEQEIGKATAKYFFYSNIMNFFKTEITLANGEIRKRPLIETNGETGEIVWDKGRDFATVRKVLSMPQVNIVKKTEVQTGGFSKESILPKRNSDKLIARKKDWDPKKYGGFDSPTVAYSVLVVAKVEKGKSKKLKSVKELLGITIMERSSFEKNPIDFLEAKGYKEVKKDLIIKLPKYSLFELENGRKRMLASAGELQKGNELALPSKYVNFLYLASHYEKLKGSPEDNEQKQLFVEQHKHYLDEIIEQISEFSKRVILADANLDKVLSAYNKHRDKPIREQAENIIHLFTLTNLGAPAAFKYFDTTIDRKRYTSTKEVLDATLIHQSITGLYETRIDLSQLGGDGGGGGEAAAKGSSGGMNPLQLLQPLPAEIKGTKLLAHWNSGATITCIPESFLEDEQPIKKTLIKTIHGEKQQNVYYVTFKVKGRKVEAEVIASPYEYILLSPTDVPWLTQQPLQLTILVPLQEYQEKILSKTALPEDQKQQLKTLFVKYDNLWQHWENQVGHRKIRPHNIATGDYPPRPQKQYPINPKAKPSIQIVIDDLLKQGVLTPQNSTMNTPVYPVPKPDGRWRMVLDYREVNKTIPLTAAQNQHSAGILATIVRQKYKTTLDLANGFWAHPITPESYWLTAFTWQGKQYCWTRLPQGFLNSPALFNADVVDLLKEIPNVQVYVDDIYLSHDDPKEHVQQLEKVFQILLQAGYVVSLKKSEIGQKTVEFLGFNITKEGRGLTDTFKTKLLNITPPKDLKQLQSILGLLNFARNFIPNFAELVQPLYNLIAPAKGKYIEWSEENTKQLNMVIEALNTASNLEERLPEQRLVIKVNTSPSAGYVRYYNETGKKPIMYLNYVFSKAELKFSMLEKLLTTMHKALIKAMDLAMGQEILVYSPIVSMTKIQKTPLPERKALPIRWITWMTYLEDPRIQFHYDKTLPELKHIPDVYTSSQSPVKHPSQYEGVFYTDGSAIKSPDPTKSNNAGMGIVHATYKPEYQVLNQWSIPLGNHTAQMAEIAAVEFACKKALKIPGPVLVITDSFYVAESANKELPYWKSNGFVNNKKKPLKHISKWKSIAECLSMKPDITIQHEKGISLQIPVFILKGNALADKLATQGSYVVNAGKRTADGSEFEKRTADGSEFESPKKKAKVE

SEQ ID NO: 1340 - protein, 2171 aa, synthetic construct
  source 1..2171: note = Description of Artificial Sequence: Synthetic polypeptide
MPAAKRVKLDGGDKKYSIGLDIGTNSVGWAVITDEYKVPSKKFKVLGNTDRHSIKKNLIGALLFDSGETAEATRLKRTARRRYTRRKNRICYLQEIFSNEMAKVDDSFFHRLEESFLVEEDKKHERHPIFGNIVDEVAYHEKYPTIYHLRKKLVDSTDKADLRLIYLALAHMIKFRGHFLIEGDLNPDNSDVDKLFIQLVQTYNQLFEENPINASGVDAKAILSARLSKSRRLENLIAQLPGEKKNGLFGNLIALSLGLTPNFKSNFDLAEDAKLQLSKDTYDDDLDNLLAQIGDQYADLFLAAKNLSDAILLSDILRVNTEITKAPLSASMIKRYDEHHQDLTLLKALVRQQLPEKYKEIFFDQSKNGYAGYIDGGASQEEFYKFIKPILEKMDGTEELLVKLNREDLLRKQRTFDNGSIPHQIHLGELHAILRRQEDFYPFLKDNREKIEKILTFRIPYYVGPLARGNSRFAWMTRKSEETITPWNFEEVVDKGASAQSFIERMTNFDKNLPNEKVLPKHSLLYEYFTVYNELTKVKYVTEGMRKPAFLSGEQKKAIVDLLFKTNRKVTVKQLKEDYFKKIECFDSVEISGVEDRFNASLGTYHDLLKIIKDKDFLDNEENEDILEDIVLTLTLFEDREMIEERLKTYAHLFDDKVMKQLKRRRYTGWGRLSRKLINGIRDKQSGKTILDFLKSDGFANRNFMQLIHDDSLTFKEDIQKAQVSGQGDSLHEHIANLAGSPAIKKGILQTVKVVDELVKVMGRHKPENIVIEMARENQTTQKGQKNSRERMKRIEEGIKELGSQILKEHPVENTQLQNEKLYLYYLQNGRDMYVDQELDINRLSDYDVDHIVPQSFLKDDSIDNKVLTRSDKARGKSDNVPSEEVVKKMKNYWRQLLNAKLITQRKFDNLTKAERGGLSELDKAGFIKRQLVETRQITKHVAQILDSRMNTKYDENDKLIREVKVITLKSKLVSDFRKDFQFYKVREINNYHHAHDAYLNAVVGTALIKKYPKLESEFVYGDYKVYDVRKMIAKSEQEIGKATAKYFFYSNIMNFFKTEITLANGEIRKRPLIETNGETGEIVWDKGRDFATVRKVLSMPQVNIVKKTEVQTGGFSKESILPKRNSDKLIARKKDWDPKKYGGFDSPTVAYSVLVVAKVEKGKSKKLKSVKELLGITIMERSSFEKNPIDFLEAKGYKEVKKDLIIKLPKYSLFELENGRKRMLASAGELQKGNELALPSKYVNFLYLASHYEKLKGSPEDNEQKQLFVEQHKHYLDEIIEQISEFSKRVILADANLDKVLSAYNKHRDKPIREQAENIIHLFTLTNLGAPAAFKYFDTTIDRKRYTSTKEVLDATLIHQSITGLYETRIDLSQLGGDGGGSSGGGGGMNPLQLLQPLPAEIKGTKLLAHWNSGATITCIPESFLEDEQPIKKTLIKTIHGEKQQNVYYVTFKVKGRKVEAEVIASPYEYILLSPTDVPWLTQQPLQLTILVPLQEYQEKILSKTALPEDQKQQLKTLFVKYDNLWQHWENQVGHRKIRPHNIATGDYPPRPQKQYPINPKAKPSIQIVIDDLLKQGVLTPQNSTMNTPVYPVPKPDGRWRMVLDYREVNKTIPLTAAQNQHSAGILATIVRQKYKTTLDLANGFWAHPITPESYWLTAFTWQGKQYCWTRLPQGFLNSPALFNADVVDLLKEIPNVQVYVDDIYLSHDDPKEHVQQLEKVFQILLQAGYVVSLKKSEIGQKTVEFLGFNITKEGRGLTDTFKTKLLNITPPKDLKQLQSILGLLNFARNFIPNFAELVQPLYNLIAPAKGKYIEWSEENTKQLNMVIEALNTASNLEERLPEQRLVIKVNTSPSAGYVRYYNETGKKPIMYLNYVFSKAELKFSMLEKLLTTMHKALIKAMDLAMGQEILVYSPIVSMTKIQKTPLPERKALPIRWITWMTYLEDPRIQFHYDKTLPELKHIPDVYTSSQSPVKHPSQYEGVFYTDGSAIKSPDPTKSNNAGMGIVHATYKPEYQVLNQWSIPLGNHTAQMAEIAAVEFACKKALKIPGPVLVITDSFYVAESANKELPYWKSNGFVNNKKKPLKHISKWKSIAECLSMKPDITIQHEKGISLQIPVFILKGNALADKLATQGSYVVNAGKRTADGSEFEKRTADGSEFESPKKKAKVE

SEQ ID NO: 1341 - protein, 2171 aa, synthetic construct
  source 1..2171: note = Description of Artificial Sequence: Synthetic polypeptide
MPAAKRVKLDGGDKKYSIGLDIGTNSVGWAVITDEYKVPSKKFKVLGNTDRHSIKKNLIGALLFDSGETAEATRLKRTARRRYTRRKNRICYLQEIFSNEMAKVDDSFFHRLEESFLVEEDKKHERHPIFGNIVDEVAYHEKYPTIYHLRKKLVDSTDKADLRLIYLALAHMIKFRGHFLIEGDLNPDNSDVDKLFIQLVQTYNQLFEENPINASGVDAKAILSARLSKSRRLENLIAQLPGEKKNGLFGNLIALSLGLTPNFKSNFDLAEDAKLQLSKDTYDDDLDNLLAQIGDQYADLFLAAKNLSDAILLSDILRVNTEITKAPLSASMIKRYDEHHQDLTLLKALVRQQLPEKYKEIFFDQSKNGYAGYIDGGASQEEFYKFIKPILEKMDGTEELLVKLNREDLLRKQRTFDNGSIPHQIHLGELHAILRRQEDFYPFLKDNREKIEKILTFRIPYYVGPLARGNSRFAWMTRKSEETITPWNFEEVVDKGASAQSFIERMTNFDKNLPNEKVLPKHSLLYEYFTVYNELTKVKYVTEGMRKPAFLSGEQKKAIVDLLFKTNRKVTVKQLKEDYFKKIECFDSVEISGVEDRFNASLGTYHDLLKIIKDKDFLDNEENEDILEDIVLTLTLFEDREMIEERLKTYAHLFDDKVMKQLKRRRYTGWGRLSRKLINGIRDKQSGKTILDFLKSDGFANRNFMQLIHDDSLTFKEDIQKAQVSGQGDSLHEHIANLAGSPAIKKGILQTVKVVDELVKVMGRHKPENIVIEMARENQTTQKGQKNSRERMKRIEEGIKELGSQILKEHPVENTQLQNEKLYLYYLQNGRDMYVDQELDINRLSDYDVDHIVPQSFLKDDSIDNKVLTRSDKARGKSDNVPSEEVVKKMKNYWRQLLNAKLITQRKFDNLTKAERGGLSELDKAGFIKRQLVETRQITKHVAQILDSRMNTKYDENDKLIREVKVITLKSKLVSDFRKDFQFYKVREINNYHHAHDAYLNAVVGTALIKKYPKLESEFVYGDYKVYDVRKMIAKSEQEIGKATAKYFFYSNIMNFFKTEITLANGEIRKRPLIETNGETGEIVWDKGRDFATVRKVLSMPQVNIVKKTEVQTGGFSKESILPKRNSDKLIARKKDWDPKKYGGFDSPTVAYSVLVVAKVEKGKSKKLKSVKELLGITIMERSSFEKNPIDFLEAKGYKEVKKDLIIKLPKYSLFELENGRKRMLASAGELQKGNELALPSKYVNFLYLASHYEKLKGSPEDNEQKQLFVEQHKHYLDEIIEQISEFSKRVILADANLDKVLSAYNKHRDKPIREQAENIIHLFTLTNLGAPAAFKYFDTTIDRKRYTSTKEVLDATLIHQSITGLYETRIDLSQLGGDGGGGGGGSGGMNPLQLLQPLPAEIKGTKLLAHWNSGATITCIPESFLEDEQPIKKTLIKTIHGEKQQNVYYVTFKVKGRKVEAEVIASPYEYILLSPTDVPWLTQQPLQLTILVPLQEYQEKILSKTALPEDQKQQLKTLFVKYDNLWQHWENQVGHRKIRPHNIATGDYPPRPQKQYPINPKAKPSIQIVIDDLLKQGVLTPQNSTMNTPVYPVPKPDGRWRMVLDYREVNKTIPLTAAQNQHSAGILATIVRQKYKTTLDLANGFWAHPITPESYWLTAFTWQGKQYCWTRLPQGFLNSPALFNADVVDLLKEIPNVQVYVDDIYLSHDDPKEHVQQLEKVFQILLQAGYVVSLKKSEIGQKTVEFLGFNITKEGRGLTDTFKTKLLNITPPKDLKQLQSILGLLNFARNFIPNFAELVQPLYNLIAPAKGKYIEWSEENTKQLNMVIEALNTASNLEERLPEQRLVIKVNTSPSAGYVRYYNETGKKPIMYLNYVFSKAELKFSMLEKLLTTMHKALIKAMDLAMGQEILVYSPIVSMTKIQKTPLPERKALPIRWITWMTYLEDPRIQFHYDKTLPELKHIPDVYTSSQSPVKHPSQYEGVFYTDGSAIKSPDPTKSNNAGMGIVHATYKPEYQVLNQWSIPLGNHTAQMAEIAAVEFACKKALKIPGPVLVITDSFYVAESANKELPYWKSNGFVNNKKKPLKHISKWKSIAECLSMKPDITIQHEKGISLQIPVFILKGNALADKLATQGSYVVNAGKRTADGSEFEKRTADGSEFESPKKKAKVE

SEQ ID NO: 1342 - protein, 2176 aa, synthetic construct
  source 1..2176: note = Description of Artificial Sequence: Synthetic polypeptide
MPAAKRVKLDGGDKKYSIGLDIGTNSVGWAVITDEYKVPSKKFKVLGNTDRHSIKKNLIGALLFDSGETAEATRLKRTARRRYTRRKNRICYLQEIFSNEMAKVDDSFFHRLEESFLVEEDKKHERHPIFGNIVDEVAYHEKYPTIYHLRKKLVDSTDKADLRLIYLALAHMIKFRGHFLIEGDLNPDNSDVDKLFIQLVQTYNQLFEENPINASGVDAKAILSARLSKSRRLENLIAQLPGEKKNGLFGNLIALSLGLTPNFKSNFDLAEDAKLQLSKDTYDDDLDNLLAQIGDQYADLFLAAKNLSDAILLSDILRVNTEITKAPLSASMIKRYDEHHQDLTLLKALVRQQLPEKYKEIFFDQSKNGYAGYIDGGASQEEFYKFIKPILEKMDGTEELLVKLNREDLLRKQRTFDNGSIPHQIHLGELHAILRRQEDFYPFLKDNREKIEKILTFRIPYYVGPLARGNSRFAWMTRKSEETITPWNFEEVVDKGASAQSFIERMTNFDKNLPNEKVLPKHSLLYEYFTVYNELTKVKYVTEGMRKPAFLSGEQKKAIVDLLFKTNRKVTVKQLKEDYFKKIECFDSVEISGVEDRFNASLGTYHDLLKIIKDKDFLDNEENEDILEDIVLTLTLFEDREMIEERLKTYAHLFDDKVMKQLKRRRYTGWGRLSRKLINGIRDKQSGKTILDFLKSDGFANRNFMQLIHDDSLTFKEDIQKAQVSGQGDSLHEHIANLAGSPAIKKGILQTVKVVDELVKVMGRHKPENIVIEMARENQTTQKGQKNSRERMKRIEEGIKELGSQILKEHPVENTQLQNEKLYLYYLQNGRDMYVDQELDINRLSDYDVDHIVPQSFLKDDSIDNKVLTRSDKARGKSDNVPSEEVVKKMKNYWRQLLNAKLITQRKFDNLTKAERGGLSELDKAGFIKRQLVETRQITKHVAQILDSRMNTKYDENDKLIREVKVITLKSKLVSDFRKDFQFYKVREINNYHHAHDAYLNAVVGTALIKKYPKLESEFVYGDYKVYDVRKMIAKSEQEIGKATAKYFFYSNIMNFFKTEITLANGEIRKRPLIETNGETGEIVWDKGRDFATVRKVLSMPQVNIVKKTEVQTGGFSKESILPKRNSDKLIARKKDWDPKKYGGFDSPTVAYSVLVVAKVEKGKSKKLKSVKELLGITIMERSSFEKNPIDFLEAKGYKEVKKDLIIKLPKYSLFELENGRKRMLASAGELQKGNELALPSKYVNFLYLASHYEKLKGSPEDNEQKQLFVEQHKHYLDEIIEQISEFSKRVILADANLDKVLSAYNKHRDKPIREQAENIIHLFTLTNLGAPAAFKYFDTTIDRKRYTSTKEVLDATLIHQSITGLYETRIDLSQLGGDGGEAAAKGGGPAPGGMNPLQLLQPLPAEIKGTKLLAHWNSGATITCIPESFLEDEQPIKKTLIKTIHGEKQQNVYYVTFKVKGRKVEAEVIASPYEYILLSPTDVPWLTQQPLQLTILVPLQEYQEKILSKTALPEDQKQQLKTLFVKYDNLWQHWENQVGHRKIRPHNIATGDYPPRPQKQYPINPKAKPSIQIVIDDLLKQGVLTPQNSTMNTPVYPVPKPDGRWRMVLDYREVNKTIPLTAAQNQHSAGILATIVRQKYKTTLDLANGFWAHPITPESYWLTAFTWQGKQYCWTRLPQGFLNSPALFNADVVDLLKEIPNVQVYVDDIYLSHDDPKEHVQQLEKVFQILLQAGYVVSLKKSEIGQKTVEFLGFNITKEGRGLTDTFKTKLLNITPPKDLKQLQSILGLLNFARNFIPNFAELVQPLYNLIAPAKGKYIEWSEENTKQLNMVIEALNTASNLEERLPEQRLVIKVNTSPSAGYVRYYNETGKKPIMYLNYVFSKAELKFSMLEKLLTTMHKALIKAMDLAMGQEILVYSPIVSMTKIQKTPLPERKALPIRWITWMTYLEDPRIQFHYDKTLPELKHIPDVYTSSQSPVKHPSQYEGVFYTDGSAIKSPDPTKSNNAGMGIVHATYKPEYQVLNQWSIPLGNHTAQMAEIAAVEFACKKALKIPGPVLVITDSFYVAESANKELPYWKSNGFVNNKKKPLKHISKWKSIAECLSMKPDITIQHEKGISLQIPVFILKGNALADKLATQGSYVVNAGKRTADGSEFEKRTADGSEFESPKKKAKVE

SEQ ID NO: 1343 - protein, 2171 aa, synthetic construct
  source 1..2171: note = Description of Artificial Sequence: Synthetic polypeptide
MPAAKRVKLDGGDKKYSIGLDIGTNSVGWAVITDEYKVPSKKFKVLGNTDRHSIKKNLIGALLFDSGETAEATRLKRTARRRYTRRKNRICYLQEIFSNEMAKVDDSFFHRLEESFLVEEDKKHERHPIFGNIVDEVAYHEKYPTIYHLRKKLVDSTDKADLRLIYLALAHMIKFRGHFLIEGDLNPDNSDVDKLFIQLVQTYNQLFEENPINASGVDAKAILSARLSKSRRLENLIAQLPGEKKNGLFGNLIALSLGLTPNFKSNFDLAEDAKLQLSKDTYDDDLDNLLAQIGDQYADLFLAAKNLSDAILLSDILRVNTEITKAPLSASMIKRYDEHHQDLTLLKALVRQQLPEKYKEIFFDQSKNGYAGYIDGGASQEEFYKFIKPILEKMDGTEELLVKLNREDLLRKQRTFDNGSIPHQIHLGELHAILRRQEDFYPFLKDNREKIEKILTFRIPYYVGPLARGNSRFAWMTRKSEETITPWNFEEVVDKGASAQSFIERMTNFDKNLPNEKVLPKHSLLYEYFTVYNELTKVKYVTEGMRKPAFLSGEQKKAIVDLLFKTNRKVTVKQLKEDYFKKIECFDSVEISGVEDRFNASLGTYHDLLKIIKDKDFLDNEENEDILEDIVLTLTLFEDREMIEERLKTYAHLFDDKVMKQLKRRRYTGWGRLSRKLINGIRDKQSGKTILDFLKSDGFANRNFMQLIHDDSLTFKEDIQKAQVSGQGDSLHEHIANLAGSPAIKKGILQTVKVVDELVKVMGRHKPENIVIEMARENQTTQKGQKNSRERMKRIEEGIKELGSQILKEHPVENTQLQNEKLYLYYLQNGRDMYVDQELDINRLSDYDVDHIVPQSFLKDDSIDNKVLTRSDKARGKSDNVPSEEVVKKMKNYWRQLLNAKLITQRKFDNLTKAERGGLSELDKAGFIKRQLVETRQITKHVAQILDSRMNTKYDENDKLIREVKVITLKSKLVSDFRKDFQFYKVREINNYHHAHDAYLNAVVGTALIKKYPKLESEFVYGDYKVYDVRKMIAKSEQEIGKATAKYFFYSNIMNFFKTEITLANGEIRKRPLIETNGETGEIVWDKGRDFATVRKVLSMPQVNIVKKTEVQTGGFSKESILPKRNSDKLIARKKDWDPKKYGGFDSPTVAYSVLVVAKVEKGKSKKLKSVKELLGITIMERSSFEKNPIDFLEAKGYKEVKKDLIIKLPKYSLFELENGRKRMLASAGELQKGNELALPSKYVNFLYLASHYEKLKGSPEDNEQKQLFVEQHKHYLDEIIEQISEFSKRVILADANLDKVLSAYNKHRDKPIREQAENIIHLFTLTNLGAPAAFKYFDTTIDRKRYTSTKEVLDATLIHQSITGLYETRIDLSQLGGDGGGGGGSSGGMNPLQLLQPLPAEIKGTKLLAHWNSGATITCIPESFLEDEQPIKKTLIKTIHGEKQQNVYYVTFKVKGRKVEAEVIASPYEYILLSPTDVPWLTQQPLQLTILVPLQEYQEKILSKTALPEDQKQQLKTLFVKYDNLWQHWENQVGHRKIRPHNIATGDYPPRPQKQYPINPKAKPSIQIVIDDLLKQGVLTPQNSTMNTPVYPVPKPDGRWRMVLDYREVNKTIPLTAAQNQHSAGILATIVRQKYKTTLDLANGFWAHPITPESYWLTAFTWQGKQYCWTRLPQGFLNSPALFNADVVDLLKEIPNVQVYVDDIYLSHDDPKEHVQQLEKVFQILLQAGYVVSLKKSEIGQKTVEFLGFNITKEGRGLTDTFKTKLLNITPPKDLKQLQSILGLLNFARNFIPNFAELVQPLYNLIAPAKGKYIEWSEENTKQLNMVIEALNTASNLEERLPEQRLVIKVNTSPSAGYVRYYNETGKKPIMYLNYVFSKAELKFSMLEKLLTTMHKALIKAMDLAMGQEILVYSPIVSMTKIQKTPLPERKALPIRWITWMTYLEDPRIQFHYDKTLPELKHIPDVYTSSQSPVKHPSQYEGVFYTDGSAIKSPDPTKSNNAGMGIVHATYKPEYQVLNQWSIPLGNHTAQMAEIAAVEFACKKALKIPGPVLVITDSFYVAESANKELPYWKSNGFVNNKKKPLKHISKWKSIAECLSMKPDITIQHEKGISLQIPVFILKGNALADKLATQGSYVVNAGKRTADGSEFEKRTADGSEFESPKKKAKVE

SEQ ID NO: 1344 - protein, 2174 aa, synthetic construct
  source 1..2174: note = Description of Artificial Sequence: Synthetic polypeptide
MPAAKRVKLDGGDKKYSIGLDIGTNSVGWAVITDEYKVPSKKFKVLGNTDRHSIKKNLIGALLFDSGETAEATRLKRTARRRYTRRKNRICYLQEIFSNEMAKVDDSFFHRLEESFLVEEDKKHERHPIFGNIVDEVAYHEKYPTIYHLRKKLVDSTDKADLRLIYLALAHMIKFRGHFLIEGDLNPDNSDVDKLFIQLVQTYNQLFEENPINASGVDAKAILSARLSKSRRLENLIAQLPGEKKNGLFGNLIALSLGLTPNFKSNFDLAEDAKLQLSKDTYDDDLDNLLAQIGDQYADLFLAAKNLSDAILLSDILRVNTEITKAPLSASMIKRYDEHHQDLTLLKALVRQQLPEKYKEIFFDQSKNGYAGYIDGGASQEEFYKFIKPILEKMDGTEELLVKLNREDLLRKQRTFDNGSIPHQIHLGELHAILRRQEDFYPFLKDNREKIEKILTFRIPYYVGPLARGNSRFAWMTRKSEETITPWNFEEVVDKGASAQSFIERMTNFDKNLPNEKVLPKHSLLYEYFTVYNELTKVKYVTEGMRKPAFLSGEQKKAIVDLLFKTNRKVTVKQLKEDYFKKIECFDSVEISGVEDRFNASLGTYHDLLKIIKDKDFLDNEENEDILEDIVLTLTLFEDREMIEERLKTYAHLFDDKVMKQLKRRRYTGWGRLSRKLINGIRDKQSGKTILDFLKSDGFANRNFMQLIHDDSLTFKEDIQKAQVSGQGDSLHEHIANLAGSPAIKKGILQTVKVVDELVKVMGRHKPENIVIEMARENQTTQKGQKNSRERMKRIEEGIKELGSQILKEHPVENTQLQNEKLYLYYLQNGRDMYVDQELDINRLSDYDVDHIVPQSFLKDDSIDNKVLTRSDKARGKSDNVPSEEVVKKMKNYWRQLLNAKLITQRKFDNLTKAERGGLSELDKAGFIKRQLVETRQITKHVAQILDSRMNTKYDENDKLIREVKVITLKSKLVSDFRKDFQFYKVREINNYHHAHDAYLNAVVGTALIKKYPKLESEFVYGDYKVYDVRKMIAKSEQEIGKATAKYFFYSNIMNFFKTEITLANGEIRKRPLIETNGETGEIVWDKGRDFATVRKVLSMPQVNIVKKTEVQTGGFSKESILPKRNSDKLIARKKDWDPKKYGGFDSPTVAYSVLVVAKVEKGKSKKLKSVKELLGITIMERSSFEKNPIDFLEAKGYKEVKKDLIIKLPKYSLFELENGRKRMLASAGELQKGNELALPSKYVNFLYLASHYEKLKGSPEDNEQKQLFVEQHKHYLDEIIEQISEFSKRVILADANLDKVLSAYNKHRDKPIREQAENIIHLFTLTNLGAPAAFKYFDTTIDRKRYTSTKEVLDATLIHQSITGLYETRIDLSQLGGDGGGSSGSSGSSGGMNPLQLLQPLPAEIKGTKLLAHWNSGATITCIPESFLEDEQPIKKTLIKTIHGEKQQNVYYVTFKVKGRKVEAEVIASPYEYILLSPTDVPWLTQQPLQLTILVPLQEYQEKILSKTALPEDQKQQLKTLFVKYDNLWQHWENQVGHRKIRPHNIATGDYPPRPQKQYPINPKAKPSIQIVIDDLLKQGVLTPQNSTMNTPVYPVPKPDGRWRMVLDYREVNKTIPLTAAQNQHSAGILATIVRQKYKTTLDLANGFWAHPITPESYWLTAFTWQGKQYCWTRLPQGFLNSPALFNADVVDLLKEIPNVQVYVDDIYLSHDDPKEHVQQLEKVFQILLQAGYVVSLKKSEIGQKTVEFLGFNITKEGRGLTDTFKTKLLNITPPKDLKQLQSILGLLNFARNFIPNFAELVQPLYNLIAPAKGKYIEWSEENTKQLNMVIEALNTASNLEERLPEQRLVIKVNTSPSAGYVRYYNETGKKPIMYLNYVFSKAELKFSMLEKLLTTMHKALIKAMDLAMGQEILVYSPIVSMTKIQKTPLPERKALPIRWITWMTYLEDPRIQFHYDKTLPELKHIPDVYTSSQSPVKHPSQYEGVFYTDGSAIKSPDPTKSNNAGMGIVHATYKPEYQVLNQWSIPLGNHTAQMAEIAAVEFACKKALKIPGPVLVITDSFYVAESANKELPYWKSNGFVNNKKKPLKHISKWKSIAECLSMKPDITIQHEKGISLQIPVFILKGNALADKLATQGSYVVNAGKRTADGSEFEKRTADGSEFESPKKKAKVE

SEQ ID NO: 1345 - protein, 2171 aa, synthetic construct
  source 1..2171: note = Description of Artificial Sequence: Synthetic polypeptide
MPAAKRVKLDGGDKKYSIGLDIGTNSVGWAVITDEYKVPSKKFKVLGNTDRHSIKKNLIGALLFDSGETAEATRLKRTARRRYTRRKNRICYLQEIFSNEMAKVDDSFFHRLEESFLVEEDKKHERHPIFGNIVDEVAYHEKYPTIYHLRKKLVDSTDKADLRLIYLALAHMIKFRGHFLIEGDLNPDNSDVDKLFIQLVQTYNQLFEENPINASGVDAKAILSARLSKSRRLENLIAQLPGEKKNGLFGNLIALSLGLTPNFKSNFDLAEDAKLQLSKDTYDDDLDNLLAQIGDQYADLFLAAKNLSDAILLSDILRVNTEITKAPLSASMIKRYDEHHQDLTLLKALVRQQLPEKYKEIFFDQSKNGYAGYIDGGASQEEFYKFIKPILEKMDGTEELLVKLNREDLLRKQRTFDNGSIPHQIHLGELHAILRRQEDFYPFLKDNREKIEKILTFRIPYYVGPLARGNSRFAWMTRKSEETITPWNFEEVVDKGASAQSFIERMTNFDKNLPNEKVLPKHSLLYEYFTVYNELTKVKYVTEGMRKPAFLSGEQKKAIVDLLFKTNRKVTVKQLKEDYFKKIECFDSVEISGVEDRFNASLGTYHDLLKIIKDKDFLDNEENEDILEDIVLTLTLFEDREMIEERLKTYAHLFDDKVMKQLKRRRYTGWGRLSRKLINGIRDKQSGKTILDFLKSDGFANRNFMQLIHDDSLTFKEDIQKAQVSGQGDSLHEHIANLAGSPAIKKGILQTVKVVDELVKVMGRHKPENIVIEMARENQTTQKGQKNSRERMKRIEEGIKELGSQILKEHPVENTQLQNEKLYLYYLQNGRDMYVDQELDINRLSDYDVDHIVPQSFLKDDSIDNKVLTRSDKARGKSDNVPSEEVVKKMKNYWRQLLNAKLITQRKFDNLTKAERGGLSELDKAGFIKRQLVETRQITKHVAQILDSRMNTKYDENDKLIREVKVITLKSKLVSDFRKDFQFYKVREINNYHHAHDAYLNAVVGTALIKKYPKLESEFVYGDYKVYDVRKMIAKSEQEIGKATAKYFFYSNIMNFFKTEITLANGEIRKRPLIETNGETGEIVWDKGRDFATVRKVLSMPQVNIVKKTEVQTGGFSKESILPKRNSDKLIARKKDWDPKKYGGFDSPTVAYSVLVVAKVEKGKSKKLKSVKELLGITIMERSSFEKNPIDFLEAKGYKEVKKDLIIKLPKYSLFELENGRKRMLASAGELQKGNELALPSKYVNFLYLASHYEKLKGSPEDNEQKQLFVEQHKHYLDEIIEQISEFSKRVILADANLDKVLSAYNKHRDKPIREQAENIIHLFTLTNLGAPAAFKYFDTTIDRKRYTSTKEVLDATLIHQSITGLYETRIDLSQLGGDGGPAPGGGGGMNPLQLLQPLPAEIKGTKLLAHWNSGATITCIPESFLEDEQPIKKTLIKTIHGEKQQNVYYVTFKVKGRKVEAEVIASPYEYILLSPTDVPWLTQQPLQLTILVPLQEYQEKILSKTALPEDQKQQLKTLFVKYDNLWQHWENQVGHRKIRPHNIATGDYPPRPQKQYPINPKAKPSIQIVIDDLLKQGVLTPQNSTMNTPVYPVPKPDGRWRMVLDYREVNKTIPLTAAQNQHSAGILATIVRQKYKTTLDLANGFWAHPITPESYWLTAFTWQGKQYCWTRLPQGFLNSPALFNADVVDLLKEIPNVQVYVDDIYLSHDDPKEHVQQLEKVFQILLQAGYVVSLKKSEIGQKTVEFLGFNITKEGRGLTDTFKTKLLNITPPKDLKQLQSILGLLNFARNFIPNFAELVQPLYNLIAPAKGKYIEWSEENTKQLNMVIEALNTASNLEERLPEQRLVIKVNTSPSAGYVRYYNETGKKPIMYLNYVFSKAELKFSMLEKLLTTMHKALIKAMDLAMGQEILVYSPIVSMTKIQKTPLPERKALPIRWITWMTYLEDPRIQFHYDKTLPELKHIPDVYTSSQSPVKHPSQYEGVFYTDGSAIKSPDPTKSNNAGMGIVHATYKPEYQVLNQWSIPLGNHTAQMAEIAAVEFACKKALKIPGPVLVITDSFYVAESANKELPYWKSNGFVNNKKKPLKHISKWKSIAECLSMKPDITIQHEKGISLQIPVFILKGNALADKLATQGSYVVNAGKRTADGSEFEKRTADGSEFESPKKKAKVE

SEQ ID NO: 1346 - protein, 2195 aa, synthetic construct
  source 1..2195: note = Description of Artificial Sequence: Synthetic polypeptide
MPAAKRVKLDGGDKKYSIGLDIGTNSVGWAVITDEYKVPSKKFKVLGNTDRHSIKKNLIGALLFDSGETAEATRLKRTARRRYTRRKNRICYLQEIFSNEMAKVDDSFFHRLEESFLVEEDKKHERHPIFGNIVDEVAYHEKYPTIYHLRKKLVDSTDKADLRLIYLALAHMIKFRGHFLIEGDLNPDNSDVDKLFIQLVQTYNQLFEENPINASGVDAKAILSARLSKSRRLENLIAQLPGEKKNGLFGNLIALSLGLTPNFKSNFDLAEDAKLQLSKDTYDDDLDNLLAQIGDQYADLFLAAKNLSDAILLSDILRVNTEITKAPLSASMIKRYDEHHQDLTLLKALVRQQLPEKYKEIFFDQSKNGYAGYIDGGASQEEFYKFIKPILEKMDGTEELLVKLNREDLLRKQRTFDNGSIPHQIHLGELHAILRRQEDFYPFLKDNREKIEKILTFRIPYYVGPLARGNSRFAWMTRKSEETITPWNFEEVVDKGASAQSFIERMTNFDKNLPNEKVLPKHSLLYEYFTVYNELTKVKYVTEGMRKPAFLSGEQKKAIVDLLFKTNRKVTVKQLKEDYFKKIECFDSVEISGVEDRFNASLGTYHDLLKIIKDKDFLDNEENEDILEDIVLTLTLFEDREMIEERLKTYAHLFDDKVMKQLKRRRYTGWGRLSRKLINGIRDKQSGKTILDFLKSDGFANRNFMQLIHDDSLTFKEDIQKAQVSGQGDSLHEHIANLAGSPAIKKGILQTVKVVDELVKVMGRHKPENIVIEMARENQTTQKGQKNSRERMKRIEEGIKELGSQILKEHPVENTQLQNEKLYLYYLQNGRDMYVDQELDINRLSDYDVDHIVPQSFLKDDSIDNKVLTRSDKARGKSDNVPSEEVVKKMKNYWRQLLNAKLITQRKFDNLTKAERGGLSELDKAGFIKRQLVETRQITKHVAQILDSRMNTKYDENDKLIREVKVITLKSKLVSDFRKDFQFYKVREINNYHHAHDAYLNAVVGTALIKKYPKLESEFVYGDYKVYDVRKMIAKSEQEIGKATAKYFFYSNIMNFFKTEITLANGEIRKRPLIETNGETGEIVWDKGRDFATVRKVLSMPQVNIVKKTEVQTGGFSKESILPKRNSDKLIARKKDWDPKKYGGFDSPTVAYSVLVVAKVEKGKSKKLKSVKELLGITIMERSSFEKNPIDFLEAKGYKEVKKDLIIKLPKYSLFELENGRKRMLASAGELQKGNELALPSKYVNFLYLASHYEKLKGSPEDNEQKQLFVEQHKHYLDEIIEQISEFSKRVILADANLDKVLSAYNKHRDKPIREQAENIIHLFTLTNLGAPAAFKYFDTTIDRKRYTSTKEVLDATLIHQSITGLYETRIDLSQLGGDGGEAAAKEAAAKEAAAKEAAAKEAAAKEAAAKGGMNPLQLLQPLPAEIKGTKLLAHWNSGATITCIPESFLEDEQPIKKTLIKTIHGEKQQNVYYVTFKVKGRKVEAEVIASPYEYILLSPTDVPWLTQQPLQLTILVPLQEYQEKILSKTALPEDQKQQLKTLFVKYDNLWQHWENQVGHRKIRPHNIATGDYPPRPQKQYPINPKAKPSIQIVIDDLLKQGVLTPQNSTMNTPVYPVPKPDGRWRMVLDYREVNKTIPLTAAQNQHSAGILATIVRQKYKTTLDLANGFWAHPITPESYWLTAFTWQGKQYCWTRLPQGFLNSPALFNADVVDLLKEIPNVQVYVDDIYLSHDDPKEHVQQLEKVFQILLQAGYVVSLKKSEIGQKTVEFLGFNITKEGRGLTDTFKTKLLNITPPKDLKQLQSILGKLNFARNFIPNFAELVQPLYNLIAPAKGKYIEWSEENTKQLNMVIEALNTASNLEERLPEQRLVIKVNTSPSAGYVRYYNETGKKPIMYLNYVFSKAELKFSMLEKLLTTMHKALIKAMDLAMGQEILVYSPIVSMTKIQKTPLPERKALPIRWITWMTYLEDPRIQFHYDKTLPELKHIPDVYTSSQSPVKHPSQYEGVFYTDGSAIKSPDPTKSNNAGMGIVHATYKPEYQVLNQWSIPLGNHTAQMAEIAAVEFACKKALKIPGPVLVITDSFYVAESANKELPYWKSNGFVNNKKKPLKHISKWKSIAECLSMKPDITIQHEKGISLQIPVFILKGNALADKLATQGSYVVNAGKRTADGSEFEKRTADGSEFESPKKKAKVE

SEQ ID NO: 1347 - protein, 2185 aa, synthetic construct
  source 1..2185: note = Description of Artificial Sequence: Synthetic polypeptide
MPAAKRVKLDGGDKKYSIGLDIGTNSVGWAVITDEYKVPSKKFKVLGNTDRHSIKKNLIGALLFDSGETAEATRLKRTARRRYTRRKNRICYLQEIFSNEMAKVDDSFFHRLEESFLVEEDKKHERHPIFGNIVDEVAYHEKYPTIYHLRKKLVDSTDKADLRLIYLALAHMIKFRGHFLIEGDLNPDNSDVDKLFIQLVQTYNQLFEENPINASGVDAKAILSARLSKSRRLENLIAQLPGEKKNGLFGNLIALSLGLTPNFKSNFDLAEDAKLQLSKDTYDDDLDNLLAQIGDQYADLFLAAKNLSDAILLSDILRVNTEITKAPLSASMIKRYDEHHQDLTLLKALVRQQLPEKYKEIFFDQSKNGYAGYIDGGASQEEFYKFIKPILEKMDGTEELLVKLNREDLLRKQRTFDNGSIPHQIHLGELHAILRRQEDFYPFLKDNREKIEKILTFRIPYYVGPLARGNSRFAWMTRKSEETITPWNFEEVVDKGASAQSFIERMTNFDKNLPNEKVLPKHSLLYEYFTVYNELTKVKYVTEGMRKPAFLSGEQKKAIVDLLFKTNRKVTVKQLKEDYFKKIECFDSVEISGVEDRFNASLGTYHDLLKIIKDKDFLDNEENEDILEDIVLTLTLFEDREMIEERLKTYAHLFDDKVMKQLKRRRYTGWGRLSRKLINGIRDKQSGKTILDFLKSDGFANRNFMQLIHDDSLTFKEDIQKAQVSGQGDSLHEHIANLAGSPAIKKGILQTVKVVDELVKVMGRHKPENIVIEMARENQTTQKGQKNSRERMKRIEEGIKELGSQILKEHPVENTQLQNEKLYLYYLQNGRDMYVDQELDINRLSDYDVDHIVPQSFLKDDSIDNKVLTRSDKARGKSDNVPSEEVVKKMKNYWRQLLNAKLITQRKFDNLTKAERGGLSELDKAGFIKRQLVETRQITKHVAQILDSRMNTKYDENDKLIREVKVITLKSKLVSDFRKDFQFYKVREINNYHHAHDAYLNAVVGTALIKKYPKLESEFVYGDYKVYDVRKMIAKSEQEIGKATAKYFFYSNIMNFFKTEITLANGEIRKRPLIETNGETGEIVWDKGRDFATVRKVLSMPQVNIVKKTEVQTGGFSKESILPKRNSDKLIARKKDWDPKKYGGFDSPTVAYSVLVVAKVEKGKSKKLKSVKELLGITIMERSSFEKNPIDFLEAKGYKEVKKDLIIKLPKYSLFELENGRKRMLASAGELQKGNELALPSKYVNFLYLASHYEKLKGSPEDNEQKQLFVEQHKHYLDEIIEQISEFSKRVILADANLDKVLSAYNKHRDKPIREQAENIIHLFTLTNLGAPAAFKYFDTTIDRKRYTSTKEVLDATLIHQSITGLYETRIDLSQLGGDGGEAAAKEAAAKEAAAKEAAAKGGMNPLQLLQPLPAEIKGTKLLAHWNSGATITCIPESFLEDEQPIKKTLIKTIHGEKQQNVYYVTFKVKGRKVEAEVIASPYEYILLSPTDVPWLTQQPLQLTILVPLQEYQEKILSKTALPEDQKQQLKTLFVKYDNLWQHWENQVGHRKIRPHNIATGDYPPRPQKQYPINPKAKPSIQIVIDDLLKQGVLTPQNSTMNTPVYPVPKPDGRWRMVLDYREVNKTIPLTAAQNQHSAGILATIVRQKYKTTLDLANGFWAHPITPESYWLTAFTWQGKQYCWTRLPQGFLNSPALFNADVVDLLKEIPNVQVYVDDIYLSHDDPKEHVQQLEKVFQILLQAGYVVSLKKSEIGQKTVEFLGFNITKEGRGLTDTFKTKLLNITPPKDLKQLQSILGKLNFARNFIPNFAELVQPLYNLIAPAKGKYIEWSEENTKQLNMVIEALNTASNLEERLPEQRLVIKVNTSPSAGYVRYYNETGKKPIMYLNYVFSKAELKFSMLEKLLTTMHKALIKAMDLAMGQEILVYSPIVSMTKIQKTPLPERKALPIRWITWMTYLEDPRIQFHYDKTLPELKHIPDVYTSSQSPVKHPSQYEGVFYTDGSAIKSPDPTKSNNAGMGIVHATYKPEYQVLNQWSIPLGNHTAQMAEIAAVEFACKKALKIPGPVLVITDSFYVAESANKELPYWKSNGFVNNKKKPLKHISKWKSIAECLSMKPDITIQHEKGISLQIPVFILKGNALADKLATQGSYVVNAGKRTADGSEFEKRTADGSEFESPKKKAKVE

SEQ ID NO: 1348 - protein, 2176 aa, synthetic construct
  source 1..2176: note = Description of Artificial Sequence: Synthetic polypeptide
MPAAKRVKLDGGDKKYSIGLDIGTNSVGWAVITDEYKVPSKKFKVLGNTDRHSIKKNLIGALLFDSGETAEATRLKRTARRRYTRRKNRICYLQEIFSNEMAKVDDSFFHRLEESFLVEEDKKHERHPIFGNIVDEVAYHEKYPTIYHLRKKLVDSTDKADLRLIYLALAHMIKFRGHFLIEGDLNPDNSDVDKLFIQLVQTYNQLFEENPINASGVDAKAILSARLSKSRRLENLIAQLPGEKKNGLFGNLIALSLGLTPNFKSNFDLAEDAKLQLSKDTYDDDLDNLLAQIGDQYADLFLAAKNLSDAILLSDILRVNTEITKAPLSASMIKRYDEHHQDLTLLKALVRQQLPEKYKEIFFDQSKNGYAGYIDGGASQEEFYKFIKPILEKMDGTEELLVKLNREDLLRKQRTFDNGSIPHQIHLGELHAILRRQEDFYPFLKDNREKIEKILTFRIPYYVGPLARGNSRFAWMTRKSEETITPWNFEEVVDKGASAQSFIERMTNFDKNLPNEKVLPKHSLLYEYFTVYNELTKVKYVTEGMRKPAFLSGEQKKAIVDLLFKTNRKVTVKQLKEDYFKKIECFDSVEISGVEDRFNASLGTYHDLLKIIKDKDFLDNEENEDILEDIVLTLTLFEDREMIEERLKTYAHLFDDKVMKQLKRRRYTGWGRLSRKLINGIRDKQSGKTILDFLKSDGFANRNFMQLIHDDSLTFKEDIQKAQVSGQGDSLHEHIANLAGSPAIKKGILQTVKVVDELVKVMGRHKPENIVIEMARENQTTQKGQKNSRERMKRIEEGIKELGSQILKEHPVENTQLQNEKLYLYYLQNGRDMYVDQELDINRLSDYDVDHIVPQSFLKDDSIDNKVLTRSDKARGKSDNVPSEEVVKKMKNYWRQLLNAKLITQRKFDNLTKAERGGLSELDKAGFIKRQLVETRQITKHVAQILDSRMNTKYDENDKLIREVKVITLKSKLVSDFRKDFQFYKVREINNYHHAHDAYLNAVVGTALIKKYPKLESEFVYGDYKVYDVRKMIAKSEQEIGKATAKYFFYSNIMNFFKTEITLANGEIRKRPLIETNGETGEIVWDKGRDFATVRKVLSMPQVNIVKKTEVQTGGFSKESILPKRNSDKLIARKKDWDPKKYGGFDSPTVAYSVLVVAKVEKGKSKKLKSVKELLGITIMERSSFEKNPIDFLEAKGYKEVKKDLIIKLPKYSLFELENGRKRMLASAGELQKGNELALPSKYVNFLYLASHYEKLKGSPEDNEQKQLFVEQHKHYLDEIIEQISEFSKRVILADANLDKVLSAYNKHRDKPIREQAENIIHLFTLTNLGAPAAFKYFDTTIDRKRYTSTKEVLDATLIHQSITGLYETRIDLSQLGGDGGGGSPAPEAAAKGGMNPLQLLQPLPAEIKGTKLLAHWNSGATITCIPESFLEDEQPIKKTLIKTIHGEKQQNVYYVTFKVKGRKVEAEVIASPYEYILLSPTDVPWLTQQPLQLTILVPLQEYQEKILSKTALPEDQKQQLKTLFVKYDNLWQHWENQVGHRKIRPHNIATGDYPPRPQKQYPINPKAKPSIQIVIDDLLKQGVLTPQNSTMNTPVYPVPKPDGRWRMVLDYREVNKTIPLTAAQNQHSAGILATIVRQKYKTTLDLANGFWAHPITPESYWLTAFTWQGKQYCWTRLPQGFLNSPALFNADVVDLLKEIPNVQVYVDDIYLSHDDPKEHVQQLEKVFQILLQAGYVVSLKKSEIGQKTVEFLGFNITKEGRGLTDTFKTKLLNITPPKDLKQLQSILGKLNFARNFIPNFAELVQPLYNLIAPAKGKYIEWSEENTKQLNMVIEALNTASNLEERLPEQRLVIKVNTSPSAGYVRYYNETGKKPIMYLNYVFSKAELKFSMLEKLLTTMHKALIKAMDLAMGQEILVYSPIVSMTKIQKTPLPERKALPIRWITWMTYLEDPRIQFHYDKTLPELKHIPDVYTSSQSPVKHPSQYEGVFYTDGSAIKSPDPTKSNNAGMGIVHATYKPEYQVLNQWSIPLGNHTAQMAEIAAVEFACKKALKIPGPVLVITDSFYVAESANKELPYWKSNGFVNNKKKPLKHISKWKSIAECLSMKPDITIQHEKGISLQIPVFILKGNALADKLATQGSYVVNAGKRTADGSEFEKRTADGSEFESPKKKAKVE

SEQ ID NO: 1349 - protein, 2177 aa, synthetic construct
  source 1..2177: note = Description of Artificial Sequence: Synthetic polypeptide
MPAAKRVKLDGGDKKYSIGLDIGTNSVGWAVITDEYKVPSKKFKVLGNTDRHSIKKNLIGALLFDSGETAEATRLKRTARRRYTRRKNRICYLQEIFSNEMAKVDDSFFHRLEESFLVEEDKKHERHPIFGNIVDEVAYHEKYPTIYHLRKKLVDSTDKADLRLIYLALAHMIKFRGHFLIEGDLNPDNSDVDKLFIQLVQTYNQLFEENPINASGVDAKAILSARLSKSRRLENLIAQLPGEKKNGLFGNLIALSLGLTPNFKSNFDLAEDAKLQLSKDTYDDDLDNLLAQIGDQYADLFLAAKNLSDAILLSDILRVNTEITKAPLSASMIKRYDEHHQDLTLLKALVRQQLPEKYKEIFFDQSKNGYAGYIDGGASQEEFYKFIKPILEKMDGTEELLVKLNREDLLRKQRTFDNGSIPHQIHLGELHAILRRQEDFYPFLKDNREKIEKILTFRIPYYVGPLARGNSRFAWMTRKSEETITPWNFEEVVDKGASAQSFIERMTNFDKNLPNEKVLPKHSLLYEYFTVYNELTKVKYVTEGMRKPAFLSGEQKKAIVDLLFKTNRKVTVKQLKEDYFKKIECFDSVEISGVEDRFNASLGTYHDLLKIIKDKDFLDNEENEDILEDIVLTLTLFEDREMIEERLKTYAHLFDDKVMKQLKRRRYTGWGRLSRKLINGIRDKQSGKTILDFLKSDGFANRNFMQLIHDDSLTFKEDIQKAQVSGQGDSLHEHIANLAGSPAIKKGILQTVKVVDELVKVMGRHKPENIVIEMARENQTTQKGQKNSRERMKRIEEGIKELGSQILKEHPVENTQLQNEKLYLYYLQNGRDMYVDQELDINRLSDYDVDHIVPQSFLKDDSIDNKVLTRSDKARGKSDNVPSEEVVKKMKNYWRQLLNAKLITQRKFDNLTKAERGGLSELDKAGFIKRQLVETRQITKHVAQILDSRMNTKYDENDKLIREVKVITLKSKLVSDFRKDFQFYKVREINNYHHAHDAYLNAVVGTALIKKYPKLESEFVYGDYKVYDVRKMIAKSEQEIGKATAKYFFYSNIMNFFKTEITLANGEIRKRPLIETNGETGEIVWDKGRDFATVRKVLSMPQVNIVKKTEVQTGGFSKESILPKRNSDKLIARKKDWDPKKYGGFDSPTVAYSVLVVAKVEKGKSKKLKSVKELLGITIMERSSFEKNPIDFLEAKGYKEVKKDLIIKLPKYSLFELENGRKRMLASAGELQKGNELALPSKYVNFLYLASHYEKLKGSPEDNEQKQLFVEQHKHYLDEIIEQISEFSKRVILADANLDKVLSAYNKHRDKPIREQAENIIHLFTLTNLGAPAAFKYFDTTIDRKRYTSTKEVLDATLIHQSITGLYETRIDLSQLGGDGGGSAGSAAGSGEFGGMNPLQLLQPLPAEIKGTKLLAHWNSGATITCIPESFLEDEQPIKKTLIKTIHGEKQQNVYYVTFKVKGRKVEAEVIASPYEYILLSPTDVPWLTQQPLQLTILVPLQEYQEKILSKTALPEDQKQQLKTLFVKYDNLWQHWENQVGHRKIRPHNIATGDYPPRPQKQYPINPKAKPSIQIVIDDLLKQGVLTPQNSTMNTPVYPVPKPDGRWRMVLDYREVNKTIPLTAAQNQHSAGILATIVRQKYKTTLDLANGFWAHPITPESYWLTAFTWQGKQYCWTRLPQGFLNSPALFNADVVDLLKEIPNVQVYVDDIYLSHDDPKEHVQQLEKVFQILLQAGYVVSLKKSEIGQKTVEFLGFNITKEGRGLTDTFKTKLLNITPPKDLKQLQSILGKLNFARNFIPNFAELVQPLYNLIAPAKGKYIEWSEENTKQLNMVIEALNTASNLEERLPEQRLVIKVNTSPSAGYVRYYNETGKKPIMYLNYVFSKAELKFSMLEKLLTTMHKALIKAMDLAMGQEILVYSPIVSMTKIQKTPLPERKALPIRWITWMTYLEDPRIQFHYDKTLPELKHIPDVYTSSQSPVKHPSQYEGVFYTDGSAIKSPDPTKSNNAGMGIVHATYKPEYQVLNQWSIPLGNHTAQMAEIAAVEFACKKALKIPGPVLVITDSFYVAESANKELPYWKSNGFVNNKKKPLKHISKWKSIAECLSMKPDITIQHEKGISLQIPVFILKGNALADKLATQGSYVVNAGKRTADGSEFEKRTADGSEFESPKKKAKVE

SEQ ID NO: 1350 - protein, 2173 aa, synthetic construct
  source 1..2173: note = Description of Artificial Sequence: Synthetic polypeptide
MPAAKRVKLDGGDKKYSIGLDIGTNSVGWAVITDEYKVPSKKFKVLGNTDRHSIKKNLIGALLFDSGETAEATRLKRTARRRYTRRKNRICYLQEIFSNEMAKVDDSFFHRLEESFLVEEDKKHERHPIFGNIVDEVAYHEKYPTIYHLRKKLVDSTDKADLRLIYLALAHMIKFRGHFLIEGDLNPDNSDVDKLFIQLVQTYNQLFEENPINASGVDAKAILSARLSKSRRLENLIAQLPGEKKNGLFGNLIALSLGLTPNFKSNFDLAEDAKLQLSKDTYDDDLDNLLAQIGDQYADLFLAAKNLSDAILLSDILRVNTEITKAPLSASMIKRYDEHHQDLTLLKALVRQQLPEKYKEIFFDQSKNGYAGYIDGGASQEEFYKFIKPILEKMDGTEELLVKLNREDLLRKQRTFDNGSIPHQIHLGELHAILRRQEDFYPFLKDNREKIEKILTFRIPYYVGPLARGNSRFAWMTRKSEETITPWNFEEVVDKGASAQSFIERMTNFDKNLPNEKVLPKHSLLYEYFTVYNELTKVKYVTEGMRKPAFLSGEQKKAIVDLLFKTNRKVTVKQLKEDYFKKIECFDSVEISGVEDRFNASLGTYHDLLKIIKDKDFLDNEENEDILEDIVLTLTLFEDREMIEERLKTYAHLFDDKVMKQLKRRRYTGWGRLSRKLINGIRDKQSGKTILDFLKSDGFANRNFMQLIHDDSLTFKEDIQKAQVSGQGDSLHEHIANLAGSPAIKKGILQTVKVVDELVKVMGRHKPENIVIEMARENQTTQKGQKNSRERMKRIEEGIKELGSQILKEHPVENTQLQNEKLYLYYLQNGRDMYVDQELDINRLSDYDVDHIVPQSFLKDDSIDNKVLTRSDKARGKSDNVPSEEVVKKMKNYWRQLLNAKLITQRKFDNLTKAERGGLSELDKAGFIKRQLVETRQITKHVAQILDSRMNTKYDENDKLIREVKVITLKSKLVSDFRKDFQFYKVREINNYHHAHDAYLNAVVGTALIKKYPKLESEFVYGDYKVYDVRKMIAKSEQEIGKATAKYFFYSNIMNFFKTEITLANGEIRKRPLIETNGETGEIVWDKGRDFATVRKVLSMPQVNIVKKTEVQTGGFSKESILPKRNSDKLIARKKDWDPKKYGGFDSPTVAYSVLVVAKVEKGKSKKLKSVKELLGITIMERSSFEKNPIDFLEAKGYKEVKKDLIIKLPKYSLFELENGRKRMLASAGELQKGNELALPSKYVNFLYLASHYEKLKGSPEDNEQKQLFVEQHKHYLDEIIEQISEFSKRVILADANLDKVLSAYNKHRDKPIREQAENIIHLFTLTNLGAPAAFKYFDTTIDRKRYTSTKEVLDATLIHQSITGLYETRIDLSQLGGDGGGGGEAAAKGGMNPLQLLQPLPAEIKGTKLLAHWNSGATITCIPESFLEDEQPIKKTLIKTIHGEKQQNVYYVTFKVKGRKVEAEVIASPYEYILLSPTDVPWLTQQPLQLTILVPLQEYQEKILSKTALPEDQKQQLKTLFVKYDNLWQHWENQVGHRKIRPHNIATGDYPPRPQKQYPINPKAKPSIQIVIDDLLKQGVLTPQNSTMNTPVYPVPKPDGRWRMVLDYREVNKTIPLTAAQNQHSAGILATIVRQKYKTTLDLANGFWAHPITPESYWLTAFTWQGKQYCWTRLPQGFLNSPALFNADVVDLLKEIPNVQVYVDDIYLSHDDPKEHVQQLEKVFQILLQAGYVVSLKKSEIGQKTVEFLGFNITKEGRGLTDTFKTKLLNITPPKDLKQLQSILGKLNFARNFIPNFAELVQPLYNLIAPAKGKYIEWSEENTKQLNMVIEALNTASNLEERLPEQRLVIKVNTSPSAGYVRYYNETGKKPIMYLNYVFSKAELKFSMLEKLLTTMHKALIKAMDLAMGQEILVYSPIVSMTKIQKTPLPERKALPIRWITWMTYLEDPRIQFHYDKTLPELKHIPDVYTSSQSPVKHPSQYEGVFYTDGSAIKSPDPTKSNNAGMGIVHATYKPEYQVLNQWSIPLGNHTAQMAEIAAVEFACKKALKIPGPVLVITDSFYVAESANKELPYWKSNGFVNNKKKPLKHISKWKSIAECLSMKPDITIQHEKGISLQIPVFILKGNALADKLATQGSYVVNAGKRTADGSEFEKRTADGSEFESPKKKAKVE

SEQ ID NO: 1351 - protein, 2176 aa, synthetic construct
  source 1..2176: note = Description of Artificial Sequence: Synthetic polypeptide
MPAAKRVKLDGGDKKYSIGLDIGTNSVGWAVITDEYKVPSKKFKVLGNTDRHSIKKNLIGALLFDSGETAEATRLKRTARRRYTRRKNRICYLQEIFSNEMAKVDDSFFHRLEESFLVEEDKKHERHPIFGNIVDEVAYHEKYPTIYHLRKKLVDSTDKADLRLIYLALAHMIKFRGHFLIEGDLNPDNSDVDKLFIQLVQTYNQLFEENPINASGVDAKAILSARLSKSRRLENLIAQLPGEKKNGLFGNLIALSLGLTPNFKSNFDLAEDAKLQLSKDTYDDDLDNLLAQIGDQYADLFLAAKNLSDAILLSDILRVNTEITKAPLSASMIKRYDEHHQDLTLLKALVRQQLPEKYKEIFFDQSKNGYAGYIDGGASQEEFYKFIKPILEKMDGTEELLVKLNREDLLRKQRTFDNGSIPHQIHLGELHAILRRQEDFYPFLKDNREKIEKILTFRIPYYVGPLARGNSRFAWMTRKSEETITPWNFEEVVDKGASAQSFIERMTNFDKNLPNEKVLPKHSLLYEYFTVYNELTKVKYVTEGMRKPAFLSGEQKKAIVDLLFKTNRKVTVKQLKEDYFKKIECFDSVEISGVEDRFNASLGTYHDLLKIIKDKDFLDNEENEDILEDIVLTLTLFEDREMIEERLKTYAHLFDDKVMKQLKRRRYTGWGRLSRKLINGIRDKQSGKTILDFLKSDGFANRNFMQLIHDDSLTFKEDIQKAQVSGQGDSLHEHIANLAGSPAIKKGILQTVKVVDELVKVMGRHKPENIVIEMARENQTTQKGQKNSRERMKRIEEGIKELGSQILKEHPVENTQLQNEKLYLYYLQNGRDMYVDQELDINRLSDYDVDHIVPQSFLKDDSIDNKVLTRSDKARGKSDNVPSEEVVKKMKNYWRQLLNAKLITQRKFDNLTKAERGGLSELDKAGFIKRQLVETRQITKHVAQILDSRMNTKYDENDKLIREVKVITLKSKLVSDFRKDFQFYKVREINNYHHAHDAYLNAVVGTALIKKYPKLESEFVYGDYKVYDVRKMIAKSEQEIGKATAKYFFYSNIMNFFKTEITLANGEIRKRPLIETNGETGEIVWDKGRDFATVRKVLSMPQVNIVKKTEVQTGGFSKESILPKRNSDKLIARKKDWDPKKYGGFDSPTVAYSVLVVAKVEKGKSKKLKSVKELLGITIMERSSFEKNPIDFLEAKGYKEVKKDLIIKLPKYSLFELENGRKRMLASAGELQKGNELALPSKYVNFLYLASHYEKLKGSPEDNEQKQLFVEQHKHYLDEIIEQISEFSKRVILADANLDKVLSAYNKHRDKPIREQAENIIHLFTLTNLGAPAAFKYFDTTIDRKRYTSTKEVLDATLIHQSITGLYETRIDLSQLGGDGGGSSGGSEAAAKGGMNPLQLLQPLPAEIKGTKLLAHWNSGATITCIPESFLEDEQPIKKTLIKTIHGEKQQNVYYVTFKVKGRKVEAEVIASPYEYILLSPTDVPWLTQQPLQLTILVPLQEYQEKILSKTALPEDQKQQLKTLFVKYDNLWQHWENQVGHRKIRPHNIATGDYPPRPQKQYPINPKAKPSIQIVIDDLLKQGVLTPQNSTMNTPVYPVPKPDGRWRMVLDYREVNKTIPLTAAQNQHSAGILATIVRQKYKTTLDLANGFWAHPITPESYWLTAFTWQGKQYCWTRLPQGFLNSPALFNADVVDLLKEIPNVQVYVDDIYLSHDDPKEHVQQLEKVFQILLQAGYVVSLKKSEIGQKTVEFLGFNITKEGRGLTDTFKTKLLNITPPKDLKQLQSILGKLNFARNFIPNFAELVQPLYNLIAPAKGKYIEWSEENTKQLNMVIEALNTASNLEERLPEQRLVIKVNTSPSAGYVRYYNETGKKPIMYLNYVFSKAELKFSMLEKLLTTMHKALIKAMDLAMGQEILVYSPIVSMTKIQKTPLPERKALPIRWITWMTYLEDPRIQFHYDKTLPELKHIPDVYTSSQSPVKHPSQYEGVFYTDGSAIKSPDPTKSNNAGMGIVHATYKPEYQVLNQWSIPLGNHTAQMAEIAAVEFACKKALKIPGPVLVITDSFYVAESANKELPYWKSNGFVNNKKKPLKHISKWKSIAECLSMKPDITIQHEKGISLQIPVFILKGNALADKLATQGSYVVNAGKRTADGSEFEKRTADGSEFESPKKKAKVE

SEQ ID NO: 1352 - protein, 2174 aa, synthetic construct
  source 1..2174: note = Description of Artificial Sequence: Synthetic polypeptide
MPAAKRVKLDGGDKKYSIGLDIGTNSVGWAVITDEYKVPSKKFKVLGNTDRHSIKKNLIGALLFDSGETAEATRLKRTARRRYTRRKNRICYLQEIFSNEMAKVDDSFFHRLEESFLVEEDKKHERHPIFGNIVDEVAYHEKYPTIYHLRKKLVDSTDKADLRLIYLALAHMIKFRGHFLIEGDLNPDNSDVDKLFIQLVQTYNQLFEENPINASGVDAKAILSARLSKSRRLENLIAQLPGEKKNGLFGNLIALSLGLTPNFKSNFDLAEDAKLQLSKDTYDDDLDNLLAQIGDQYADLFLAAKNLSDAILLSDILRVNTEITKAPLSASMIKRYDEHHQDLTLLKALVRQQLPEKYKEIFFDQSKNGYAGYIDGGASQEEFYKFIKPILEKMDGTEELLVKLNREDLLRKQRTFDNGSIPHQIHLGELHAILRRQEDFYPFLKDNREKIEKILTFRIPYYVGPLARGNSRFAWMTRKSEETITPWNFEEVVDKGASAQSFIERMTNFDKNLPNEKVLPKHSLLYEYFTVYNELTKVKYVTEGMRKPAFLSGEQKKAIVDLLFKTNRKVTVKQLKEDYFKKIECFDSVEISGVEDRFNASLGTYHDLLKIIKDKDFLDNEENEDILEDIVLTLTLFEDREMIEERLKTYAHLFDDKVMKQLKRRRYTGWGRLSRKLINGIRDKQSGKTILDFLKSDGFANRNFMQLIHDDSLTFKEDIQKAQVSGQGDSLHEHIANLAGSPAIKKGILQTVKVVDELVKVMGRHKPENIVIEMARENQTTQKGQKNSRERMKRIEEGIKELGSQILKEHPVENTQLQNEKLYLYYLQNGRDMYVDQELDINRLSDYDVDHIVPQSFLKDDSIDNKVLTRSDKARGKSDNVPSEEVVKKMKNYWRQLLNAKLITQRKFDNLTKAERGGLSELDKAGFIKRQLVETRQITKHVAQILDSRMNTKYDENDKLIREVKVITLKSKLVSDFRKDFQFYKVREINNYHHAHDAYLNAVVGTALIKKYPKLESEFVYGDYKVYDVRKMIAKSEQEIGKATAKYFFYSNIMNFFKTEITLANGEIRKRPLIETNGETGEIVWDKGRDFATVRKVLSMPQVNIVKKTEVQTGGFSKESILPKRNSDKLIARKKDWDPKKYGGFDSPTVAYSVLVVAKVEKGKSKKLKSVKELLGITIMERSSFEKNPIDFLEAKGYKEVKKDLIIKLPKYSLFELENGRKRMLASAGELQKGNELALPSKYVNFLYLASHYEKLKGSPEDNEQKQLFVEQHKHYLDEIIEQISEFSKRVILADANLDKVLSAYNKHRDKPIREQAENIIHLFTLTNLGAPAAFKYFDTTIDRKRYTSTKEVLDATLIHQSITGLYETRIDLSQLGGDGGGSSPAPGGSGGMNPLQLLQPLPAEIKGTKLLAHWNSGATITCIPESFLEDEQPIKKTLIKTIHGEKQQNVYYVTFKVKGRKVEAEVIASPYEYILLSPTDVPWLTQQPLQLTILVPLQEYQEKILSKTALPEDQKQQLKTLFVKYDNLWQHWENQVGHRKIRPHNIATGDYPPRPQKQYPINPKAKPSIQIVIDDLLKQGVLTPQNSTMNTPVYPVPKPDGRWRMVLDYREVNKTIPLTAAQNQHSAGILATIVRQKYKTTLDLANGFWAHPITPESYWLTAFTWQGKQYCWTRLPQGFLNSPALFNADVVDLLKEIPNVQVYVDDIYLSHDDPKEHVQQLEKVFQILLQAGYVVSLKKSEIGQKTVEFLGFNITKEGRGLTDTFKTKLLNITPPKDLKQLQSILGKLNFARNFIPNFAELVQPLYNLIAPAKGKYIEWSEENTKQLNMVIEALNTASNLEERLPEQRLVIKVNTSPSAGYVRYYNETGKKPIMYLNYVFSKAELKFSMLEKLLTTMHKALIKAMDLAMGQEILVYSPIVSMTKIQKTPLPERKALPIRWITWMTYLEDPRIQFHYDKTLPELKHIPDVYTSSQSPVKHPSQYEGVFYTDGSAIKSPDPTKSNNAGMGIVHATYKPEYQVLNQWSIPLGNHTAQMAEIAAVEFACKKALKIPGPVLVITDSFYVAESANKELPYWKSNGFVNNKKKPLKHISKWKSIAECLSMKPDITIQHEKGISLQIPVFILKGNALADKLATQGSYVVNAGKRTADGSEFEKRTADGSEFESPKKKAKVE

SEQ ID NO: 1353 - protein, 2176 aa, synthetic construct
  source 1..2176: note = Description of Artificial Sequence: Synthetic polypeptide
MPAAKRVKLDGGDKKYSIGLDIGTNSVGWAVITDEYKVPSKKFKVLGNTDRHSIKKNLIGALLFDSGETAEATRLKRTARRRYTRRKNRICYLQEIFSNEMAKVDDSFFHRLEESFLVEEDKKHERHPIFGNIVDEVAYHEKYPTIYHLRKKLVDSTDKADLRLIYLALAHMIKFRGHFLIEGDLNPDNSDVDKLFIQLVQTYNQLFEENPINASGVDAKAILSARLSKSRRLENLIAQLPGEKKNGLFGNLIALSLGLTPNFKSNFDLAEDAKLQLSKDTYDDDLDNLLAQIGDQYADLFLAAKNLSDAILLSDILRVNTEITKAPLSASMIKRYDEHHQDLTLLKALVRQQLPEKYKEIFFDQSKNGYAGYIDGGASQEEFYKFIKPILEKMDGTEELLVKLNREDLLRKQRTFDNGSIPHQIHLGELHAILRRQEDFYPFLKDNREKIEKILTFRIPYYVGPLARGNSRFAWMTRKSEETITPWNFEEVVDKGASAQSFIERMTNFDKNLPNEKVLPKHSLLYEYFTVYNELTKVKYVTEGMRKPAFLSGEQKKAIVDLLFKTNRKVTVKQLKEDYFKKIECFDSVEISGVEDRFNASLGTYHDLLKIIKDKDFLDNEENEDILEDIVLTLTLFEDREMIEERLKTYAHLFDDKVMKQLKRRRYTGWGRLSRKLINGIRDKQSGKTILDFLKSDGFANRNFMQLIHDDSLTFKEDIQKAQVSGQGDSLHEHIANLAGSPAIKKGILQTVKVVDELVKVMGRHKPENIVIEMARENQTTQKGQKNSRERMKRIEEGIKELGSQILKEHPVENTQLQNEKLYLYYLQNGRDMYVDQELDINRLSDYDVDHIVPQSFLKDDSIDNKVLTRSDKARGKSDNVPSEEVVKKMKNYWRQLLNAKLITQRKFDNLTKAERGGLSELDKAGFIKRQLVETRQITKHVAQILDSRMNTKYDENDKLIREVKVITLKSKLVSDFRKDFQFYKVREINNYHHAHDAYLNAVVGTALIKKYPKLESEFVYGDYKVYDVRKMIAKSEQEIGKATAKYFFYSNIMNFFKTEITLANGEIRKRPLIETNGETGEIVWDKGRDFATVRKVLSMPQVNIVKKTEVQTGGFSKESILPKRNSDKLIARKKDWDPKKYGGFDSPTVAYSVLVVAKVEKGKSKKLKSVKELLGITIMERSSFEKNPIDFLEAKGYKEVKKDLIIKLPKYSLFELENGRKRMLASAGELQKGNELALPSKYVNFLYLASHYEKLKGSPEDNEQKQLFVEQHKHYLDEIIEQISEFSKRVILADANLDKVLSAYNKHRDKPIREQAENIIHLFTLTNLGAPAAFKYFDTTIDRKRYTSTKEVLDATLIHQSITGLYETRIDLSQLGGDGGGSSPAPEAAAKGGMNPLQLLQPLPAEIKGTKLLAHWNSGATITCIPESFLEDEQPIKKTLIKTIHGEKQQNVYYVTFKVKGRKVEAEVIASPYEYILLSPTDVPWLTQQPLQLTILVPLQEYQEKILSKTALPEDQKQQLKTLFVKYDNLWQHWENQVGHRKIRPHNIATGDYPPRPQKQYPINPKAKPSIQIVIDDLLKQGVLTPQNSTMNTPVYPVPKPDGRWRMVLDYREVNKTIPLTAAQNQHSAGILATIVRQKYKTTLDLANGFWAHPITPESYWLTAFTWQGKQYCWTRLPQGFLNSPALFNADVVDLLKEIPNVQVYVDDIYLSHDDPKEHVQQLEKVFQILLQAGYVVSLKKSEIGQKTVEFLGFNITKEGRGLTDTFKTKLLNITPPKDLKQLQSILGKLNFARNFIPNFAELVQPLYNLIAPAKGKYIEWSEENTKQLNMVIEALNTASNLEERLPEQRLVIKVNTSPSAGYVRYYNETGKKPIMYLNYVFSKAELKFSMLEKLLTTMHKALIKAMDLAMGQEILVYSPIVSMTKIQKTPLPERKALPIRWITWMTYLEDPRIQFHYDKTLPELKHIPDVYTSSQSPVKHPSQYEGVFYTDGSAIKSPDPTKSNNAGMGIVHATYKPEYQVLNQWSIPLGNHTAQMAEIAAVEFACKKALKIPGPVLVITDSFYVAESANKELPYWKSNGFVNNKKKPLKHISKWKSIAECLSMKPDITIQHEKGISLQIPVFILKGNALADKLATQGSYVVNAGKRTADGSEFEKRTADGSEFESPKKKAKVE

SEQ ID NO: 1354 - protein, 2174 aa, synthetic construct
  source 1..2174: note = Description of Artificial Sequence: Synthetic polypeptide
MPAAKRVKLDGGDKKYSIGLDIGTNSVGWAVITDEYKVPSKKFKVLGNTDRHSIKKNLIGALLFDSGETAEATRLKRTARRRYTRRKNRICYLQEIFSNEMAKVDDSFFHRLEESFLVEEDKKHERHPIFGNIVDEVAYHEKYPTIYHLRKKLVDSTDKADLRLIYLALAHMIKFRGHFLIEGDLNPDNSDVDKLFIQLVQTYNQLFEENPINASGVDAKAILSARLSKSRRLENLIAQLPGEKKNGLFGNLIALSLGLTPNFKSNFDLAEDAKLQLSKDTYDDDLDNLLAQIGDQYADLFLAAKNLSDAILLSDILRVNTEITKAPLSASMIKRYDEHHQDLTLLKALVRQQLPEKYKEIFFDQSKNGYAGYIDGGASQEEFYKFIKPILEKMDGTEELLVKLNREDLLRKQRTFDNGSIPHQIHLGELHAILRRQEDFYPFLKDNREKIEKILTFRIPYYVGPLARGNSRFAWMTRKSEETITPWNFEEVVDKGASAQSFIERMTNFDKNLPNEKVLPKHSLLYEYFTVYNELTKVKYVTEGMRKPAFLSGEQKKAIVDLLFKTNRKVTVKQLKEDYFKKIECFDSVEISGVEDRFNASLGTYHDLLKIIKDKDFLDNEENEDILEDIVLTLTLFEDREMIEERLKTYAHLFDDKVMKQLKRRRYTGWGRLSRKLINGIRDKQSGKTILDFLKSDGFANRNFMQLIHDDSLTFKEDIQKAQVSGQGDSLHEHIANLAGSPAIKKGILQTVKVVDELVKVMGRHKPENIVIEMARENQTTQKGQKNSRERMKRIEEGIKELGSQILKEHPVENTQLQNEKLYLYYLQNGRDMYVDQELDINRLSDYDVDHIVPQSFLKDDSIDNKVLTRSDKARGKSDNVPSEEVVKKMKNYWRQLLNAKLITQRKFDNLTKAERGGLSELDKAGFIKRQLVETRQITKHVAQILDSRMNTKYDENDKLIREVKVITLKSKLVSDFRKDFQFYKVREINNYHHAHDAYLNAVVGTALIKKYPKLESEFVYGDYKVYDVRKMIAKSEQEIGKATAKYFFYSNIMNFFKTEITLANGEIRKRPLIETNGETGEIVWDKGRDFATVRKVLSMPQVNIVKKTEVQTGGFSKESILPKRNSDKLIARKKDWDPKKYGGFDSPTVAYSVLVVAKVEKGKSKKLKSVKELLGITIMERSSFEKNPIDFLEAKGYKEVKKDLIIKLPKYSLFELENGRKRMLASAGELQKGNELALPSKYVNFLYLASHYEKLKGSPEDNEQKQLFVEQHKHYLDEIIEQISEFSKRVILADANLDKVLSAYNKHRDKPIREQAENIIHLFTLTNLGAPAAFKYFDTTIDRKRYTSTKEVLDATLIHQSITGLYETRIDLSQLGGDGGGGSGGGPAPGGMNPLQLLQPLPAEIKGTKLLAHWNSGATITCIPESFLEDEQPIKKTLIKTIHGEKQQNVYYVTFKVKGRKVEAEVIASPYEYILLSPTDVPWLTQQPLQLTILVPLQEYQEKILSKTALPEDQKQQLKTLFVKYDNLWQHWENQVGHRKIRPHNIATGDYPPRPQKQYPINPKAKPSIQIVIDDLLKQGVLTPQNSTMNTPVYPVPKPDGRWRMVLDYREVNKTIPLTAAQNQHSAGILATIVRQKYKTTLDLANGFWAHPITPESYWLTAFTWQGKQYCWTRLPQGFLNSPALFNADVVDLLKEIPNVQVYVDDIYLSHDDPKEHVQQLEKVFQILLQAGYVVSLKKSEIGQKTVEFLGFNITKEGRGLTDTFKTKLLNITPPKDLKQLQSILGKLNFARNFIPNFAELVQPLYNLIAPAKGKYIEWSEENTKQLNMVIEALNTASNLEERLPEQRLVIKVNTSPSAGYVRYYNETGKKPIMYLNYVFSKAELKFSMLEKLLTTMHKALIKAMDLAMGQEILVYSPIVSMTKIQKTPLPERKALPIRWITWMTYLEDPRIQFHYDKTLPELKHIPDVYTSSQSPVKHPSQYEGVFYTDGSAIKSPDPTKSNNAGMGIVHATYKPEYQVLNQWSIPLGNHTAQMAEIAAVEFACKKALKIPGPVLVITDSFYVAESANKELPYWKSNGFVNNKKKPLKHISKWKSIAECLSMKPDITIQHEKGISLQIPVFILKGNALADKLATQGSYVVNAGKRTADGSEFEKRTADGSEFESPKKKAKVE

SEQ ID NO: 1355 - protein, 2176 aa, synthetic construct
  source 1..2176: note = Description of Artificial Sequence: Synthetic polypeptide
MPAAKRVKLDGGDKKYSIGLDIGTNSVGWAVITDEYKVPSKKFKVLGNTDRHSIKKNLIGALLFDSGETAEATRLKRTARRRYTRRKNRICYLQEIFSNEMAKVDDSFFHRLEESFLVEEDKKHERHPIFGNIVDEVAYHEKYPTIYHLRKKLVDSTDKADLRLIYLALAHMIKFRGHFLIEGDLNPDNSDVDKLFIQLVQTYNQLFEENPINASGVDAKAILSARLSKSRRLENLIAQLPGEKKNGLFGNLIALSLGLTPNFKSNFDLAEDAKLQLSKDTYDDDLDNLLAQIGDQYADLFLAAKNLSDAILLSDILRVNTEITKAPLSASMIKRYDEHHQDLTLLKALVRQQLPEKYKEIFFDQSKNGYAGYIDGGASQEEFYKFIKPILEKMDGTEELLVKLNREDLLRKQRTFDNGSIPHQIHLGELHAILRRQEDFYPFLKDNREKIEKILTFRIPYYVGPLARGNSRFAWMTRKSEETITPWNFEEVVDKGASAQSFIERMTNFDKNLPNEKVLPKHSLLYEYFTVYNELTKVKYVTEGMRKPAFLSGEQKKAIVDLLFKTNRKVTVKQLKEDYFKKIECFDSVEISGVEDRFNASLGTYHDLLKIIKDKDFLDNEENEDILEDIVLTLTLFEDREMIEERLKTYAHLFDDKVMKQLKRRRYTGWGRLSRKLINGIRDKQSGKTILDFLKSDGFANRNFMQLIHDDSLTFKEDIQKAQVSGQGDSLHEHIANLAGSPAIKKGILQTVKVVDELVKVMGRHKPENIVIEMARENQTTQKGQKNSRERMKRIEEGIKELGSQILKEHPVENTQLQNEKLYLYYLQNGRDMYVDQELDINRLSDYDVDHIVPQSFLKDDSIDNKVLTRSDKARGKSDNVPSEEVVKKMKNYWRQLLNAKLITQRKFDNLTKAERGGLSELDKAGFIKRQLVETRQITKHVAQILDSRMNTKYDENDKLIREVKVITLKSKLVSDFRKDFQFYKVREINNYHHAHDAYLNAVVGTALIKKYPKLESEFVYGDYKVYDVRKMIAKSEQEIGKATAKYFFYSNIMNFFKTEITLANGEIRKRPLIETNGETGEIVWDKGRDFATVRKVLSMPQVNIVKKTEVQTGGFSKESILPKRNSDKLIARKKDWDPKKYGGFDSPTVAYSVLVVAKVEKGKSKKLKSVKELLGITIMERSSFEKNPIDFLEAKGYKEVKKDLIIKLPKYSLFELENGRKRMLASAGELQKGNELALPSKYVNFLYLASHYEKLKGSPEDNEQKQLFVEQHKHYLDEIIEQISEFSKRVILADANLDKVLSAYNKHRDKPIREQAENIIHLFTLTNLGAPAAFKYFDTTIDRKRYTSTKEVLDATLIHQSITGLYETRIDLSQLGGDGGEAAAKGSSGGSGGMNPLQLLQPLPAEIKGTKLLAHWNSGATITCIPESFLEDEQPIKKTLIKTIHGEKQQNVYYVTFKVKGRKVEAEVIASPYEYILLSPTDVPWLTQQPLQLTILVPLQEYQEKILSKTALPEDQKQQLKTLFVKYDNLWQHWENQVGHRKIRPHNIATGDYPPRPQKQYPINPKAKPSIQIVIDDLLKQGVLTPQNSTMNTPVYPVPKPDGRWRMVLDYREVNKTIPLTAAQNQHSAGILATIVRQKYKTTLDLANGFWAHPITPESYWLTAFTWQGKQYCWTRLPQGFLNSPALFNADVVDLLKEIPNVQVYVDDIYLSHDDPKEHVQQLEKVFQILLQAGYVVSLKKSEIGQKTVEFLGFNITKEGRGLTDTFKTKLLNITPPKDLKQLQSILGKLNFARNFIPNFAELVQPLYNLIAPAKGKYIEWSEENTKQLNMVIEALNTASNLEERLPEQRLVIKVNTSPSAGYVRYYNETGKKPIMYLNYVFSKAELKFSMLEKLLTTMHKALIKAMDLAMGQEILVYSPIVSMTKIQKTPLPERKALPIRWITWMTYLEDPRIQFHYDKTLPELKHIPDVYTSSQSPVKHPSQYEGVFYTDGSAIKSPDPTKSNNAGMGIVHATYKPEYQVLNQWSIPLGNHTAQMAEIAAVEFACKKALKIPGPVLVITDSFYVAESANKELPYWKSNGFVNNKKKPLKHISKWKSIAECLSMKPDITIQHEKGISLQIPVFILKGNALADKLATQGSYVVNAGKRTADGSEFEKRTADGSEFESPKKKAKVE

SEQ ID NO: 1356 - protein, 2172 aa, synthetic construct
  source 1..2172: note = Description of Artificial Sequence: Synthetic polypeptide
MPAAKRVKLDGGDKKYSIGLDIGTNSVGWAVITDEYKVPSKKFKVLGNTDRHSIKKNLIGALLFDSGETAEATRLKRTARRRYTRRKNRICYLQEIFSNEMAKVDDSFFHRLEESFLVEEDKKHERHPIFGNIVDEVAYHEKYPTIYHLRKKLVDSTDKADLRLIYLALAHMIKFRGHFLIEGDLNPDNSDVDKLFIQLVQTYNQLFEENPINASGVDAKAILSARLSKSRRLENLIAQLPGEKKNGLFGNLIALSLGLTPNFKSNFDLAEDAKLQLSKDTYDDDLDNLLAQIGDQYADLFLAAKNLSDAILLSDILRVNTEITKAPLSASMIKRYDEHHQDLTLLKALVRQQLPEKYKEIFFDQSKNGYAGYIDGGASQEEFYKFIKPILEKMDGTEELLVKLNREDLLRKQRTFDNGSIPHQIHLGELHAILRRQEDFYPFLKDNREKIEKILTFRIPYYVGPLARGNSRFAWMTRKSEETITPWNFEEVVDKGASAQSFIERMTNFDKNLPNEKVLPKHSLLYEYFTVYNELTKVKYVTEGMRKPAFLSGEQKKAIVDLLFKTNRKVTVKQLKEDYFKKIECFDSVEISGVEDRFNASLGTYHDLLKIIKDKDFLDNEENEDILEDIVLTLTLFEDREMIEERLKTYAHLFDDKVMKQLKRRRYTGWGRLSRKLINGIRDKQSGKTILDFLKSDGFANRNFMQLIHDDSLTFKEDIQKAQVSGQGDSLHEHIANLAGSPAIKKGILQTVKVVDELVKVMGRHKPENIVIEMARENQTTQKGQKNSRERMKRIEEGIKELGSQILKEHPVENTQLQNEKLYLYYLQNGRDMYVDQELDINRLSDYDVDHIVPQSFLKDDSIDNKVLTRSDKARGKSDNVPSEEVVKKMKNYWRQLLNAKLITQRKFDNLTKAERGGLSELDKAGFIKRQLVETRQITKHVAQILDSRMNTKYDENDKLIREVKVITLKSKLVSDFRKDFQFYKVREINNYHHAHDAYLNAVVGTALIKKYPKLESEFVYGDYKVYDVRKMIAKSEQEIGKATAKYFFYSNIMNFFKTEITLANGEIRKRPLIETNGETGEIVWDKGRDFATVRKVLSMPQVNIVKKTEVQTGGFSKESILPKRNSDKLIARKKDWDPKKYGGFDSPTVAYSVLVVAKVEKGKSKKLKSVKELLGITIMERSSFEKNPIDFLEAKGYKEVKKDLIIKLPKYSLFELENGRKRMLASAGELQKGNELALPSKYVNFLYLASHYEKLKGSPEDNEQKQLFVEQHKHYLDEIIEQISEFSKRVILADANLDKVLSAYNKHRDKPIREQAENIIHLFTLTNLGAPAAFKYFDTTIDRKRYTSTKEVLDATLIHQSITGLYETRIDLSQLGGDGGGGGGGGGGGMNPLQLLQPLPAEIKGTKLLAHWNSGATITCIPESFLEDEQPIKKTLIKTIHGEKQQNVYYVTFKVKGRKVEAEVIASPYEYILLSPTDVPWLTQQPLQLTILVPLQEYQEKILSKTALPEDQKQQLKTLFVKYDNLWQHWENQVGHRKIRPHNIATGDYPPRPQKQYPINPKAKPSIQIVIDDLLKQGVLTPQNSTMNTPVYPVPKPDGRWRMVLDYREVNKTIPLTAAQNQHSAGILATIVRQKYKTTLDLANGFWAHPITPESYWLTAFTWQGKQYCWTRLPQGFLNSPALFNADVVDLLKEIPNVQVYVDDIYLSHDDPKEHVQQLEKVFQILLQAGYVVSLKKSEIGQKTVEFLGFNITKEGRGLTDTFKTKLLNITPPKDLKQLQSILGKLNFARNFIPNFAELVQPLYNLIAPAKGKYIEWSEENTKQLNMVIEALNTASNLEERLPEQRLVIKVNTSPSAGYVRYYNETGKKPIMYLNYVFSKAELKFSMLEKLLTTMHKALIKAMDLAMGQEILVYSPIVSMTKIQKTPLPERKALPIRWITWMTYLEDPRIQFHYDKTLPELKHIPDVYTSSQSPVKHPSQYEGVFYTDGSAIKSPDPTKSNNAGMGIVHATYKPEYQVLNQWSIPLGNHTAQMAEIAAVEFACKKALKIPGPVLVITDSFYVAESANKELPYWKSNGFVNNKKKPLKHISKWKSIAECLSMKPDITIQHEKGISLQIPVFILKGNALADKLATQGSYVVNAGKRTADGSEFEKRTADGSEFESPKKKAKVE

SEQ ID NO: 1357 - protein, 2176 aa, synthetic construct
  source 1..2176: note = Description of Artificial Sequence: Synthetic polypeptide
MPAAKRVKLDGGDKKYSIGLDIGTNSVGWAVITDEYKVPSKKFKVLGNTDRHSIKKNLIGALLFDSGETAEATRLKRTARRRYTRRKNRICYLQEIFSNEMAKVDDSFFHRLEESFLVEEDKKHERHPIFGNIVDEVAYHEKYPTIYHLRKKLVDSTDKADLRLIYLALAHMIKFRGHFLIEGDLNPDNSDVDKLFIQLVQTYNQLFEENPINASGVDAKAILSARLSKSRRLENLIAQLPGEKKNGLFGNLIALSLGLTPNFKSNFDLAEDAKLQLSKDTYDDDLDNLLAQIGDQYADLFLAAKNLSDAILLSDILRVNTEITKAPLSASMIKRYDEHHQDLTLLKALVRQQLPEKYKEIFFDQSKNGYAGYIDGGASQEEFYKFIKPILEKMDGTEELLVKLNREDLLRKQRTFDNGSIPHQIHLGELHAILRRQEDFYPFLKDNREKIEKILTFRIPYYVGPLARGNSRFAWMTRKSEETITPWNFEEVVDKGASAQSFIERMTNFDKNLPNEKVLPKHSLLYEYFTVYNELTKVKYVTEGMRKPAFLSGEQKKAIVDLLFKTNRKVTVKQLKEDYFKKIECFDSVEISGVEDRFNASLGTYHDLLKIIKDKDFLDNEENEDILEDIVLTLTLFEDREMIEERLKTYAHLFDDKVMKQLKRRRYTGWGRLSRKLINGIRDKQSGKTILDFLKSDGFANRNFMQLIHDDSLTFKEDIQKAQVSGQGDSLHEHIANLAGSPAIKKGILQTVKVVDELVKVMGRHKPENIVIEMARENQTTQKGQKNSRERMKRIEEGIKELGSQILKEHPVENTQLQNEKLYLYYLQNGRDMYVDQELDINRLSDYDVDHIVPQSFLKDDSIDNKVLTRSDKARGKSDNVPSEEVVKKMKNYWRQLLNAKLITQRKFDNLTKAERGGLSELDKAGFIKRQLVETRQITKHVAQILDSRMNTKYDENDKLIREVKVITLKSKLVSDFRKDFQFYKVREINNYHHAHDAYLNAVVGTALIKKYPKLESEFVYGDYKVYDVRKMIAKSEQEIGKATAKYFFYSNIMNFFKTEITLANGEIRKRPLIETNGETGEIVWDKGRDFATVRKVLSMPQVNIVKKTEVQTGGFSKESILPKRNSDKLIARKKDWDPKKYGGFDSPTVAYSVLVVAKVEKGKSKKLKSVKELLGITIMERSSFEKNPIDFLEAKGYKEVKKDLIIKLPKYSLFELENGRKRMLASAGELQKGNELALPSKYVNFLYLASHYEKLKGSPEDNEQKQLFVEQHKHYLDEIIEQISEFSKRVILADANLDKVLSAYNKHRDKPIREQAENIIHLFTLTNLGAPAAFKYFDTTIDRKRYTSTKEVLDATLIHQSITGLYETRIDLSQLGGDGGGSSEAAAKGGSGGMNPLQLLQPLPAEIKGTKLLAHWNSGATITCIPESFLEDEQPIKKTLIKTIHGEKQQNVYYVTFKVKGRKVEAEVIASPYEYILLSPTDVPWLTQQPLQLTILVPLQEYQEKILSKTALPEDQKQQLKTLFVKYDNLWQHWENQVGHRKIRPHNIATGDYPPRPQKQYPINPKAKPSIQIVIDDLLKQGVLTPQNSTMNTPVYPVPKPDGRWRMVLDYREVNKTIPLTAAQNQHSAGILATIVRQKYKTTLDLANGFWAHPITPESYWLTAFTWQGKQYCWTRLPQGFLNSPALFNADVVDLLKEIPNVQVYVDDIYLSHDDPKEHVQQLEKVFQILLQAGYVVSLKKSEIGQKTVEFLGFNITKEGRGLTDTFKTKLLNITPPKDLKQLQSILGKLNFARNFIPNFAELVQPLYNLIAPAKGKYIEWSEENTKQLNMVIEALNTASNLEERLPEQRLVIKVNTSPSAGYVRYYNETGKKPIMYLNYVFSKAELKFSMLEKLLTTMHKALIKAMDLAMGQEILVYSPIVSMTKIQKTPLPERKALPIRWITWMTYLEDPRIQFHYDKTLPELKHIPDVYTSSQSPVKHPSQYEGVFYTDGSAIKSPDPTKSNNAGMGIVHATYKPEYQVLNQWSIPLGNHTAQMAEIAAVEFACKKALKIPGPVLVITDSFYVAESANKELPYWKSNGFVNNKKKPLKHISKWKSIAECLSMKPDITIQHEKGISLQIPVFILKGNALADKLATQGSYVVNAGKRTADGSEFEKRTADGSEFESPKKKAKVE

SEQ ID NO: 1358 - protein, 2171 aa, synthetic construct
  source 1..2171: note = Description of Artificial Sequence: Synthetic polypeptide
MPAAKRVKLDGGDKKYSIGLDIGTNSVGWAVITDEYKVPSKKFKVLGNTDRHSIKKNLIGALLFDSGETAEATRLKRTARRRYTRRKNRICYLQEIFSNEMAKVDDSFFHRLEESFLVEEDKKHERHPIFGNIVDEVAYHEKYPTIYHLRKKLVDSTDKADLRLIYLALAHMIKFRGHFLIEGDLNPDNSDVDKLFIQLVQTYNQLFEENPINASGVDAKAILSARLSKSRRLENLIAQLPGEKKNGLFGNLIALSLGLTPNFKSNFDLAEDAKLQLSKDTYDDDLDNLLAQIGDQYADLFLAAKNLSDAILLSDILRVNTEITKAPLSASMIKRYDEHHQDLTLLKALVRQQLPEKYKEIFFDQSKNGYAGYIDGGASQEEFYKFIKPILEKMDGTEELLVKLNREDLLRKQRTFDNGSIPHQIHLGELHAILRRQEDFYPFLKDNREKIEKILTFRIPYYVGPLARGNSRFAWMTRKSEETITPWNFEEVVDKGASAQSFIERMTNFDKNLPNEKVLPKHSLLYEYFTVYNELTKVKYVTEGMRKPAFLSGEQKKAIVDLLFKTNRKVTVKQLKEDYFKKIECFDSVEISGVEDRFNASLGTYHDLLKIIKDKDFLDNEENEDILEDIVLTLTLFEDREMIEERLKTYAHLFDDKVMKQLKRRRYTGWGRLSRKLINGIRDKQSGKTILDFLKSDGFANRNFMQLIHDDSLTFKEDIQKAQVSGQGDSLHEHIANLAGSPAIKKGILQTVKVVDELVKVMGRHKPENIVIEMARENQTTQKGQKNSRERMKRIEEGIKELGSQILKEHPVENTQLQNEKLYLYYLQNGRDMYVDQELDINRLSDYDVDHIVPQSFLKDDSIDNKVLTRSDKARGKSDNVPSEEVVKKMKNYWRQLLNAKLITQRKFDNLTKAERGGLSELDKAGFIKRQLVETRQITKHVAQILDSRMNTKYDENDKLIREVKVITLKSKLVSDFRKDFQFYKVREINNYHHAHDAYLNAVVGTALIKKYPKLESEFVYGDYKVYDVRKMIAKSEQEIGKATAKYFFYSNIMNFFKTEITLANGEIRKRPLIETNGETGEIVWDKGRDFATVRKVLSMPQVNIVKKTEVQTGGFSKESILPKRNSDKLIARKKDWDPKKYGGFDSPTVAYSVLVVAKVEKGKSKKLKSVKELLGITIMERSSFEKNPIDFLEAKGYKEVKKDLIIKLPKYSLFELENGRKRMLASAGELQKGNELALPSKYVNFLYLASHYEKLKGSPEDNEQKQLFVEQHKHYLDEIIEQISEFSKRVILADANLDKVLSAYNKHRDKPIREQAENIIHLFTLTNLGAPAAFKYFDTTIDRKRYTSTKEVLDATLIHQSITGLYETRIDLSQLGGDGGPAPGSSGGMNPLQLLQPLPAEIKGTKLLAHWNSGATITCIPESFLEDEQPIKKTLIKTIHGEKQQNVYYVTFKVKGRKVEAEVIASPYEYILLSPTDVPWLTQQPLQLTILVPLQEYQEKILSKTALPEDQKQQLKTLFVKYDNLWQHWENQVGHRKIRPHNIATGDYPPRPQKQYPINPKAKPSIQIVIDDLLKQGVLTPQNSTMNTPVYPVPKPDGRWRMVLDYREVNKTIPLTAAQNQHSAGILATIVRQKYKTTLDLANGFWAHPITPESYWLTAFTWQGKQYCWTRLPQGFLNSPALFNADVVDLLKEIPNVQVYVDDIYLSHDDPKEHVQQLEKVFQILLQAGYVVSLKKSEIGQKTVEFLGFNITKEGRGLTDTFKTKLLNITPPKDLKQLQSILGKLNFARNFIPNFAELVQPLYNLIAPAKGKYIEWSEENTKQLNMVIEALNTASNLEERLPEQRLVIKVNTSPSAGYVRYYNETGKKPIMYLNYVFSKAELKFSMLEKLLTTMHKALIKAMDLAMGQEILVYSPIVSMTKIQKTPLPERKALPIRWITWMTYLEDPRIQFHYDKTLPELKHIPDVYTSSQSPVKHPSQYEGVFYTDGSAIKSPDPTKSNNAGMGIVHATYKPEYQVLNQWSIPLGNHTAQMAEIAAVEFACKKALKIPGPVLVITDSFYVAESANKELPYWKSNGFVNNKKKPLKHISKWKSIAECLSMKPDITIQHEKGISLQIPVFILKGNALADKLATQGSYVVNAGKRTADGSEFEKRTADGSEFESPKKKAKVE

SEQ ID NO: 1359 - protein, 2176 aa, synthetic construct
  source 1..2176: note = Description of Artificial Sequence: Synthetic polypeptide
MPAAKRVKLDGGDKKYSIGLDIGTNSVGWAVITDEYKVPSKKFKVLGNTDRHSIKKNLIGALLFDSGETAEATRLKRTARRRYTRRKNRICYLQEIFSNEMAKVDDSFFHRLEESFLVEEDKKHERHPIFGNIVDEVAYHEKYPTIYHLRKKLVDSTDKADLRLIYLALAHMIKFRGHFLIEGDLNPDNSDVDKLFIQLVQTYNQLFEENPINASGVDAKAILSARLSKSRRLENLIAQLPGEKKNGLFGNLIALSLGLTPNFKSNFDLAEDAKLQLSKDTYDDDLDNLLAQIGDQYADLFLAAKNLSDAILLSDILRVNTEITKAPLSASMIKRYDEHHQDLTLLKALVRQQLPEKYKEIFFDQSKNGYAGYIDGGASQEEFYKFIKPILEKMDGTEELLVKLNREDLLRKQRTFDNGSIPHQIHLGELHAILRRQEDFYPFLKDNREKIEKILTFRIPYYVGPLARGNSRFAWMTRKSEETITPWNFEEVVDKGASAQSFIERMTNFDKNLPNEKVLPKHSLLYEYFTVYNELTKVKYVTEGMRKPAFLSGEQKKAIVDLLFKTNRKVTVKQLKEDYFKKIECFDSVEISGVEDRFNASLGTYHDLLKIIKDKDFLDNEENEDILEDIVLTLTLFEDREMIEERLKTYAHLFDDKVMKQLKRRRYTGWGRLSRKLINGIRDKQSGKTILDFLKSDGFANRNFMQLIHDDSLTFKEDIQKAQVSGQGDSLHEHIANLAGSPAIKKGILQTVKVVDELVKVMGRHKPENIVIEMARENQTTQKGQKNSRERMKRIEEGIKELGSQILKEHPVENTQLQNEKLYLYYLQNGRDMYVDQELDINRLSDYDVDHIVPQSFLKDDSIDNKVLTRSDKARGKSDNVPSEEVVKKMKNYWRQLLNAKLITQRKFDNLTKAERGGLSELDKAGFIKRQLVETRQITKHVAQILDSRMNTKYDENDKLIREVKVITLKSKLVSDFRKDFQFYKVREINNYHHAHDAYLNAVVGTALIKKYPKLESEFVYGDYKVYDVRKMIAKSEQEIGKATAKYFFYSNIMNFFKTEITLANGEIRKRPLIETNGETGEIVWDKGRDFATVRKVLSMPQVNIVKKTEVQTGGFSKESILPKRNSDKLIARKKDWDPKKYGGFDSPTVAYSVLVVAKVEKGKSKKLKSVKELLGITIMERSSFEKNPIDFLEAKGYKEVKKDLIIKLPKYSLFELENGRKRMLASAGELQKGNELALPSKYVNFLYLASHYEKLKGSPEDNEQKQLFVEQHKHYLDEIIEQISEFSKRVILADANLDKVLSAYNKHRDKPIREQAENIIHLFTLTNLGAPAAFKYFDTTIDRKRYTSTKEVLDATLIHQSITGLYETRIDLSQLGGDGGPAPEAAAKGGSGGMNPLQLLQPLPAEIKGTKLLAHWNSGATITCIPESFLEDEQPIKKTLIKTIHGEKQQNVYYVTFKVKGRKVEAEVIASPYEYILLSPTDVPWLTQQPLQLTILVPLQEYQEKILSKTALPEDQKQQLKTLFVKYDNLWQHWENQVGHRKIRPHNIATGDYPPRPQKQYPINPKAKPSIQIVIDDLLKQGVLTPQNSTMNTPVYPVPKPDGRWRMVLDYREVNKTIPLTAAQNQHSAGILATIVRQKYKTTLDLANGFWAHPITPESYWLTAFTWQGKQYCWTRLPQGFLNSPALFNADVVDLLKEIPNVQVYVDDIYLSHDDPKEHVQQLEKVFQILLQAGYVVSLKKSEIGQKTVEFLGFNITKEGRGLTDTFKTKLLNITPPKDLKQLQSILGKLNFARNFIPNFAELVQPLYNLIAPAKGKYIEWSEENTKQLNMVIEALNTASNLEERLPEQRLVIKVNTSPSAGYVRYYNETGKKPIMYLNYVFSKAELKFSMLEKLLTTMHKALIKAMDLAMGQEILVYSPIVSMTKIQKTPLPERKALPIRWITWMTYLEDPRIQFHYDKTLPELKHIPDVYTSSQSPVKHPSQYEGVFYTDGSAIKSPDPTKSNNAGMGIVHATYKPEYQVLNQWSIPLGNHTAQMAEIAAVEFACKKALKIPGPVLVITDSFYVAESANKELPYWKSNGFVNNKKKPLKHISKWKSIAECLSMKPDITIQHEKGISLQIPVFILKGNALADKLATQGSYVVNAGKRTADGSEFEKRTADGSEFESPKKKAKVE

SEQ ID NO: 1360 - protein, 2176 aa, synthetic construct
  source 1..2176: note = Description of Artificial Sequence: Synthetic polypeptide
MPAAKRVKLDGGDKKYSIGLDIGTNSVGWAVITDEYKVPSKKFKVLGNTDRHSIKKNLIGALLFDSGETAEATRLKRTARRRYTRRKNRICYLQEIFSNEMAKVDDSFFHRLEESFLVEEDKKHERHPIFGNIVDEVAYHEKYPTIYHLRKKLVDSTDKADLRLIYLALAHMIKFRGHFLIEGDLNPDNSDVDKLFIQLVQTYNQLFEENPINASGVDAKAILSARLSKSRRLENLIAQLPGEKKNGLFGNLIALSLGLTPNFKSNFDLAEDAKLQLSKDTYDDDLDNLLAQIGDQYADLFLAAKNLSDAILLSDILRVNTEITKAPLSASMIKRYDEHHQDLTLLKALVRQQLPEKYKEIFFDQSKNGYAGYIDGGASQEEFYKFIKPILEKMDGTEELLVKLNREDLLRKQRTFDNGSIPHQIHLGELHAILRRQEDFYPFLKDNREKIEKILTFRIPYYVGPLARGNSRFAWMTRKSEETITPWNFEEVVDKGASAQSFIERMTNFDKNLPNEKVLPKHSLLYEYFTVYNELTKVKYVTEGMRKPAFLSGEQKKAIVDLLFKTNRKVTVKQLKEDYFKKIECFDSVEISGVEDRFNASLGTYHDLLKIIKDKDFLDNEENEDILEDIVLTLTLFEDREMIEERLKTYAHLFDDKVMKQLKRRRYTGWGRLSRKLINGIRDKQSGKTILDFLKSDGFANRNFMQLIHDDSLTFKEDIQKAQVSGQGDSLHEHIANLAGSPAIKKGILQTVKVVDELVKVMGRHKPENIVIEMARENQTTQKGQKNSRERMKRIEEGIKELGSQILKEHPVENTQLQNEKLYLYYLQNGRDMYVDQELDINRLSDYDVDHIVPQSFLKDDSIDNKVLTRSDKARGKSDNVPSEEVVKKMKNYWRQLLNAKLITQRKFDNLTKAERGGLSELDKAGFIKRQLVETRQITKHVAQILDSRMNTKYDENDKLIREVKVITLKSKLVSDFRKDFQFYKVREINNYHHAHDAYLNAVVGTALIKKYPKLESEFVYGDYKVYDVRKMIAKSEQEIGKATAKYFFYSNIMNFFKTEITLANGEIRKRPLIETNGETGEIVWDKGRDFATVRKVLSMPQVNIVKKTEVQTGGFSKESILPKRNSDKLIARKKDWDPKKYGGFDSPTVAYSVLVVAKVEKGKSKKLKSVKELLGITIMERSSFEKNPIDFLEAKGYKEVKKDLIIKLPKYSLFELENGRKRMLASAGELQKGNELALPSKYVNFLYLASHYEKLKGSPEDNEQKQLFVEQHKHYLDEIIEQISEFSKRVILADANLDKVLSAYNKHRDKPIREQAENIIHLFTLTNLGAPAAFKYFDTTIDRKRYTSTKEVLDATLIHQSITGLYETRIDLSQLGGDGGEAAAKGGGPAPGGMNPLQLLQPLPAEIKGTKLLAHWNSGATITCIPESFLEDEQPIKKTLIKTIHGEKQQNVYYVTFKVKGRKVEAEVIASPYEYILLSPTDVPWLTQQPLQLTILVPLQEYQEKILSKTALPEDQKQQLKTLFVKYDNLWQHWENQVGHRKIRPHNIATGDYPPRPQKQYPINPKAKPSIQIVIDDLLKQGVLTPQNSTMNTPVYPVPKPDGRWRMVLDYREVNKTIPLTAAQNQHSAGILATIVRQKYKTTLDLANGFWAHPITPESYWLTAFTWQGKQYCWTRLPQGFLNSPALFNADVVDLLKEIPNVQVYVDDIYLSHDDPKEHVQQLEKVFQILLQAGYVVSLKKSEIGQKTVEFLGFNITKEGRGLTDTFKTKLLNITPPKDLKQLQSILGKLNFARNFIPNFAELVQPLYNLIAPAKGKYIEWSEENTKQLNMVIEALNTASNLEERLPEQRLVIKVNTSPSAGYVRYYNETGKKPIMYLNYVFSKAELKFSMLEKLLTTMHKALIKAMDLAMGQEILVYSPIVSMTKIQKTPLPERKALPIRWITWMTYLEDPRIQFHYDKTLPELKHIPDVYTSSQSPVKHPSQYEGVFYTDGSAIKSPDPTKSNNAGMGIVHATYKPEYQVLNQWSIPLGNHTAQMAEIAAVEFACKKALKIPGPVLVITDSFYVAESANKELPYWKSNGFVNNKKKPLKHISKWKSIAECLSMKPDITIQHEKGISLQIPVFILKGNALADKLATQGSYVVNAGKRTADGSEFEKRTADGSEFESPKKKAKVE

SEQ ID NO: 1361 - protein, 2176 aa, synthetic construct
  source 1..2176: note = Description of Artificial Sequence: Synthetic polypeptide
MPAAKRVKLDGGDKKYSIGLDIGTNSVGWAVITDEYKVPSKKFKVLGNTDRHSIKKNLIGALLFDSGETAEATRLKRTARRRYTRRKNRICYLQEIFSNEMAKVDDSFFHRLEESFLVEEDKKHERHPIFGNIVDEVAYHEKYPTIYHLRKKLVDSTDKADLRLIYLALAHMIKFRGHFLIEGDLNPDNSDVDKLFIQLVQTYNQLFEENPINASGVDAKAILSARLSKSRRLENLIAQLPGEKKNGLFGNLIALSLGLTPNFKSNFDLAEDAKLQLSKDTYDDDLDNLLAQIGDQYADLFLAAKNLSDAILLSDILRVNTEITKAPLSASMIKRYDEHHQDLTLLKALVRQQLPEKYKEIFFDQSKNGYAGYIDGGASQEEFYKFIKPILEKMDGTEELLVKLNREDLLRKQRTFDNGSIPHQIHLGELHAILRRQEDFYPFLKDNREKIEKILTFRIPYYVGPLARGNSRFAWMTRKSEETITPWNFEEVVDKGASAQSFIERMTNFDKNLPNEKVLPKHSLLYEYFTVYNELTKVKYVTEGMRKPAFLSGEQKKAIVDLLFKTNRKVTVKQLKEDYFKKIECFDSVEISGVEDRFNASLGTYHDLLKIIKDKDFLDNEENEDILEDIVLTLTLFEDREMIEERLKTYAHLFDDKVMKQLKRRRYTGWGRLSRKLINGIRDKQSGKTILDFLKSDGFANRNFMQLIHDDSLTFKEDIQKAQVSGQGDSLHEHIANLAGSPAIKKGILQTVKVVDELVKVMGRHKPENIVIEMARENQTTQKGQKNSRERMKRIEEGIKELGSQILKEHPVENTQLQNEKLYLYYLQNGRDMYVDQELDINRLSDYDVDHIVPQSFLKDDSIDNKVLTRSDKARGKSDNVPSEEVVKKMKNYWRQLLNAKLITQRKFDNLTKAERGGLSELDKAGFIKRQLVETRQITKHVAQILDSRMNTKYDENDKLIREVKVITLKSKLVSDFRKDFQFYKVREINNYHHAHDAYLNAVVGTALIKKYPKLESEFVYGDYKVYDVRKMIAKSEQEIGKATAKYFFYSNIMNFFKTEITLANGEIRKRPLIETNGETGEIVWDKGRDFATVRKVLSMPQVNIVKKTEVQTGGFSKESILPKRNSDKLIARKKDWDPKKYGGFDSPTVAYSVLVVAKVEKGKSKKLKSVKELLGITIMERSSFEKNPIDFLEAKGYKEVKKDLIIKLPKYSLFELENGRKRMLASAGELQKGNELALPSKYVNFLYLASHYEKLKGSPEDNEQKQLFVEQHKHYLDEIIEQISEFSKRVILADANLDKVLSAYNKHRDKPIREQAENIIHLFTLTNLGAPAAFKYFDTTIDRKRYTSTKEVLDATLIHQSITGLYETRIDLSQLGGDGGGSSEAAAKGGGGGMNPLQLLQPLPAEIKGTKLLAHWNSGATITCIPESFLEDEQPIKKTLIKTIHGEKQQNVYYVTFKVKGRKVEAEVIASPYEYILLSPTDVPWLTQQPLQLTILVPLQEYQEKILSKTALPEDQKQQLKTLFVKYDNLWQHWENQVGHRKIRPHNIATGDYPPRPQKQYPINPKAKPSIQIVIDDLLKQGVLTPQNSTMNTPVYPVPKPDGRWRMVLDYREVNKTIPLTAAQNQHSAGILATIVRQKYKTTLDLANGFWAHPITPESYWLTAFTWQGKQYCWTRLPQGFLNSPALFNADVVDLLKEIPNVQVYVDDIYLSHDDPKEHVQQLEKVFQILLQAGYVVSLKKSEIGQKTVEFLGFNITKEGRGLTDTFKTKLLNITPPKDLKQLQSILGKLNFARNFIPNFAELVQPLYNLIAPAKGKYIEWSEENTKQLNMVIEALNTASNLEERLPEQRLVIKVNTSPSAGYVRYYNETGKKPIMYLNYVFSKAELKFSMLEKLLTTMHKALIKAMDLAMGQEILVYSPIVSMTKIQKTPLPERKALPIRWITWMTYLEDPRIQFHYDKTLPELKHIPDVYTSSQSPVKHPSQYEGVFYTDGSAIKSPDPTKSNNAGMGIVHATYKPEYQVLNQWSIPLGNHTAQMAEIAAVEFACKKALKIPGPVLVITDSFYVAESANKELPYWKSNGFVNNKKKPLKHISKWKSIAECLSMKPDITIQHEKGISLQIPVFILKGNALADKLATQGSYVVNAGKRTADGSEFEKRTADGSEFESPKKKAKVE

SEQ ID NO: 1362 - protein, 2176 aa, synthetic construct
  source 1..2176: note = Description of Artificial Sequence: Synthetic polypeptide
MPAAKRVKLDGGDKKYSIGLDIGTNSVGWAVITDEYKVPSKKFKVLGNTDRHSIKKNLIGALLFDSGETAEATRLKRTARRRYTRRKNRICYLQEIFSNEMAKVDDSFFHRLEESFLVEEDKKHERHPIFGNIVDEVAYHEKYPTIYHLRKKLVDSTDKADLRLIYLALAHMIKFRGHFLIEGDLNPDNSDVDKLFIQLVQTYNQLFEENPINASGVDAKAILSARLSKSRRLENLIAQLPGEKKNGLFGNLIALSLGLTPNFKSNFDLAEDAKLQLSKDTYDDDLDNLLAQIGDQYADLFLAAKNLSDAILLSDILRVNTEITKAPLSASMIKRYDEHHQDLTLLKALVRQQLPEKYKEIFFDQSKNGYAGYIDGGASQEEFYKFIKPILEKMDGTEELLVKLNREDLLRKQRTFDNGSIPHQIHLGELHAILRRQEDFYPFLKDNREKIEKILTFRIPYYVGPLARGNSRFAWMTRKSEETITPWNFEEVVDKGASAQSFIERMTNFDKNLPNEKVLPKHSLLYEYFTVYNELTKVKYVTEGMRKPAFLSGEQKKAIVDLLFKTNRKVTVKQLKEDYFKKIECFDSVEISGVEDRFNASLGTYHDLLKIIKDKDFLDNEENEDILEDIVLTLTLFEDREMIEERLKTYAHLFDDKVMKQLKRRRYTGWGRLSRKLINGIRDKQSGKTILDFLKSDGFANRNFMQLIHDDSLTFKEDIQKAQVSGQGDSLHEHIANLAGSPAIKKGILQTVKVVDELVKVMGRHKPENIVIEMARENQTTQKGQKNSRERMKRIEEGIKELGSQILKEHPVENTQLQNEKLYLYYLQNGRDMYVDQELDINRLSDYDVDHIVPQSFLKDDSIDNKVLTRSDKARGKSDNVPSEEVVKKMKNYWRQLLNAKLITQRKFDNLTKAERGGLSELDKAGFIKRQLVETRQITKHVAQILDSRMNTKYDENDKLIREVKVITLKSKLVSDFRKDFQFYKVREINNYHHAHDAYLNAVVGTALIKKYPKLESEFVYGDYKVYDVRKMIAKSEQEIGKATAKYFFYSNIMNFFKTEITLANGEIRKRPLIETNGETGEIVWDKGRDFATVRKVLSMPQVNIVKKTEVQTGGFSKESILPKRNSDKLIARKKDWDPKKYGGFDSPTVAYSVLVVAKVEKGKSKKLKSVKELLGITIMERSSFEKNPIDFLEAKGYKEVKKDLIIKLPKYSLFELENGRKRMLASAGELQKGNELALPSKYVNFLYLASHYEKLKGSPEDNEQKQLFVEQHKHYLDEIIEQISEFSKRVILADANLDKVLSAYNKHRDKPIREQAENIIHLFTLTNLGAPAAFKYFDTTIDRKRYTSTKEVLDATLIHQSITGLYETRIDLSQLGGDGGEAAAKGGGGSSGGMNPLQLLQPLPAEIKGTKLLAHWNSGATITCIPESFLEDEQPIKKTLIKTIHGEKQQNVYYVTFKVKGRKVEAEVIASPYEYILLSPTDVPWLTQQPLQLTILVPLQEYQEKILSKTALPEDQKQQLKTLFVKYDNLWQHWENQVGHRKIRPHNIATGDYPPRPQKQYPINPKAKPSIQIVIDDLLKQGVLTPQNSTMNTPVYPVPKPDGRWRMVLDYREVNKTIPLTAAQNQHSAGILATIVRQKYKTTLDLANGFWAHPITPESYWLTAFTWQGKQYCWTRLPQGFLNSPALFNADVVDLLKEIPNVQVYVDDIYLSHDDPKEHVQQLEKVFQILLQAGYVVSLKKSEIGQKTVEFLGFNITKEGRGLTDTFKTKLLNITPPKDLKQLQSILGKLNFARNFIPNFAELVQPLYNLIAPAKGKYIEWSEENTKQLNMVIEALNTASNLEERLPEQRLVIKVNTSPSAGYVRYYNETGKKPIMYLNYVFSKAELKFSMLEKLLTTMHKALIKAMDLAMGQEILVYSPIVSMTKIQKTPLPERKALPIRWITWMTYLEDPRIQFHYDKTLPELKHIPDVYTSSQSPVKHPSQYEGVFYTDGSAIKSPDPTKSNNAGMGIVHATYKPEYQVLNQWSIPLGNHTAQMAEIAAVEFACKKALKIPGPVLVITDSFYVAESANKELPYWKSNGFVNNKKKPLKHISKWKSIAECLSMKPDITIQHEKGISLQIPVFILKGNALADKLATQGSYVVNAGKRTADGSEFEKRTADGSEFESPKKKAKVE

SEQ ID NO: 1363 - protein, 2172 aa, synthetic construct
  source 1..2172: note = Description of Artificial Sequence: Synthetic polypeptide
MPAAKRVKLDGGDKKYSIGLDIGTNSVGWAVITDEYKVPSKKFKVLGNTDRHSIKKNLIGALLFDSGETAEATRLKRTARRRYTRRKNRICYLQEIFSNEMAKVDDSFFHRLEESFLVEEDKKHERHPIFGNIVDEVAYHEKYPTIYHLRKKLVDSTDKADLRLIYLALAHMIKFRGHFLIEGDLNPDNSDVDKLFIQLVQTYNQLFEENPINASGVDAKAILSARLSKSRRLENLIAQLPGEKKNGLFGNLIALSLGLTPNFKSNFDLAEDAKLQLSKDTYDDDLDNLLAQIGDQYADLFLAAKNLSDAILLSDILRVNTEITKAPLSASMIKRYDEHHQDLTLLKALVRQQLPEKYKEIFFDQSKNGYAGYIDGGASQEEFYKFIKPILEKMDGTEELLVKLNREDLLRKQRTFDNGSIPHQIHLGELHAILRRQEDFYPFLKDNREKIEKILTFRIPYYVGPLARGNSRFAWMTRKSEETITPWNFEEVVDKGASAQSFIERMTNFDKNLPNEKVLPKHSLLYEYFTVYNELTKVKYVTEGMRKPAFLSGEQKKAIVDLLFKTNRKVTVKQLKEDYFKKIECFDSVEISGVEDRFNASLGTYHDLLKIIKDKDFLDNEENEDILEDIVLTLTLFEDREMIEERLKTYAHLFDDKVMKQLKRRRYTGWGRLSRKLINGIRDKQSGKTILDFLKSDGFANRNFMQLIHDDSLTFKEDIQKAQVSGQGDSLHEHIANLAGSPAIKKGILQTVKVVDELVKVMGRHKPENIVIEMARENQTTQKGQKNSRERMKRIEEGIKELGSQILKEHPVENTQLQNEKLYLYYLQNGRDMYVDQELDINRLSDYDVDHIVPQSFLKDDSIDNKVLTRSDKARGKSDNVPSEEVVKKMKNYWRQLLNAKLITQRKFDNLTKAERGGLSELDKAGFIKRQLVETRQITKHVAQILDSRMNTKYDENDKLIREVKVITLKSKLVSDFRKDFQFYKVREINNYHHAHDAYLNAVVGTALIKKYPKLESEFVYGDYKVYDVRKMIAKSEQEIGKATAKYFFYSNIMNFFKTEITLANGEIRKRPLIETNGETGEIVWDKGRDFATVRKVLSMPQVNIVKKTEVQTGGFSKESILPKRNSDKLIARKKDWDPKKYGGFDSPTVAYSVLVVAKVEKGKSKKLKSVKELLGITIMERSSFEKNPIDFLEAKGYKEVKKDLIIKLPKYSLFELENGRKRMLASAGELQKGNELALPSKYVNFLYLASHYEKLKGSPEDNEQKQLFVEQHKHYLDEIIEQISEFSKRVILADANLDKVLSAYNKHRDKPIREQAENIIHLFTLTNLGAPAAFKYFDTTIDRKRYTSTKEVLDATLIHQSITGLYETRIDLSQLGGDGGPAPAPAPGGMNPLQLLQPLPAEIKGTKLLAHWNSGATITCIPESFLEDEQPIKKTLIKTIHGEKQQNVYYVTFKVKGRKVEAEVIASPYEYILLSPTDVPWLTQQPLQLTILVPLQEYQEKILSKTALPEDQKQQLKTLFVKYDNLWQHWENQVGHRKIRPHNIATGDYPPRPQKQYPINPKAKPSIQIVIDDLLKQGVLTPQNSTMNTPVYPVPKPDGRWRMVLDYREVNKTIPLTAAQNQHSAGILATIVRQKYKTTLDLANGFWAHPITPESYWLTAFTWQGKQYCWTRLPQGFLNSPALFNADVVDLLKEIPNVQVYVDDIYLSHDDPKEHVQQLEKVFQILLQAGYVVSLKKSEIGQKTVEFLGFNITKEGRGLTDTFKTKLLNITPPKDLKQLQSILGKLNFARNFIPNFAELVQPLYNLIAPAKGKYIEWSEENTKQLNMVIEALNTASNLEERLPEQRLVIKVNTSPSAGYVRYYNETGKKPIMYLNYVFSKAELKFSMLEKLLTTMHKALIKAMDLAMGQEILVYSPIVSMTKIQKTPLPERKALPIRWITWMTYLEDPRIQFHYDKTLPELKHIPDVYTSSQSPVKHPSQYEGVFYTDGSAIKSPDPTKSNNAGMGIVHATYKPEYQVLNQWSIPLGNHTAQMAEIAAVEFACKKALKIPGPVLVITDSFYVAESANKELPYWKSNGFVNNKKKPLKHISKWKSIAECLSMKPDITIQHEKGISLQIPVFILKGNALADKLATQGSYVVNAGKRTADGSEFEKRTADGSEFESPKKKAKVE

SEQ ID NO: 1364 - protein, 2174 aa, synthetic construct
  source 1..2174: note = Description of Artificial Sequence: Synthetic polypeptide
MPAAKRVKLDGGDKKYSIGLDIGTNSVGWAVITDEYKVPSKKFKVLGNTDRHSIKKNLIGALLFDSGETAEATRLKRTARRRYTRRKNRICYLQEIFSNEMAKVDDSFFHRLEESFLVEEDKKHERHPIFGNIVDEVAYHEKYPTIYHLRKKLVDSTDKADLRLIYLALAHMIKFRGHFLIEGDLNPDNSDVDKLFIQLVQTYNQLFEENPINASGVDAKAILSARLSKSRRLENLIAQLPGEKKNGLFGNLIALSLGLTPNFKSNFDLAEDAKLQLSKDTYDDDLDNLLAQIGDQYADLFLAAKNLSDAILLSDILRVNTEITKAPLSASMIKRYDEHHQDLTLLKALVRQQLPEKYKEIFFDQSKNGYAGYIDGGASQEEFYKFIKPILEKMDGTEELLVKLNREDLLRKQRTFDNGSIPHQIHLGELHAILRRQEDFYPFLKDNREKIEKILTFRIPYYVGPLARGNSRFAWMTRKSEETITPWNFEEVVDKGASAQSFIERMTNFDKNLPNEKVLPKHSLLYEYFTVYNELTKVKYVTEGMRKPAFLSGEQKKAIVDLLFKTNRKVTVKQLKEDYFKKIECFDSVEISGVEDRFNASLGTYHDLLKIIKDKDFLDNEENEDILEDIVLTLTLFEDREMIEERLKTYAHLFDDKVMKQLKRRRYTGWGRLSRKLINGIRDKQSGKTILDFLKSDGFANRNFMQLIHDDSLTFKEDIQKAQVSGQGDSLHEHIANLAGSPAIKKGILQTVKVVDELVKVMGRHKPENIVIEMARENQTTQKGQKNSRERMKRIEEGIKELGSQILKEHPVENTQLQNEKLYLYYLQNGRDMYVDQELDINRLSDYDVDHIVPQSFLKDDSIDNKVLTRSDKARGKSDNVPSEEVVKKMKNYWRQLLNAKLITQRKFDNLTKAERGGLSELDKAGFIKRQLVETRQITKHVAQILDSRMNTKYDENDKLIREVKVITLKSKLVSDFRKDFQFYKVREINNYHHAHDAYLNAVVGTALIKKYPKLESEFVYGDYKVYDVRKMIAKSEQEIGKATAKYFFYSNIMNFFKTEITLANGEIRKRPLIETNGETGEIVWDKGRDFATVRKVLSMPQVNIVKKTEVQTGGFSKESILPKRNSDKLIARKKDWDPKKYGGFDSPTVAYSVLVVAKVEKGKSKKLKSVKELLGITIMERSSFEKNPIDFLEAKGYKEVKKDLIIKLPKYSLFELENGRKRMLASAGELQKGNELALPSKYVNFLYLASHYEKLKGSPEDNEQKQLFVEQHKHYLDEIIEQISEFSKRVILADANLDKVLSAYNKHRDKPIREQAENIIHLFTLTNLGAPAAFKYFDTTIDRKRYTSTKEVLDATLIHQSITGLYETRIDLSQLGGDGGPAPAPAPAPGGMNPLQLLQPLPAEIKGTKLLAHWNSGATITCIPESFLEDEQPIKKTLIKTIHGEKQQNVYYVTFKVKGRKVEAEVIASPYEYILLSPTDVPWLTQQPLQLTILVPLQEYQEKILSKTALPEDQKQQLKTLFVKYDNLWQHWENQVGHRKIRPHNIATGDYPPRPQKQYPINPKAKPSIQIVIDDLLKQGVLTPQNSTMNTPVYPVPKPDGRWRMVLDYREVNKTIPLTAAQNQHSAGILATIVRQKYKTTLDLANGFWAHPITPESYWLTAFTWQGKQYCWTRLPQGFLNSPALFNADVVDLLKEIPNVQVYVDDIYLSHDDPKEHVQQLEKVFQILLQAGYVVSLKKSEIGQKTVEFLGFNITKEGRGLTDTFKTKLLNITPPKDLKQLQSILGKLNFARNFIPNFAELVQPLYNLIAPAKGKYIEWSEENTKQLNMVIEALNTASNLEERLPEQRLVIKVNTSPSAGYVRYYNETGKKPIMYLNYVFSKAELKFSMLEKLLTTMHKALIKAMDLAMGQEILVYSPIVSMTKIQKTPLPERKALPIRWITWMTYLEDPRIQFHYDKTLPELKHIPDVYTSSQSPVKHPSQYEGVFYTDGSAIKSPDPTKSNNAGMGIVHATYKPEYQVLNQWSIPLGNHTAQMAEIAAVEFACKKALKIPGPVLVITDSFYVAESANKELPYWKSNGFVNNKKKPLKHISKWKSIAECLSMKPDITIQHEKGISLQIPVFILKGNALADKLATQGSYVVNAGKRTADGSEFEKRTADGSEFESPKKKAKVE

SEQ ID NO: 1365 - protein, 2094 aa, synthetic construct
  source 1..2094: note = Description of Artificial Sequence: Synthetic polypeptide
MPAAKRVKLDGGDKKYSIGLDIGTNSVGWAVITDEYKVPSKKFKVLGNTDRHSIKKNLIGALLFDSGETAEATRLKRTARRRYTRRKNRICYLQEIFSNEMAKVDDSFFHRLEESFLVEEDKKHERHPIFGNIVDEVAYHEKYPTIYHLRKKLVDSTDKADLRLIYLALAHMIKFRGHFLIEGDLNPDNSDVDKLFIQLVQTYNQLFEENPINASGVDAKAILSARLSKSRRLENLIAQLPGEKKNGLFGNLIALSLGLTPNFKSNFDLAEDAKLQLSKDTYDDDLDNLLAQIGDQYADLFLAAKNLSDAILLSDILRVNTEITKAPLSASMIKRYDEHHQDLTLLKALVRQQLPEKYKEIFFDQSKNGYAGYIDGGASQEEFYKFIKPILEKMDGTEELLVKLNREDLLRKQRTFDNGSIPHQIHLGELHAILRRQEDFYPFLKDNREKIEKILTFRIPYYVGPLARGNSRFAWMTRKSEETITPWNFEEVVDKGASAQSFIERMTNFDKNLPNEKVLPKHSLLYEYFTVYNELTKVKYVTEGMRKPAFLSGEQKKAIVDLLFKTNRKVTVKQLKEDYFKKIECFDSVEISGVEDRFNASLGTYHDLLKIIKDKDFLDNEENEDILEDIVLTLTLFEDREMIEERLKTYAHLFDDKVMKQLKRRRYTGWGRLSRKLINGIRDKQSGKTILDFLKSDGFANRNFMQLIHDDSLTFKEDIQKAQVSGQGDSLHEHIANLAGSPAIKKGILQTVKVVDELVKVMGRHKPENIVIEMARENQTTQKGQKNSRERMKRIEEGIKELGSQILKEHPVENTQLQNEKLYLYYLQNGRDMYVDQELDINRLSDYDVDHIVPQSFLKDDSIDNKVLTRSDKARGKSDNVPSEEVVKKMKNYWRQLLNAKLITQRKFDNLTKAERGGLSELDKAGFIKRQLVETRQITKHVAQILDSRMNTKYDENDKLIREVKVITLKSKLVSDFRKDFQFYKVREINNYHHAHDAYLNAVVGTALIKKYPKLESEFVYGDYKVYDVRKMIAKSEQEIGKATAKYFFYSNIMNFFKTEITLANGEIRKRPLIETNGETGEIVWDKGRDFATVRKVLSMPQVNIVKKTEVQTGGFSKESILPKRNSDKLIARKKDWDPKKYGGFDSPTVAYSVLVVAKVEKGKSKKLKSVKELLGITIMERSSFEKNPIDFLEAKGYKEVKKDLIIKLPKYSLFELENGRKRMLASAGELQKGNELALPSKYVNFLYLASHYEKLKGSPEDNEQKQLFVEQHKHYLDEIIEQISEFSKRVILADANLDKVLSAYNKHRDKPIREQAENIIHLFTLTNLGAPAAFKYFDTTIDRKRYTSTKEVLDATLIHQSITGLYETRIDLSQLGGDGGEAAAKGGSPAPGGVLNLEEEYRLHEKPVPSSIDPSWLQLFPTVWAERAGMGLANQVPPVVVELRSGASPVAVRQYPMSKEAREGIRPHIQKFLDLGVLVPCRSPWNTPLLPVKKPGTNDYRPVQDLREINKRVQDIHPTVPNPYNLLSSLPPSYTWYSVLDLKDAFFCLRLHPNSQPLFAFEWKDPEKGNTGQLTWTRLPQGFKNSPTLFDEALHRDLAPFRALNPQVVLLQYVDDLLVAAPTYEDCKKGTQKLLQELSKLGYRVSAKKAQLCQREVTYLGYLLKEGKRWLTPARKATVMKIPVPTTPRQVREFLGTAGFCRLWIPGFASLAAPLYPLTKESIPFIWTEEHQQAFDHIKKALLSAPALALPDLTKPFTLYIDERAGVARGVLTQTLGPWRRPVAYLSKKLDPVASGWPTCLKAVAAVALLLKDADKLTLGQNVTVIASHSLESIVRQPPDRWMTNARMTHYQSLLLNERVSFAPPAVLNPATLLPVESEATPVHRCSEILAEETGTRRDLEDQPLPGVPTWYTDGSSFITEGKRRAGAPIVDGKRTVWASSLPEGTSAQKAELVALTQALRLAEGKNINIYTDSRYAFATAHIHGAIYKQRGLLTSAGKDIKNKEEILALLEAIHLPRRVAIIHCPGHQRGSNPVATGNRRADEAAKQAALSTRVLAGTTKPAGKRTADGSEFEKRTADGSEFESPKKKAKVE

SEQ ID NO: 1366 - protein, 2101 aa, synthetic construct
  source 1..2101: note = Description of Artificial Sequence: Synthetic polypeptide
MPAAKRVKLDGGDKKYSIGLDIGTNSVGWAVITDEYKVPSKKFKVLGNTDRHSIKKNLIGALLFDSGETAEATRLKRTARRRYTRRKNRICYLQEIFSNEMAKVDDSFFHRLEESFLVEEDKKHERHPIFGNIVDEVAYHEKYPTIYHLRKKLVDSTDKADLRLIYLALAHMIKFRGHFLIEGDLNPDNSDVDKLFIQLVQTYNQLFEENPINASGVDAKAILSARLSKSRRLENLIAQLPGEKKNGLFGNLIALSLGLTPNFKSNFDLAEDAKLQLSKDTYDDDLDNLLAQIGDQYADLFLAAKNLSDAILLSDILRVNTEITKAPLSASMIKRYDEHHQDLTLLKALVRQQLPEKYKEIFFDQSKNGYAGYIDGGASQEEFYKFIKPILEKMDGTEELLVKLNREDLLRKQRTFDNGSIPHQIHLGELHAILRRQEDFYPFLKDNREKIEKILTFRIPYYVGPLARGNSRFAWMTRKSEETITPWNFEEVVDKGASAQSFIERMTNFDKNLPNEKVLPKHSLLYEYFTVYNELTKVKYVTEGMRKPAFLSGEQKKAIVDLLFKTNRKVTVKQLKEDYFKKIECFDSVEISGVEDRFNASLGTYHDLLKIIKDKDFLDNEENEDILEDIVLTLTLFEDREMIEERLKTYAHLFDDKVMKQLKRRRYTGWGRLSRKLINGIRDKQSGKTILDFLKSDGFANRNFMQLIHDDSLTFKEDIQKAQVSGQGDSLHEHIANLAGSPAIKKGILQTVKVVDELVKVMGRHKPENIVIEMARENQTTQKGQKNSRERMKRIEEGIKELGSQILKEHPVENTQLQNEKLYLYYLQNGRDMYVDQELDINRLSDYDVDHIVPQSFLKDDSIDNKVLTRSDKARGKSDNVPSEEVVKKMKNYWRQLLNAKLITQRKFDNLTKAERGGLSELDKAGFIKRQLVETRQITKHVAQILDSRMNTKYDENDKLIREVKVITLKSKLVSDFRKDFQFYKVREINNYHHAHDAYLNAVVGTALIKKYPKLESEFVYGDYKVYDVRKMIAKSEQEIGKATAKYFFYSNIMNFFKTEITLANGEIRKRPLIETNGETGEIVWDKGRDFATVRKVLSMPQVNIVKKTEVQTGGFSKESILPKRNSDKLIARKKDWDPKKYGGFDSPTVAYSVLVVAKVEKGKSKKLKSVKELLGITIMERSSFEKNPIDFLEAKGYKEVKKDLIIKLPKYSLFELENGRKRMLASAGELQKGNELALPSKYVNFLYLASHYEKLKGSPEDNEQKQLFVEQHKHYLDEIIEQISEFSKRVILADANLDKVLSAYNKHRDKPIREQAENIIHLFTLTNLGAPAAFKYFDTTIDRKRYTSTKEVLDATLIHQSITGLYETRIDLSQLGGDGGGSSGSSGSSGSSGSSGSSGGVLNLEEEYRLHEKPVPSSIDPSWLQLFPTVWAERAGMGLANQVPPVVVELRSGASPVAVRQYPMSKEAREGIRPHIQKFLDLGVLVPCRSPWNTPLLPVKKPGTNDYRPVQDLREINKRVQDIHPTVPNPYNLLSSLPPSYTWYSVLDLKDAFFCLRLHPNSQPLFAFEWKDPEKGNTGQLTWTRLPQGFKNSPTLFDEALHRDLAPFRALNPQVVLLQYVDDLLVAAPTYEDCKKGTQKLLQELSKLGYRVSAKKAQLCQREVTYLGYLLKEGKRWLTPARKATVMKIPVPTTPRQVREFLGTAGFCRLWIPGFASLAAPLYPLTKESIPFIWTEEHQQAFDHIKKALLSAPALALPDLTKPFTLYIDERAGVARGVLTQTLGPWRRPVAYLSKKLDPVASGWPTCLKAVAAVALLLKDADKLTLGQNVTVIASHSLESIVRQPPDRWMTNARMTHYQSLLLNERVSFAPPAVLNPATLLPVESEATPVHRCSEILAEETGTRRDLEDQPLPGVPTWYTDGSSFITEGKRRAGAPIVDGKRTVWASSLPEGTSAQKAELVALTQALRLAEGKNINIYTDSRYAFATAHIHGAIYKQRGLLTSAGKDIKNKEEILALLEAIHLPRRVAIIHCPGHQRGSNPVATGNRRADEAAKQAALSTRVLAGTTKPAGKRTADGSEFEKRTADGSEFESPKKKAKVE

SEQ ID NO: 1367 - protein, 2103 aa, synthetic construct
  source 1..2103: note = Description of Artificial Sequence: Synthetic polypeptide
MPAAKRVKLDGGDKKYSIGLDIGTNSVGWAVITDEYKVPSKKFKVLGNTDRHSIKKNLIGALLFDSGETAEATRLKRTARRRYTRRKNRICYLQEIFSNEMAKVDDSFFHRLEESFLVEEDKKHERHPIFGNIVDEVAYHEKYPTIYHLRKKLVDSTDKADLRLIYLALAHMIKFRGHFLIEGDLNPDNSDVDKLFIQLVQTYNQLFEENPINASGVDAKAILSARLSKSRRLENLIAQLPGEKKNGLFGNLIALSLGLTPNFKSNFDLAEDAKLQLSKDTYDDDLDNLLAQIGDQYADLFLAAKNLSDAILLSDILRVNTEITKAPLSASMIKRYDEHHQDLTLLKALVRQQLPEKYKEIFFDQSKNGYAGYIDGGASQEEFYKFIKPILEKMDGTEELLVKLNREDLLRKQRTFDNGSIPHQIHLGELHAILRRQEDFYPFLKDNREKIEKILTFRIPYYVGPLARGNSRFAWMTRKSEETITPWNFEEVVDKGASAQSFIERMTNFDKNLPNEKVLPKHSLLYEYFTVYNELTKVKYVTEGMRKPAFLSGEQKKAIVDLLFKTNRKVTVKQLKEDYFKKIECFDSVEISGVEDRFNASLGTYHDLLKIIKDKDFLDNEENEDILEDIVLTLTLFEDREMIEERLKTYAHLFDDKVMKQLKRRRYTGWGRLSRKLINGIRDKQSGKTILDFLKSDGFANRNFMQLIHDDSLTFKEDIQKAQVSGQGDSLHEHIANLAGSPAIKKGILQTVKVVDELVKVMGRHKPENIVIEMARENQTTQKGQKNSRERMKRIEEGIKELGSQILKEHPVENTQLQNEKLYLYYLQNGRDMYVDQELDINRLSDYDVDHIVPQSFLKDDSIDNKVLTRSDKARGKSDNVPSEEVVKKMKNYWRQLLNAKLITQRKFDNLTKAERGGLSELDKAGFIKRQLVETRQITKHVAQILDSRMNTKYDENDKLIREVKVITLKSKLVSDFRKDFQFYKVREINNYHHAHDAYLNAVVGTALIKKYPKLESEFVYGDYKVYDVRKMIAKSEQEIGKATAKYFFYSNIMNFFKTEITLANGEIRKRPLIETNGETGEIVWDKGRDFATVRKVLSMPQVNIVKKTEVQTGGFSKESILPKRNSDKLIARKKDWDPKKYGGFDSPTVAYSVLVVAKVEKGKSKKLKSVKELLGITIMERSSFEKNPIDFLEAKGYKEVKKDLIIKLPKYSLFELENGRKRMLASAGELQKGNELALPSKYVNFLYLASHYEKLKGSPEDNEQKQLFVEQHKHYLDEIIEQISEFSKRVILADANLDKVLSAYNKHRDKPIREQAENIIHLFTLTNLGAPAAFKYFDTTIDRKRYTSTKEVLDATLIHQSITGLYETRIDLSQLGGDGGEAAAKEAAAKEAAAKEAAAKGGVLNLEEEYRLHEKPVPSSIDPSWLQLFPTVWAERAGMGLANQVPPVVVELRSGASPVAVRQYPMSKEAREGIRPHIQKFLDLGVLVPCRSPWNTPLLPVKKPGTNDYRPVQDLREINKRVQDIHPTVPNPYNLLSSLPPSYTWYSVLDLKDAFFCLRLHPNSQPLFAFEWKDPEKGNTGQLTWTRLPQGFKNSPTLFDEALHRDLAPFRALNPQVVLLQYVDDLLVAAPTYEDCKKGTQKLLQELSKLGYRVSAKKAQLCQREVTYLGYLLKEGKRWLTPARKATVMKIPVPTTPRQVREFLGTAGFCRLWIPGFASLAAPLYPLTKESIPFIWTEEHQQAFDHIKKALLSAPALALPDLTKPFTLYIDERAGVARGVLTQTLGPWRRPVAYLSKKLDPVASGWPTCLKAVAAVALLLKDADKLTLGQNVTVIASHSLESIVRQPPDRWMTNARMTHYQSLLLNERVSFAPPAVLNPATLLPVESEATPVHRCSEILAEETGTRRDLEDQPLPGVPTWYTDGSSFITEGKRRAGAPIVDGKRTVWASSLPEGTSAQKAELVALTQALRLAEGKNINIYTDSRYAFATAHIHGAIYKQRGLLTSAGKDIKNKEEILALLEAIHLPRRVAIIHCPGHQRGSNPVATGNRRADEAAKQAALSTRVLAGTTKPAGKRTADGSEFEKRTADGSEFESPKKKAKVE

SEQ ID NO: 1368 - protein, 2098 aa, synthetic construct
  source 1..2098: note = Description of Artificial Sequence: Synthetic polypeptide
MPAAKRVKLDGGDKKYSIGLDIGTNSVGWAVITDEYKVPSKKFKVLGNTDRHSIKKNLIGALLFDSGETAEATRLKRTARRRYTRRKNRICYLQEIFSNEMAKVDDSFFHRLEESFLVEEDKKHERHPIFGNIVDEVAYHEKYPTIYHLRKKLVDSTDKADLRLIYLALAHMIKFRGHFLIEGDLNPDNSDVDKLFIQLVQTYNQLFEENPINASGVDAKAILSARLSKSRRLENLIAQLPGEKKNGLFGNLIALSLGLTPNFKSNFDLAEDAKLQLSKDTYDDDLDNLLAQIGDQYADLFLAAKNLSDAILLSDILRVNTEITKAPLSASMIKRYDEHHQDLTLLKALVRQQLPEKYKEIFFDQSKNGYAGYIDGGASQEEFYKFIKPILEKMDGTEELLVKLNREDLLRKQRTFDNGSIPHQIHLGELHAILRRQEDFYPFLKDNREKIEKILTFRIPYYVGPLARGNSRFAWMTRKSEETITPWNFEEVVDKGASAQSFIERMTNFDKNLPNEKVLPKHSLLYEYFTVYNELTKVKYVTEGMRKPAFLSGEQKKAIVDLLFKTNRKVTVKQLKEDYFKKIECFDSVEISGVEDRFNASLGTYHDLLKIIKDKDFLDNEENEDILEDIVLTLTLFEDREMIEERLKTYAHLFDDKVMKQLKRRRYTGWGRLSRKLINGIRDKQSGKTILDFLKSDGFANRNFMQLIHDDSLTFKEDIQKAQVSGQGDSLHEHIANLAGSPAIKKGILQTVKVVDELVKVMGRHKPENIVIEMARENQTTQKGQKNSRERMKRIEEGIKELGSQILKEHPVENTQLQNEKLYLYYLQNGRDMYVDQELDINRLSDYDVDHIVPQSFLKDDSIDNKVLTRSDKARGKSDNVPSEEVVKKMKNYWRQLLNAKLITQRKFDNLTKAERGGLSELDKAGFIKRQLVETRQITKHVAQILDSRMNTKYDENDKLIREVKVITLKSKLVSDFRKDFQFYKVREINNYHHAHDAYLNAVVGTALIKKYPKLESEFVYGDYKVYDVRKMIAKSEQEIGKATAKYFFYSNIMNFFKTEITLANGEIRKRPLIETNGETGEIVWDKGRDFATVRKVLSMPQVNIVKKTEVQTGGFSKESILPKRNSDKLIARKKDWDPKKYGGFDSPTVAYSVLVVAKVEKGKSKKLKSVKELLGITIMERSSFEKNPIDFLEAKGYKEVKKDLIIKLPKYSLFELENGRKRMLASAGELQKGNELALPSKYVNFLYLASHYEKLKGSPEDNEQKQLFVEQHKHYLDEIIEQISEFSKRVILADANLDKVLSAYNKHRDKPIREQAENIIHLFTLTNLGAPAAFKYFDTTIDRKRYTSTKEVLDATLIHQSITGLYETRIDLSQLGGDGGGSSGSSGSSGSSGSSGGVLNLEEEYRLHEKPVPSSIDPSWLQLFPTVWAERAGMGLANQVPPVVVELRSGASPVAVRQYPMSKEAREGIRPHIQKFLDLGVLVPCRSPWNTPLLPVKKPGTNDYRPVQDLREINKRVQDIHPTVPNPYNLLSSLPPSYTWYSVLDLKDAFFCLRLHPNSQPLFAFEWKDPEKGNTGQLTWTRLPQGFKNSPTLFDEALHRDLAPFRALNPQVVLLQYVDDLLVAAPTYEDCKKGTQKLLQELSKLGYRVSAKKAQLCQREVTYLGYLLKEGKRWLTPARKATVMKIPVPTTPRQVREFLGTAGFCRLWIPGFASLAAPLYPLTKESIPFIWTEEHQQAFDHIKKALLSAPALALPDLTKPFTLYIDERAGVARGVLTQTLGPWRRPVAYLSKKLDPVASGWPTCLKAVAAVALLLKDADKLTLGQNVTVIASHSLESIVRQPPDRWMTNARMTHYQSLLLNERVSFAPPAVLNPATLLPVESEATPVHRCSEILAEETGTRRDLEDQPLPGVPTWYTDGSSFITEGKRRAGAPIVDGKRTVWASSLPEGTSAQKAELVALTQALRLAEGKNINIYTDSRYAFATAHIHGAIYKQRGLLTSAGKDIKNKEEILALLEAIHLPRRVAIIHCPGHQRGSNPVATGNRRADEAAKQAALSTRVLAGTTKPAGKRTADGSEFEKRTADGSEFESPKKKAKVE

SEQ ID NO: 1369 - protein, 2094 aa, synthetic construct
  source 1..2094: note = Description of Artificial Sequence: Synthetic polypeptide
MPAAKRVKLDGGDKKYSIGLDIGTNSVGWAVITDEYKVPSKKFKVLGNTDRHSIKKNLIGALLFDSGETAEATRLKRTARRRYTRRKNRICYLQEIFSNEMAKVDDSFFHRLEESFLVEEDKKHERHPIFGNIVDEVAYHEKYPTIYHLRKKLVDSTDKADLRLIYLALAHMIKFRGHFLIEGDLNPDNSDVDKLFIQLVQTYNQLFEENPINASGVDAKAILSARLSKSRRLENLIAQLPGEKKNGLFGNLIALSLGLTPNFKSNFDLAEDAKLQLSKDTYDDDLDNLLAQIGDQYADLFLAAKNLSDAILLSDILRVNTEITKAPLSASMIKRYDEHHQDLTLLKALVRQQLPEKYKEIFFDQSKNGYAGYIDGGASQEEFYKFIKPILEKMDGTEELLVKLNREDLLRKQRTFDNGSIPHQIHLGELHAILRRQEDFYPFLKDNREKIEKILTFRIPYYVGPLARGNSRFAWMTRKSEETITPWNFEEVVDKGASAQSFIERMTNFDKNLPNEKVLPKHSLLYEYFTVYNELTKVKYVTEGMRKPAFLSGEQKKAIVDLLFKTNRKVTVKQLKEDYFKKIECFDSVEISGVEDRFNASLGTYHDLLKIIKDKDFLDNEENEDILEDIVLTLTLFEDREMIEERLKTYAHLFDDKVMKQLKRRRYTGWGRLSRKLINGIRDKQSGKTILDFLKSDGFANRNFMQLIHDDSLTFKEDIQKAQVSGQGDSLHEHIANLAGSPAIKKGILQTVKVVDELVKVMGRHKPENIVIEMARENQTTQKGQKNSRERMKRIEEGIKELGSQILKEHPVENTQLQNEKLYLYYLQNGRDMYVDQELDINRLSDYDVDHIVPQSFLKDDSIDNKVLTRSDKARGKSDNVPSEEVVKKMKNYWRQLLNAKLITQRKFDNLTKAERGGLSELDKAGFIKRQLVETRQITKHVAQILDSRMNTKYDENDKLIREVKVITLKSKLVSDFRKDFQFYKVREINNYHHAHDAYLNAVVGTALIKKYPKLESEFVYGDYKVYDVRKMIAKSEQEIGKATAKYFFYSNIMNFFKTEITLANGEIRKRPLIETNGETGEIVWDKGRDFATVRKVLSMPQVNIVKKTEVQTGGFSKESILPKRNSDKLIARKKDWDPKKYGGFDSPTVAYSVLVVAKVEKGKSKKLKSVKELLGITIMERSSFEKNPIDFLEAKGYKEVKKDLIIKLPKYSLFELENGRKRMLASAGELQKGNELALPSKYVNFLYLASHYEKLKGSPEDNEQKQLFVEQHKHYLDEIIEQISEFSKRVILADANLDKVLSAYNKHRDKPIREQAENIIHLFTLTNLGAPAAFKYFDTTIDRKRYTSTKEVLDATLIHQSITGLYETRIDLSQLGGDGGEAAAKGSSGGSGGVLNLEEEYRLHEKPVPSSIDPSWLQLFPTVWAERAGMGLANQVPPVVVELRSGASPVAVRQYPMSKEAREGIRPHIQKFLDLGVLVPCRSPWNTPLLPVKKPGTNDYRPVQDLREINKRVQDIHPTVPNPYNLLSSLPPSYTWYSVLDLKDAFFCLRLHPNSQPLFAFEWKDPEKGNTGQLTWTRLPQGFKNSPTLFDEALHRDLAPFRALNPQVVLLQYVDDLLVAAPTYEDCKKGTQKLLQELSKLGYRVSAKKAQLCQREVTYLGYLLKEGKRWLTPARKATVMKIPVPTTPRQVREFLGTAGFCRLWIPGFASLAAPLYPLTKESIPFIWTEEHQQAFDHIKKALLSAPALALPDLTKPFTLYIDERAGVARGVLTQTLGPWRRPVAYLSKKLDPVASGWPTCLKAVAAVALLLKDADKLTLGQNVTVIASHSLESIVRQPPDRWMTNARMTHYQSLLLNERVSFAPPAVLNPATLLPVESEATPVHRCSEILAEETGTRRDLEDQPLPGVPTWYTDGSSFITEGKRRAGAPIVDGKRTVWASSLPEGTSAQKAELVALTQALRLAEGKNINIYTDSRYAFATAHIHGAIYKQRGLLTSAGKDIKNKEEILALLEAIHLPRRVAIIHCPGHQRGSNPVATGNRRADEAAKQAALSTRVLAGTTKPAGKRTADGSEFEKRTADGSEFESPKKKAKVE

SEQ ID NO: 1370 - protein, 2129 aa, synthetic construct
  source 1..2129: note = Description of Artificial Sequence: Synthetic polypeptide
MPAAKRVKLDGGDKKYSIGLDIGTNSVGWAVITDEYKVPSKKFKVLGNTDRHSIKKNLIGALLFDSGETAEATRLKRTARRRYTRRKNRICYLQEIFSNEMAKVDDSFFHRLEESFLVEEDKKHERHPIFGNIVDEVAYHEKYPTIYHLRKKLVDSTDKADLRLIYLALAHMIKFRGHFLIEGDLNPDNSDVDKLFIQLVQTYNQLFEENPINASGVDAKAILSARLSKSRRLENLIAQLPGEKKNGLFGNLIALSLGLTPNFKSNFDLAEDAKLQLSKDTYDDDLDNLLAQIGDQYADLFLAAKNLSDAILLSDILRVNTEITKAPLSASMIKRYDEHHQDLTLLKALVRQQLPEKYKEIFFDQSKNGYAGYIDGGASQEEFYKFIKPILEKMDGTEELLVKLNREDLLRKQRTFDNGSIPHQIHLGELHAILRRQEDFYPFLKDNREKIEKILTFRIPYYVGPLARGNSRFAWMTRKSEETITPWNFEEVVDKGASAQSFIERMTNFDKNLPNEKVLPKHSLLYEYFTVYNELTKVKYVTEGMRKPAFLSGEQKKAIVDLLFKTNRKVTVKQLKEDYFKKIECFDSVEISGVEDRFNASLGTYHDLLKIIKDKDFLDNEENEDILEDIVLTLTLFEDREMIEERLKTYAHLFDDKVMKQLKRRRYTGWGRLSRKLINGIRDKQSGKTILDFLKSDGFANRNFMQLIHDDSLTFKEDIQKAQVSGQGDSLHEHIANLAGSPAIKKGILQTVKVVDELVKVMGRHKPENIVIEMARENQTTQKGQKNSRERMKRIEEGIKELGSQILKEHPVENTQLQNEKLYLYYLQNGRDMYVDQELDINRLSDYDVDHIVPQSFLKDDSIDNKVLTRSDKARGKSDNVPSEEVVKKMKNYWRQLLNAKLITQRKFDNLTKAERGGLSELDKAGFIKRQLVETRQITKHVAQILDSRMNTKYDENDKLIREVKVITLKSKLVSDFRKDFQFYKVREINNYHHAHDAYLNAVVGTALIKKYPKLESEFVYGDYKVYDVRKMIAKSEQEIGKATAKYFFYSNIMNFFKTEITLANGEIRKRPLIETNGETGEIVWDKGRDFATVRKVLSMPQVNIVKKTEVQTGGFSKESILPKRNSDKLIARKKDWDPKKYGGFDSPTVAYSVLVVAKVEKGKSKKLKSVKELLGITIMERSSFEKNPIDFLEAKGYKEVKKDLIIKLPKYSLFELENGRKRMLASAGELQKGNELALPSKYVNFLYLASHYEKLKGSPEDNEQKQLFVEQHKHYLDEIIEQISEFSKRVILADANLDKVLSAYNKHRDKPIREQAENIIHLFTLTNLGAPAAFKYFDTTIDRKRYTSTKEVLDATLIHQSITGLYETRIDLSQLGGDGGAEAAAKEAAAKEAAAKEAAAKALEAEAAAKEAAAKEAAAKEAAAKAGGVLNLEEEYRLHEKPVPSSIDPSWLQLFPTVWAERAGMGLANQVPPVVVELRSGASPVAVRQYPMSKEAREGIRPHIQKFLDLGVLVPCRSPWNTPLLPVKKPGTNDYRPVQDLREINKRVQDIHPTVPNPYNLLSSLPPSYTWYSVLDLKDAFFCLRLHPNSQPLFAFEWKDPEKGNTGQLTWTRLPQGFKNSPTLFNEALHRDLAPFRALNPQVVLLQYVDDLLVAAPTYEDCKKGTQKLLQELSKLGYRVSAKKAQLCQREVTYLGYLLKEGKRWLTPARKATVMKIPVPTTPRQVREFLGTAGFCRLWIPGFASLAAPLYPLTKPSIPFIWTEEHQQAFDHIKKALLSAPALALPDLTKPFTLYIDERAGVARGVLTQTLGPWRRPVAYLSKKLDPVASGWPTCLKAVAAVALLLKDADKLTLGQNVTVIASHSLESIVRQPPDRWMTNARMTHYQSLLLNERVSFAPPAVLNPATLLPVESEATPVHRCSEILAEETGTRRDLEDQPLPGVPTWYTDGSSFITEGKRRAGAPIVDGKRTVWASSLPEGTSAQKAELVALTQALRLAEGKNINIYTDSRYAFATAHIHGAIYKQRGWLTSAGKDIKNKEEILALLEAIHLPRRVAIIHCPGHQRGSNPVATGNRRADEAAKQAALSTRVLAGTTKPAGKRTADGSEFEKRTADGSEFESPKKKAKVE

SEQ ID NO: 1371 - protein, 2098 aa, synthetic construct
  source 1..2098: note = Description of Artificial Sequence: Synthetic polypeptide
MPAAKRVKLDGGDKKYSIGLDIGTNSVGWAVITDEYKVPSKKFKVLGNTDRHSIKKNLIGALLFDSGETAEATRLKRTARRRYTRRKNRICYLQEIFSNEMAKVDDSFFHRLEESFLVEEDKKHERHPIFGNIVDEVAYHEKYPTIYHLRKKLVDSTDKADLRLIYLALAHMIKFRGHFLIEGDLNPDNSDVDKLFIQLVQTYNQLFEENPINASGVDAKAILSARLSKSRRLENLIAQLPGEKKNGLFGNLIALSLGLTPNFKSNFDLAEDAKLQLSKDTYDDDLDNLLAQIGDQYADLFLAAKNLSDAILLSDILRVNTEITKAPLSASMIKRYDEHHQDLTLLKALVRQQLPEKYKEIFFDQSKNGYAGYIDGGASQEEFYKFIKPILEKMDGTEELLVKLNREDLLRKQRTFDNGSIPHQIHLGELHAILRRQEDFYPFLKDNREKIEKILTFRIPYYVGPLARGNSRFAWMTRKSEETITPWNFEEVVDKGASAQSFIERMTNFDKNLPNEKVLPKHSLLYEYFTVYNELTKVKYVTEGMRKPAFLSGEQKKAIVDLLFKTNRKVTVKQLKEDYFKKIECFDSVEISGVEDRFNASLGTYHDLLKIIKDKDFLDNEENEDILEDIVLTLTLFEDREMIEERLKTYAHLFDDKVMKQLKRRRYTGWGRLSRKLINGIRDKQSGKTILDFLKSDGFANRNFMQLIHDDSLTFKEDIQKAQVSGQGDSLHEHIANLAGSPAIKKGILQTVKVVDELVKVMGRHKPENIVIEMARENQTTQKGQKNSRERMKRIEEGIKELGSQILKEHPVENTQLQNEKLYLYYLQNGRDMYVDQELDINRLSDYDVDHIVPQSFLKDDSIDNKVLTRSDKARGKSDNVPSEEVVKKMKNYWRQLLNAKLITQRKFDNLTKAERGGLSELDKAGFIKRQLVETRQITKHVAQILDSRMNTKYDENDKLIREVKVITLKSKLVSDFRKDFQFYKVREINNYHHAHDAYLNAVVGTALIKKYPKLESEFVYGDYKVYDVRKMIAKSEQEIGKATAKYFFYSNIMNFFKTEITLANGEIRKRPLIETNGETGEIVWDKGRDFATVRKVLSMPQVNIVKKTEVQTGGFSKESILPKRNSDKLIARKKDWDPKKYGGFDSPTVAYSVLVVAKVEKGKSKKLKSVKELLGITIMERSSFEKNPIDFLEAKGYKEVKKDLIIKLPKYSLFELENGRKRMLASAGELQKGNELALPSKYVNFLYLASHYEKLKGSPEDNEQKQLFVEQHKHYLDEIIEQISEFSKRVILADANLDKVLSAYNKHRDKPIREQAENIIHLFTLTNLGAPAAFKYFDTTIDRKRYTSTKEVLDATLIHQSITGLYETRIDLSQLGGDGGPAPGGSEAAAKGGTAPLEEEYRLFLEAPIQNVTLLEQWKREIPKVWAEINPPGLASTQAPIHVQLLSTALPVRVRQYPITLEAKRSLRETIRKFRAAGILRPVHSPWNTPLLPVRKSGTSEYRMVQDLREVNKRVETIHPTVPNPYTLLSLLPPDRIWYSVLDLKDAFFCIPLAPESQLIFAFEWADAEEGESGQLTWTRLPQGFKNSPTLFNEALNRDLQGFRLDHPSVSLLQYVDDLLIAADTQAACLSATRDLLMTLAELGYRVSGKKAQLCQEEVTYLGFKIHKGSRSLSNSRTQAILQIPVPKTKRQVREFLGKIGYCRLFIPGFAELAQPLYAATRPGNDPLVWGEKEEEAFQSLKLALTQPPALALPSLDKPFQLFVEETSGAAKGVLTQALGPWKRPVAYLSKRLDPVAAGWPRCLRAIAAAALLTREASKLTFGQDIEITSSHNLESLLRSPPDKWLTNARITQYQVLLLDPPRVRFKQTAALNPATLLPETDDTLPIHHCLDTLDSLTSTRPDLTDQPLAQAEATLFTDGSSYIRDGKRYAGAAVVTLDSVIWAEPLPIGTSAQKAELIALTKALEWSKDKSVNIYTDSRYAFATLHVHGMIYRERGWLTAGGKAIKNAPEILALLTAVWLPKRVAVMHCKGHQKDDAPTSTGNRRADEVAREVAIRPLSTQATISAGKRTADGSEFEKRTADGSEFESPKKKAKVE

SEQ ID NO: 1372 - protein, 2133 aa, synthetic construct
  source 1..2133: note = Description of Artificial Sequence: Synthetic polypeptide
MPAAKRVKLDGGDKKYSIGLDIGTNSVGWAVITDEYKVPSKKFKVLGNTDRHSIKKNLIGALLFDSGETAEATRLKRTARRRYTRRKNRICYLQEIFSNEMAKVDDSFFHRLEESFLVEEDKKHERHPIFGNIVDEVAYHEKYPTIYHLRKKLVDSTDKADLRLIYLALAHMIKFRGHFLIEGDLNPDNSDVDKLFIQLVQTYNQLFEENPINASGVDAKAILSARLSKSRRLENLIAQLPGEKKNGLFGNLIALSLGLTPNFKSNFDLAEDAKLQLSKDTYDDDLDNLLAQIGDQYADLFLAAKNLSDAILLSDILRVNTEITKAPLSASMIKRYDEHHQDLTLLKALVRQQLPEKYKEIFFDQSKNGYAGYIDGGASQEEFYKFIKPILEKMDGTEELLVKLNREDLLRKQRTFDNGSIPHQIHLGELHAILRRQEDFYPFLKDNREKIEKILTFRIPYYVGPLARGNSRFAWMTRKSEETITPWNFEEVVDKGASAQSFIERMTNFDKNLPNEKVLPKHSLLYEYFTVYNELTKVKYVTEGMRKPAFLSGEQKKAIVDLLFKTNRKVTVKQLKEDYFKKIECFDSVEISGVEDRFNASLGTYHDLLKIIKDKDFLDNEENEDILEDIVLTLTLFEDREMIEERLKTYAHLFDDKVMKQLKRRRYTGWGRLSRKLINGIRDKQSGKTILDFLKSDGFANRNFMQLIHDDSLTFKEDIQKAQVSGQGDSLHEHIANLAGSPAIKKGILQTVKVVDELVKVMGRHKPENIVIEMARENQTTQKGQKNSRERMKRIEEGIKELGSQILKEHPVENTQLQNEKLYLYYLQNGRDMYVDQELDINRLSDYDVDHIVPQSFLKDDSIDNKVLTRSDKARGKSDNVPSEEVVKKMKNYWRQLLNAKLITQRKFDNLTKAERGGLSELDKAGFIKRQLVETRQITKHVAQILDSRMNTKYDENDKLIREVKVITLKSKLVSDFRKDFQFYKVREINNYHHAHDAYLNAVVGTALIKKYPKLESEFVYGDYKVYDVRKMIAKSEQEIGKATAKYFFYSNIMNFFKTEITLANGEIRKRPLIETNGETGEIVWDKGRDFATVRKVLSMPQVNIVKKTEVQTGGFSKESILPKRNSDKLIARKKDWDPKKYGGFDSPTVAYSVLVVAKVEKGKSKKLKSVKELLGITIMERSSFEKNPIDFLEAKGYKEVKKDLIIKLPKYSLFELENGRKRMLASAGELQKGNELALPSKYVNFLYLASHYEKLKGSPEDNEQKQLFVEQHKHYLDEIIEQISEFSKRVILADANLDKVLSAYNKHRDKPIREQAENIIHLFTLTNLGAPAAFKYFDTTIDRKRYTSTKEVLDATLIHQSITGLYETRIDLSQLGGDGGAEAAAKEAAAKEAAAKEAAAKALEAEAAAKEAAAKEAAAKEAAAKAGGTAPLEEEYRLFLEAPIQNVTLLEQWKREIPKVWAEINPPGLASTQAPIHVQLLSTALPVRVRQYPITLEAKRSLRETIRKFRAAGILRPVHSPWNTPLLPVRKSGTSEYRMVQDLREVNKRVETIHPTVPNPYTLLSLLPPDRIWYSVLDLKDAFFCIPLAPESQLIFAFEWADAEEGESGQLTWTRLPQGFKNSPTLFNEALNRDLQGFRLDHPSVSLLQYVDDLLIAADTQAACLSATRDLLMTLAELGYRVSGKKAQLCQEEVTYLGFKIHKGSRSLSNSRTQAILQIPVPKTKRQVREFLGKIGYCRLFIPGFAELAQPLYAATRPGNDPLVWGEKEEEAFQSLKLALTQPPALALPSLDKPFQLFVEETSGAAKGVLTQALGPWKRPVAYLSKRLDPVAAGWPRCLRAIAAAALLTREASKLTFGQDIEITSSHNLESLLRSPPDKWLTNARITQYQVLLLDPPRVRFKQTAALNPATLLPETDDTLPIHHCLDTLDSLTSTRPDLTDQPLAQAEATLFTDGSSYIRDGKRYAGAAVVTLDSVIWAEPLPIGTSAQKAELIALTKALEWSKDKSVNIYTDSRYAFATLHVHGMIYRERGWLTAGGKAIKNAPEILALLTAVWLPKRVAVMHCKGHQKDDAPTSTGNRRADEVAREVAIRPLSTQATISAGKRTADGSEFEKRTADGSEFESPKKKAKVE

SEQ ID NO: 1373 - protein, 2117 aa, synthetic construct
  source 1..2117: note = Description of Artificial Sequence: Synthetic polypeptide
MPAAKRVKLDGGDKKYSIGLDIGTNSVGWAVITDEYKVPSKKFKVLGNTDRHSIKKNLIGALLFDSGETAEATRLKRTARRRYTRRKNRICYLQEIFSNEMAKVDDSFFHRLEESFLVEEDKKHERHPIFGNIVDEVAYHEKYPTIYHLRKKLVDSTDKADLRLIYLALAHMIKFRGHFLIEGDLNPDNSDVDKLFIQLVQTYNQLFEENPINASGVDAKAILSARLSKSRRLENLIAQLPGEKKNGLFGNLIALSLGLTPNFKSNFDLAEDAKLQLSKDTYDDDLDNLLAQIGDQYADLFLAAKNLSDAILLSDILRVNTEITKAPLSASMIKRYDEHHQDLTLLKALVRQQLPEKYKEIFFDQSKNGYAGYIDGGASQEEFYKFIKPILEKMDGTEELLVKLNREDLLRKQRTFDNGSIPHQIHLGELHAILRRQEDFYPFLKDNREKIEKILTFRIPYYVGPLARGNSRFAWMTRKSEETITPWNFEEVVDKGASAQSFIERMTNFDKNLPNEKVLPKHSLLYEYFTVYNELTKVKYVTEGMRKPAFLSGEQKKAIVDLLFKTNRKVTVKQLKEDYFKKIECFDSVEISGVEDRFNASLGTYHDLLKIIKDKDFLDNEENEDILEDIVLTLTLFEDREMIEERLKTYAHLFDDKVMKQLKRRRYTGWGRLSRKLINGIRDKQSGKTILDFLKSDGFANRNFMQLIHDDSLTFKEDIQKAQVSGQGDSLHEHIANLAGSPAIKKGILQTVKVVDELVKVMGRHKPENIVIEMARENQTTQKGQKNSRERMKRIEEGIKELGSQILKEHPVENTQLQNEKLYLYYLQNGRDMYVDQELDINRLSDYDVDHIVPQSFLKDDSIDNKVLTRSDKARGKSDNVPSEEVVKKMKNYWRQLLNAKLITQRKFDNLTKAERGGLSELDKAGFIKRQLVETRQITKHVAQILDSRMNTKYDENDKLIREVKVITLKSKLVSDFRKDFQFYKVREINNYHHAHDAYLNAVVGTALIKKYPKLESEFVYGDYKVYDVRKMIAKSEQEIGKATAKYFFYSNIMNFFKTEITLANGEIRKRPLIETNGETGEIVWDKGRDFATVRKVLSMPQVNIVKKTEVQTGGFSKESILPKRNSDKLIARKKDWDPKKYGGFDSPTVAYSVLVVAKVEKGKSKKLKSVKELLGITIMERSSFEKNPIDFLEAKGYKEVKKDLIIKLPKYSLFELENGRKRMLASAGELQKGNELALPSKYVNFLYLASHYEKLKGSPEDNEQKQLFVEQHKHYLDEIIEQISEFSKRVILADANLDKVLSAYNKHRDKPIREQAENIIHLFTLTNLGAPAAFKYFDTTIDRKRYTSTKEVLDATLIHQSITGLYETRIDLSQLGGDGGGGGGSGGGGSGGGGSGGGGSGGGGSGGGGSGGTAPLEEEYRLFLEAPIQNVTLLEQWKREIPKVWAEINPPGLASTQAPIHVQLLSTALPVRVRQYPITLEAKRSLRETIRKFRAAGILRPVHSPWNTPLLPVRKSGTSEYRMVQDLREVNKRVETIHPTVPNPYTLLSLLPPDRIWYSVLDLKDAFFCIPLAPESQLIFAFEWADAEEGESGQLTWTRLPQGFKNSPTLFNEALNRDLQGFRLDHPSVSLLQYVDDLLIAADTQAACLSATRDLLMTLAELGYRVSGKKAQLCQEEVTYLGFKIHKGSRSLSNSRTQAILQIPVPKTKRQVREFLGKIGYCRLFIPGFAELAQPLYAATRPGNDPLVWGEKEEEAFQSLKLALTQPPALALPSLDKPFQLFVEETSGAAKGVLTQALGPWKRPVAYLSKRLDPVAAGWPRCLRAIAAAALLTREASKLTFGQDIEITSSHNLESLLRSPPDKWLTNARITQYQVLLLDPPRVRFKQTAALNPATLLPETDDTLPIHHCLDTLDSLTSTRPDLTDQPLAQAEATLFTDGSSYIRDGKRYAGAAVVTLDSVIWAEPLPIGTSAQKAELIALTKALEWSKDKSVNIYTDSRYAFATLHVHGMIYRERGWLTAGGKAIKNAPEILALLTAVWLPKRVAVMHCKGHQKDDAPTSTGNRRADEVAREVAIRPLSTQATISAGKRTADGSEFEKRTADGSEFESPKKKAKVE

SEQ ID NO: 1374 - protein, 2107 aa, synthetic construct
  source 1..2107: note = Description of Artificial Sequence: Synthetic polypeptide
MPAAKRVKLDGGDKKYSIGLDIGTNSVGWAVITDEYKVPSKKFKVLGNTDRHSIKKNLIGALLFDSGETAEATRLKRTARRRYTRRKNRICYLQEIFSNEMAKVDDSFFHRLEESFLVEEDKKHERHPIFGNIVDEVAYHEKYPTIYHLRKKLVDSTDKADLRLIYLALAHMIKFRGHFLIEGDLNPDNSDVDKLFIQLVQTYNQLFEENPINASGVDAKAILSARLSKSRRLENLIAQLPGEKKNGLFGNLIALSLGLTPNFKSNFDLAEDAKLQLSKDTYDDDLDNLLAQIGDQYADLFLAAKNLSDAILLSDILRVNTEITKAPLSASMIKRYDEHHQDLTLLKALVRQQLPEKYKEIFFDQSKNGYAGYIDGGASQEEFYKFIKPILEKMDGTEELLVKLNREDLLRKQRTFDNGSIPHQIHLGELHAILRRQEDFYPFLKDNREKIEKILTFRIPYYVGPLARGNSRFAWMTRKSEETITPWNFEEVVDKGASAQSFIERMTNFDKNLPNEKVLPKHSLLYEYFTVYNELTKVKYVTEGMRKPAFLSGEQKKAIVDLLFKTNRKVTVKQLKEDYFKKIECFDSVEISGVEDRFNASLGTYHDLLKIIKDKDFLDNEENEDILEDIVLTLTLFEDREMIEERLKTYAHLFDDKVMKQLKRRRYTGWGRLSRKLINGIRDKQSGKTILDFLKSDGFANRNFMQLIHDDSLTFKEDIQKAQVSGQGDSLHEHIANLAGSPAIKKGILQTVKVVDELVKVMGRHKPENIVIEMARENQTTQKGQKNSRERMKRIEEGIKELGSQILKEHPVENTQLQNEKLYLYYLQNGRDMYVDQELDINRLSDYDVDHIVPQSFLKDDSIDNKVLTRSDKARGKSDNVPSEEVVKKMKNYWRQLLNAKLITQRKFDNLTKAERGGLSELDKAGFIKRQLVETRQITKHVAQILDSRMNTKYDENDKLIREVKVITLKSKLVSDFRKDFQFYKVREINNYHHAHDAYLNAVVGTALIKKYPKLESEFVYGDYKVYDVRKMIAKSEQEIGKATAKYFFYSNIMNFFKTEITLANGEIRKRPLIETNGETGEIVWDKGRDFATVRKVLSMPQVNIVKKTEVQTGGFSKESILPKRNSDKLIARKKDWDPKKYGGFDSPTVAYSVLVVAKVEKGKSKKLKSVKELLGITIMERSSFEKNPIDFLEAKGYKEVKKDLIIKLPKYSLFELENGRKRMLASAGELQKGNELALPSKYVNFLYLASHYEKLKGSPEDNEQKQLFVEQHKHYLDEIIEQISEFSKRVILADANLDKVLSAYNKHRDKPIREQAENIIHLFTLTNLGAPAAFKYFDTTIDRKRYTSTKEVLDATLIHQSITGLYETRIDLSQLGGDGGGGGGSGGGGSGGGGSGGGGSGGTAPLEEEYRLFLEAPIQNVTLLEQWKREIPKVWAEINPPGLASTQAPIHVQLLSTALPVRVRQYPITLEAKRSLRETIRKFRAAGILRPVHSPWNTPLLPVRKSGTSEYRMVQDLREVNKRVETIHPTVPNPYTLLSLLPPDRIWYSVLDLKDAFFCIPLAPESQLIFAFEWADAEEGESGQLTWTRLPQGFKNSPTLFNEALNRDLQGFRLDHPSVSLLQYVDDLLIAADTQAACLSATRDLLMTLAELGYRVSGKKAQLCQEEVTYLGFKIHKGSRSLSNSRTQAILQIPVPKTKRQVREFLGKIGYCRLFIPGFAELAQPLYAATRPGNDPLVWGEKEEEAFQSLKLALTQPPALALPSLDKPFQLFVEETSGAAKGVLTQALGPWKRPVAYLSKRLDPVAAGWPRCLRAIAAAALLTREASKLTFGQDIEITSSHNLESLLRSPPDKWLTNARITQYQVLLLDPPRVRFKQTAALNPATLLPETDDTLPIHHCLDTLDSLTSTRPDLTDQPLAQAEATLFTDGSSYIRDGKRYAGAAVVTLDSVIWAEPLPIGTSAQKAELIALTKALEWSKDKSVNIYTDSRYAFATLHVHGMIYRERGWLTAGGKAIKNAPEILALLTAVWLPKRVAVMHCKGHQKDDAPTSTGNRRADEVAREVAIRPLSTQATISAGKRTADGSEFEKRTADGSEFESPKKKAKVE

SEQ ID NO: 1375 - protein, 2093 aa, synthetic construct
  source 1..2093: note = Description of Artificial Sequence: Synthetic polypeptide
MPAAKRVKLDGGDKKYSIGLDIGTNSVGWAVITDEYKVPSKKFKVLGNTDRHSIKKNLIGALLFDSGETAEATRLKRTARRRYTRRKNRICYLQEIFSNEMAKVDDSFFHRLEESFLVEEDKKHERHPIFGNIVDEVAYHEKYPTIYHLRKKLVDSTDKADLRLIYLALAHMIKFRGHFLIEGDLNPDNSDVDKLFIQLVQTYNQLFEENPINASGVDAKAILSARLSKSRRLENLIAQLPGEKKNGLFGNLIALSLGLTPNFKSNFDLAEDAKLQLSKDTYDDDLDNLLAQIGDQYADLFLAAKNLSDAILLSDILRVNTEITKAPLSASMIKRYDEHHQDLTLLKALVRQQLPEKYKEIFFDQSKNGYAGYIDGGASQEEFYKFIKPILEKMDGTEELLVKLNREDLLRKQRTFDNGSIPHQIHLGELHAILRRQEDFYPFLKDNREKIEKILTFRIPYYVGPLARGNSRFAWMTRKSEETITPWNFEEVVDKGASAQSFIERMTNFDKNLPNEKVLPKHSLLYEYFTVYNELTKVKYVTEGMRKPAFLSGEQKKAIVDLLFKTNRKVTVKQLKEDYFKKIECFDSVEISGVEDRFNASLGTYHDLLKIIKDKDFLDNEENEDILEDIVLTLTLFEDREMIEERLKTYAHLFDDKVMKQLKRRRYTGWGRLSRKLINGIRDKQSGKTILDFLKSDGFANRNFMQLIHDDSLTFKEDIQKAQVSGQGDSLHEHIANLAGSPAIKKGILQTVKVVDELVKVMGRHKPENIVIEMARENQTTQKGQKNSRERMKRIEEGIKELGSQILKEHPVENTQLQNEKLYLYYLQNGRDMYVDQELDINRLSDYDVDHIVPQSFLKDDSIDNKVLTRSDKARGKSDNVPSEEVVKKMKNYWRQLLNAKLITQRKFDNLTKAERGGLSELDKAGFIKRQLVETRQITKHVAQILDSRMNTKYDENDKLIREVKVITLKSKLVSDFRKDFQFYKVREINNYHHAHDAYLNAVVGTALIKKYPKLESEFVYGDYKVYDVRKMIAKSEQEIGKATAKYFFYSNIMNFFKTEITLANGEIRKRPLIETNGETGEIVWDKGRDFATVRKVLSMPQVNIVKKTEVQTGGFSKESILPKRNSDKLIARKKDWDPKKYGGFDSPTVAYSVLVVAKVEKGKSKKLKSVKELLGITIMERSSFEKNPIDFLEAKGYKEVKKDLIIKLPKYSLFELENGRKRMLASAGELQKGNELALPSKYVNFLYLASHYEKLKGSPEDNEQKQLFVEQHKHYLDEIIEQISEFSKRVILADANLDKVLSAYNKHRDKPIREQAENIIHLFTLTNLGAPAAFKYFDTTIDRKRYTSTKEVLDATLIHQSITGLYETRIDLSQLGGDGGGSSPAPGGTAPLEEEYRLFLEAPIQNVTLLEQWKREIPKVWAEINPPGLASTQAPIHVQLLSTALPVRVRQYPITLEAKRSLRETIRKFRAAGILRPVHSPWNTPLLPVRKSGTSEYRMVQDLREVNKRVETIHPTVPNPYTLLSLLPPDRIWYSVLDLKDAFFCIPLAPESQLIFAFEWADAEEGESGQLTWTRLPQGFKNSPTLFNEALNRDLQGFRLDHPSVSLLQYVDDLLIAADTQAACLSATRDLLMTLAELGYRVSGKKAQLCQEEVTYLGFKIHKGSRSLSNSRTQAILQIPVPKTKRQVREFLGKIGYCRLFIPGFAELAQPLYAATRPGNDPLVWGEKEEEAFQSLKLALTQPPALALPSLDKPFQLFVEETSGAAKGVLTQALGPWKRPVAYLSKRLDPVAAGWPRCLRAIAAAALLTREASKLTFGQDIEITSSHNLESLLRSPPDKWLTNARITQYQVLLLDPPRVRFKQTAALNPATLLPETDDTLPIHHCLDTLDSLTSTRPDLTDQPLAQAEATLFTDGSSYIRDGKRYAGAAVVTLDSVIWAEPLPIGTSAQKAELIALTKALEWSKDKSVNIYTDSRYAFATLHVHGMIYRERGWLTAGGKAIKNAPEILALLTAVWLPKRVAVMHCKGHQKDDAPTSTGNRRADEVAREVAIRPLSTQATISAGKRTADGSEFEKRTADGSEFESPKKKAKVE

SEQ ID NO: 1376 - protein, 2103 aa, synthetic construct
  source 1..2103: note = Description of Artificial Sequence: Synthetic polypeptide
MPAAKRVKLDGGDKKYSIGLDIGTNSVGWAVITDEYKVPSKKFKVLGNTDRHSIKKNLIGALLFDSGETAEATRLKRTARRRYTRRKNRICYLQEIFSNEMAKVDDSFFHRLEESFLVEEDKKHERHPIFGNIVDEVAYHEKYPTIYHLRKKLVDSTDKADLRLIYLALAHMIKFRGHFLIEGDLNPDNSDVDKLFIQLVQTYNQLFEENPINASGVDAKAILSARLSKSRRLENLIAQLPGEKKNGLFGNLIALSLGLTPNFKSNFDLAEDAKLQLSKDTYDDDLDNLLAQIGDQYADLFLAAKNLSDAILLSDILRVNTEITKAPLSASMIKRYDEHHQDLTLLKALVRQQLPEKYKEIFFDQSKNGYAGYIDGGASQEEFYKFIKPILEKMDGTEELLVKLNREDLLRKQRTFDNGSIPHQIHLGELHAILRRQEDFYPFLKDNREKIEKILTFRIPYYVGPLARGNSRFAWMTRKSEETITPWNFEEVVDKGASAQSFIERMTNFDKNLPNEKVLPKHSLLYEYFTVYNELTKVKYVTEGMRKPAFLSGEQKKAIVDLLFKTNRKVTVKQLKEDYFKKIECFDSVEISGVEDRFNASLGTYHDLLKIIKDKDFLDNEENEDILEDIVLTLTLFEDREMIEERLKTYAHLFDDKVMKQLKRRRYTGWGRLSRKLINGIRDKQSGKTILDFLKSDGFANRNFMQLIHDDSLTFKEDIQKAQVSGQGDSLHEHIANLAGSPAIKKGILQTVKVVDELVKVMGRHKPENIVIEMARENQTTQKGQKNSRERMKRIEEGIKELGSQILKEHPVENTQLQNEKLYLYYLQNGRDMYVDQELDINRLSDYDVDHIVPQSFLKDDSIDNKVLTRSDKARGKSDNVPSEEVVKKMKNYWRQLLNAKLITQRKFDNLTKAERGGLSELDKAGFIKRQLVETRQITKHVAQILDSRMNTKYDENDKLIREVKVITLKSKLVSDFRKDFQFYKVREINNYHHAHDAYLNAVVGTALIKKYPKLESEFVYGDYKVYDVRKMIAKSEQEIGKATAKYFFYSNIMNFFKTEITLANGEIRKRPLIETNGETGEIVWDKGRDFATVRKVLSMPQVNIVKKTEVQTGGFSKESILPKRNSDKLIARKKDWDPKKYGGFDSPTVAYSVLVVAKVEKGKSKKLKSVKELLGITIMERSSFEKNPIDFLEAKGYKEVKKDLIIKLPKYSLFELENGRKRMLASAGELQKGNELALPSKYVNFLYLASHYEKLKGSPEDNEQKQLFVEQHKHYLDEIIEQISEFSKRVILADANLDKVLSAYNKHRDKPIREQAENIIHLFTLTNLGAPAAFKYFDTTIDRKRYTSTKEVLDATLIHQSITGLYETRIDLSQLGGDGGSGSETPGTSESATPESGGTAPLEEEYRLFLEAPIQNVTLLEQWKREIPKVWAEINPPGLASTQAPIHVQLLSTALPVRVRQYPITLEAKRSLRETIRKFRAAGILRPVHSPWNTPLLPVRKSGTSEYRMVQDLREVNKRVETIHPTVPNPYTLLSLLPPDRIWYSVLDLKDAFFCIPLAPESQLIFAFEWADAEEGESGQLTWTRLPQGFKNSPTLFNEALNRDLQGFRLDHPSVSLLQYVDDLLIAADTQAACLSATRDLLMTLAELGYRVSGKKAQLCQEEVTYLGFKIHKGSRSLSNSRTQAILQIPVPKTKRQVREFLGKIGYCRLFIPGFAELAQPLYAATRPGNDPLVWGEKEEEAFQSLKLALTQPPALALPSLDKPFQLFVEETSGAAKGVLTQALGPWKRPVAYLSKRLDPVAAGWPRCLRAIAAAALLTREASKLTFGQDIEITSSHNLESLLRSPPDKWLTNARITQYQVLLLDPPRVRFKQTAALNPATLLPETDDTLPIHHCLDTLDSLTSTRPDLTDQPLAQAEATLFTDGSSYIRDGKRYAGAAVVTLDSVIWAEPLPIGTSAQKAELIALTKALEWSKDKSVNIYTDSRYAFATLHVHGMIYRERGWLTAGGKAIKNAPEILALLTAVWLPKRVAVMHCKGHQKDDAPTSTGNRRADEVAREVAIRPLSTQATISAGKRTADGSEFEKRTADGSEFESPKKKAKVE

SEQ ID NO: 1377 - protein, 2098 aa, synthetic construct
  source 1..2098: note = Description of Artificial Sequence: Synthetic polypeptide
MPAAKRVKLDGGDKKYSIGLDIGTNSVGWAVITDEYKVPSKKFKVLGNTDRHSIKKNLIGALLFDSGETAEATRLKRTARRRYTRRKNRICYLQEIFSNEMAKVDDSFFHRLEESFLVEEDKKHERHPIFGNIVDEVAYHEKYPTIYHLRKKLVDSTDKADLRLIYLALAHMIKFRGHFLIEGDLNPDNSDVDKLFIQLVQTYNQLFEENPINASGVDAKAILSARLSKSRRLENLIAQLPGEKKNGLFGNLIALSLGLTPNFKSNFDLAEDAKLQLSKDTYDDDLDNLLAQIGDQYADLFLAAKNLSDAILLSDILRVNTEITKAPLSASMIKRYDEHHQDLTLLKALVRQQLPEKYKEIFFDQSKNGYAGYIDGGASQEEFYKFIKPILEKMDGTEELLVKLNREDLLRKQRTFDNGSIPHQIHLGELHAILRRQEDFYPFLKDNREKIEKILTFRIPYYVGPLARGNSRFAWMTRKSEETITPWNFEEVVDKGASAQSFIERMTNFDKNLPNEKVLPKHSLLYEYFTVYNELTKVKYVTEGMRKPAFLSGEQKKAIVDLLFKTNRKVTVKQLKEDYFKKIECFDSVEISGVEDRFNASLGTYHDLLKIIKDKDFLDNEENEDILEDIVLTLTLFEDREMIEERLKTYAHLFDDKVMKQLKRRRYTGWGRLSRKLINGIRDKQSGKTILDFLKSDGFANRNFMQLIHDDSLTFKEDIQKAQVSGQGDSLHEHIANLAGSPAIKKGILQTVKVVDELVKVMGRHKPENIVIEMARENQTTQKGQKNSRERMKRIEEGIKELGSQILKEHPVENTQLQNEKLYLYYLQNGRDMYVDQELDINRLSDYDVDHIVPQSFLKDDSIDNKVLTRSDKARGKSDNVPSEEVVKKMKNYWRQLLNAKLITQRKFDNLTKAERGGLSELDKAGFIKRQLVETRQITKHVAQILDSRMNTKYDENDKLIREVKVITLKSKLVSDFRKDFQFYKVREINNYHHAHDAYLNAVVGTALIKKYPKLESEFVYGDYKVYDVRKMIAKSEQEIGKATAKYFFYSNIMNFFKTEITLANGEIRKRPLIETNGETGEIVWDKGRDFATVRKVLSMPQVNIVKKTEVQTGGFSKESILPKRNSDKLIARKKDWDPKKYGGFDSPTVAYSVLVVAKVEKGKSKKLKSVKELLGITIMERSSFEKNPIDFLEAKGYKEVKKDLIIKLPKYSLFELENGRKRMLASAGELQKGNELALPSKYVNFLYLASHYEKLKGSPEDNEQKQLFVEQHKHYLDEIIEQISEFSKRVILADANLDKVLSAYNKHRDKPIREQAENIIHLFTLTNLGAPAAFKYFDTTIDRKRYTSTKEVLDATLIHQSITGLYETRIDLSQLGGDGGPAPEAAAKGGSGGTAPLEEEYRLFLEAPIQNVTLLEQWKREIPKVWAEINPPGLASTQAPIHVQLLSTALPVRVRQYPITLEAKRSLRETIRKFRAAGILRPVHSPWNTPLLPVRKSGTSEYRMVQDLREVNKRVETIHPTVPNPYTLLSLLPPDRIWYSVLDLKDAFFCIPLAPESQLIFAFEWADAEEGESGQLTWTRLPQGFKNSPTLFNEALNRDLQGFRLDHPSVSLLQYVDDLLIAADTQAACLSATRDLLMTLAELGYRVSGKKAQLCQEEVTYLGFKIHKGSRSLSNSRTQAILQIPVPKTKRQVREFLGKIGYCRLFIPGFAELAQPLYAATRPGNDPLVWGEKEEEAFQSLKLALTQPPALALPSLDKPFQLFVEETSGAAKGVLTQALGPWKRPVAYLSKRLDPVAAGWPRCLRAIAAAALLTREASKLTFGQDIEITSSHNLESLLRSPPDKWLTNARITQYQVLLLDPPRVRFKQTAALNPATLLPETDDTLPIHHCLDTLDSLTSTRPDLTDQPLAQAEATLFTDGSSYIRDGKRYAGAAVVTLDSVIWAEPLPIGTSAQKAELIALTKALEWSKDKSVNIYTDSRYAFATLHVHGMIYRERGWLTAGGKAIKNAPEILALLTAVWLPKRVAVMHCKGHQKDDAPTSTGNRRADEVAREVAIRPLSTQATISAGKRTADGSEFEKRTADGSEFESPKKKAKVE

SEQ ID NO: 1378 - protein, 2092 aa, synthetic construct
  source 1..2092: note = Description of Artificial Sequence: Synthetic polypeptide
MPAAKRVKLDGGDKKYSIGLDIGTNSVGWAVITDEYKVPSKKFKVLGNTDRHSIKKNLIGALLFDSGETAEATRLKRTARRRYTRRKNRICYLQEIFSNEMAKVDDSFFHRLEESFLVEEDKKHERHPIFGNIVDEVAYHEKYPTIYHLRKKLVDSTDKADLRLIYLALAHMIKFRGHFLIEGDLNPDNSDVDKLFIQLVQTYNQLFEENPINASGVDAKAILSARLSKSRRLENLIAQLPGEKKNGLFGNLIALSLGLTPNFKSNFDLAEDAKLQLSKDTYDDDLDNLLAQIGDQYADLFLAAKNLSDAILLSDILRVNTEITKAPLSASMIKRYDEHHQDLTLLKALVRQQLPEKYKEIFFDQSKNGYAGYIDGGASQEEFYKFIKPILEKMDGTEELLVKLNREDLLRKQRTFDNGSIPHQIHLGELHAILRRQEDFYPFLKDNREKIEKILTFRIPYYVGPLARGNSRFAWMTRKSEETITPWNFEEVVDKGASAQSFIERMTNFDKNLPNEKVLPKHSLLYEYFTVYNELTKVKYVTEGMRKPAFLSGEQKKAIVDLLFKTNRKVTVKQLKEDYFKKIECFDSVEISGVEDRFNASLGTYHDLLKIIKDKDFLDNEENEDILEDIVLTLTLFEDREMIEERLKTYAHLFDDKVMKQLKRRRYTGWGRLSRKLINGIRDKQSGKTILDFLKSDGFANRNFMQLIHDDSLTFKEDIQKAQVSGQGDSLHEHIANLAGSPAIKKGILQTVKVVDELVKVMGRHKPENIVIEMARENQTTQKGQKNSRERMKRIEEGIKELGSQILKEHPVENTQLQNEKLYLYYLQNGRDMYVDQELDINRLSDYDVDHIVPQSFLKDDSIDNKVLTRSDKARGKSDNVPSEEVVKKMKNYWRQLLNAKLITQRKFDNLTKAERGGLSELDKAGFIKRQLVETRQITKHVAQILDSRMNTKYDENDKLIREVKVITLKSKLVSDFRKDFQFYKVREINNYHHAHDAYLNAVVGTALIKKYPKLESEFVYGDYKVYDVRKMIAKSEQEIGKATAKYFFYSNIMNFFKTEITLANGEIRKRPLIETNGETGEIVWDKGRDFATVRKVLSMPQVNIVKKTEVQTGGFSKESILPKRNSDKLIARKKDWDPKKYGGFDSPTVAYSVLVVAKVEKGKSKKLKSVKELLGITIMERSSFEKNPIDFLEAKGYKEVKKDLIIKLPKYSLFELENGRKRMLASAGELQKGNELALPSKYVNFLYLASHYEKLKGSPEDNEQKQLFVEQHKHYLDEIIEQISEFSKRVILADANLDKVLSAYNKHRDKPIREQAENIIHLFTLTNLGAPAAFKYFDTTIDRKRYTSTKEVLDATLIHQSITGLYETRIDLSQLGGDGGPAPAPGGTAPLEEEYRLFLEAPIQNVTLLEQWKREIPKVWAEINPPGLASTQAPIHVQLLSTALPVRVRQYPITLEAKRSLRETIRKFRAAGILRPVHSPWNTPLLPVRKSGTSEYRMVQDLREVNKRVETIHPTVPNPYTLLSLLPPDRIWYSVLDLKDAFFCIPLAPESQLIFAFEWADAEEGESGQLTWTRLPQGFKNSPTLFNEALNRDLQGFRLDHPSVSLLQYVDDLLIAADTQAACLSATRDLLMTLAELGYRVSGKKAQLCQEEVTYLGFKIHKGSRSLSNSRTQAILQIPVPKTKRQVREFLGKIGYCRLFIPGFAELAQPLYAATRPGNDPLVWGEKEEEAFQSLKLALTQPPALALPSLDKPFQLFVEETSGAAKGVLTQALGPWKRPVAYLSKRLDPVAAGWPRCLRAIAAAALLTREASKLTFGQDIEITSSHNLESLLRSPPDKWLTNARITQYQVLLLDPPRVRFKQTAALNPATLLPETDDTLPIHHCLDTLDSLTSTRPDLTDQPLAQAEATLFTDGSSYIRDGKRYAGAAVVTLDSVIWAEPLPIGTSAQKAELIALTKALEWSKDKSVNIYTDSRYAFATLHVHGMIYRERGWLTAGGKAIKNAPEILALLTAVWLPKRVAVMHCKGHQKDDAPTSTGNRRADEVAREVAIRPLSTQATISAGKRTADGSEFEKRTADGSEFESPKKKAKVE

SEQ ID NO: 1379 - protein, 2098 aa, synthetic construct
  source 1..2098: note = Description of Artificial Sequence: Synthetic polypeptide
MPAAKRVKLDGGDKKYSIGLDIGTNSVGWAVITDEYKVPSKKFKVLGNTDRHSIKKNLIGALLFDSGETAEATRLKRTARRRYTRRKNRICYLQEIFSNEMAKVDDSFFHRLEESFLVEEDKKHERHPIFGNIVDEVAYHEKYPTIYHLRKKLVDSTDKADLRLIYLALAHMIKFRGHFLIEGDLNPDNSDVDKLFIQLVQTYNQLFEENPINASGVDAKAILSARLSKSRRLENLIAQLPGEKKNGLFGNLIALSLGLTPNFKSNFDLAEDAKLQLSKDTYDDDLDNLLAQIGDQYADLFLAAKNLSDAILLSDILRVNTEITKAPLSASMIKRYDEHHQDLTLLKALVRQQLPEKYKEIFFDQSKNGYAGYIDGGASQEEFYKFIKPILEKMDGTEELLVKLNREDLLRKQRTFDNGSIPHQIHLGELHAILRRQEDFYPFLKDNREKIEKILTFRIPYYVGPLARGNSRFAWMTRKSEETITPWNFEEVVDKGASAQSFIERMTNFDKNLPNEKVLPKHSLLYEYFTVYNELTKVKYVTEGMRKPAFLSGEQKKAIVDLLFKTNRKVTVKQLKEDYFKKIECFDSVEISGVEDRFNASLGTYHDLLKIIKDKDFLDNEENEDILEDIVLTLTLFEDREMIEERLKTYAHLFDDKVMKQLKRRRYTGWGRLSRKLINGIRDKQSGKTILDFLKSDGFANRNFMQLIHDDSLTFKEDIQKAQVSGQGDSLHEHIANLAGSPAIKKGILQTVKVVDELVKVMGRHKPENIVIEMARENQTTQKGQKNSRERMKRIEEGIKELGSQILKEHPVENTQLQNEKLYLYYLQNGRDMYVDQELDINRLSDYDVDHIVPQSFLKDDSIDNKVLTRSDKARGKSDNVPSEEVVKKMKNYWRQLLNAKLITQRKFDNLTKAERGGLSELDKAGFIKRQLVETRQITKHVAQILDSRMNTKYDENDKLIREVKVITLKSKLVSDFRKDFQFYKVREINNYHHAHDAYLNAVVGTALIKKYPKLESEFVYGDYKVYDVRKMIAKSEQEIGKATAKYFFYSNIMNFFKTEITLANGEIRKRPLIETNGETGEIVWDKGRDFATVRKVLSMPQVNIVKKTEVQTGGFSKESILPKRNSDKLIARKKDWDPKKYGGFDSPTVAYSVLVVAKVEKGKSKKLKSVKELLGITIMERSSFEKNPIDFLEAKGYKEVKKDLIIKLPKYSLFELENGRKRMLASAGELQKGNELALPSKYVNFLYLASHYEKLKGSPEDNEQKQLFVEQHKHYLDEIIEQISEFSKRVILADANLDKVLSAYNKHRDKPIREQAENIIHLFTLTNLGAPAAFKYFDTTIDRKRYTSTKEVLDATLIHQSITGLYETRIDLSQLGGDGGGGGEAAAKGGSGGTAPLEEEYRLFLEAPIQNVTLLEQWKREIPKVWAEINPPGLASTQAPIHVQLLSTALPVRVRQYPITLEAKRSLRETIRKFRAAGILRPVHSPWNTPLLPVRKSGTSEYRMVQDLREVNKRVETIHPTVPNPYTLLSLLPPDRIWYSVLDLKDAFFCIPLAPESQLIFAFEWADAEEGESGQLTWTRLPQGFKNSPTLFNEALNRDLQGFRLDHPSVSLLQYVDDLLIAADTQAACLSATRDLLMTLAELGYRVSGKKAQLCQEEVTYLGFKIHKGSRSLSNSRTQAILQIPVPKTKRQVREFLGKIGYCRLFIPGFAELAQPLYAATRPGNDPLVWGEKEEEAFQSLKLALTQPPALALPSLDKPFQLFVEETSGAAKGVLTQALGPWKRPVAYLSKRLDPVAAGWPRCLRAIAAAALLTREASKLTFGQDIEITSSHNLESLLRSPPDKWLTNARITQYQVLLLDPPRVRFKQTAALNPATLLPETDDTLPIHHCLDTLDSLTSTRPDLTDQPLAQAEATLFTDGSSYIRDGKRYAGAAVVTLDSVIWAEPLPIGTSAQKAELIALTKALEWSKDKSVNIYTDSRYAFATLHVHGMIYRERGWLTAGGKAIKNAPEILALLTAVWLPKRVAVMHCKGHQKDDAPTSTGNRRADEVAREVAIRPLSTQATISAGKRTADGSEFEKRTADGSEFESPKKKAKVE

SEQ ID NO: 1380 - protein, 2092 aa, synthetic construct
  source 1..2092: note = Description of Artificial Sequence: Synthetic polypeptide
MPAAKRVKLDGGDKKYSIGLDIGTNSVGWAVITDEYKVPSKKFKVLGNTDRHSIKKNLIGALLFDSGETAEATRLKRTARRRYTRRKNRICYLQEIFSNEMAKVDDSFFHRLEESFLVEEDKKHERHPIFGNIVDEVAYHEKYPTIYHLRKKLVDSTDKADLRLIYLALAHMIKFRGHFLIEGDLNPDNSDVDKLFIQLVQTYNQLFEENPINASGVDAKAILSARLSKSRRLENLIAQLPGEKKNGLFGNLIALSLGLTPNFKSNFDLAEDAKLQLSKDTYDDDLDNLLAQIGDQYADLFLAAKNLSDAILLSDILRVNTEITKAPLSASMIKRYDEHHQDLTLLKALVRQQLPEKYKEIFFDQSKNGYAGYIDGGASQEEFYKFIKPILEKMDGTEELLVKLNREDLLRKQRTFDNGSIPHQIHLGELHAILRRQEDFYPFLKDNREKIEKILTFRIPYYVGPLARGNSRFAWMTRKSEETITPWNFEEVVDKGASAQSFIERMTNFDKNLPNEKVLPKHSLLYEYFTVYNELTKVKYVTEGMRKPAFLSGEQKKAIVDLLFKTNRKVTVKQLKEDYFKKIECFDSVEISGVEDRFNASLGTYHDLLKIIKDKDFLDNEENEDILEDIVLTLTLFEDREMIEERLKTYAHLFDDKVMKQLKRRRYTGWGRLSRKLINGIRDKQSGKTILDFLKSDGFANRNFMQLIHDDSLTFKEDIQKAQVSGQGDSLHEHIANLAGSPAIKKGILQTVKVVDELVKVMGRHKPENIVIEMARENQTTQKGQKNSRERMKRIEEGIKELGSQILKEHPVENTQLQNEKLYLYYLQNGRDMYVDQELDINRLSDYDVDHIVPQSFLKDDSIDNKVLTRSDKARGKSDNVPSEEVVKKMKNYWRQLLNAKLITQRKFDNLTKAERGGLSELDKAGFIKRQLVETRQITKHVAQILDSRMNTKYDENDKLIREVKVITLKSKLVSDFRKDFQFYKVREINNYHHAHDAYLNAVVGTALIKKYPKLESEFVYGDYKVYDVRKMIAKSEQEIGKATAKYFFYSNIMNFFKTEITLANGEIRKRPLIETNGETGEIVWDKGRDFATVRKVLSMPQVNIVKKTEVQTGGFSKESILPKRNSDKLIARKKDWDPKKYGGFDSPTVAYSVLVVAKVEKGKSKKLKSVKELLGITIMERSSFEKNPIDFLEAKGYKEVKKDLIIKLPKYSLFELENGRKRMLASAGELQKGNELALPSKYVNFLYLASHYEKLKGSPEDNEQKQLFVEQHKHYLDEIIEQISEFSKRVILADANLDKVLSAYNKHRDKPIREQAENIIHLFTLTNLGAPAAFKYFDTTIDRKRYTSTKEVLDATLIHQSITGLYETRIDLSQLGGDGGEAAAKGGTAPLEEEYRLFLEAPIQNVTLLEQWKREIPKVWAEINPPGLASTQAPIHVQLLSTALPVRVRQYPITLEAKRSLRETIRKFRAAGILRPVHSPWNTPLLPVRKSGTSEYRMVQDLREVNKRVETIHPTVPNPYTLLSLLPPDRIWYSVLDLKDAFFCIPLAPESQLIFAFEWADAEEGESGQLTWTRLPQGFKNSPTLFNEALNRDLQGFRLDHPSVSLLQYVDDLLIAADTQAACLSATRDLLMTLAELGYRVSGKKAQLCQEEVTYLGFKIHKGSRSLSNSRTQAILQIPVPKTKRQVREFLGKIGYCRLFIPGFAELAQPLYAATRPGNDPLVWGEKEEEAFQSLKLALTQPPALALPSLDKPFQLFVEETSGAAKGVLTQALGPWKRPVAYLSKRLDPVAAGWPRCLRAIAAAALLTREASKLTFGQDIEITSSHNLESLLRSPPDKWLTNARITQYQVLLLDPPRVRFKQTAALNPATLLPETDDTLPIHHCLDTLDSLTSTRPDLTDQPLAQAEATLFTDGSSYIRDGKRYAGAAVVTLDSVIWAEPLPIGTSAQKAELIALTKALEWSKDKSVNIYTDSRYAFATLHVHGMIYRERGWLTAGGKAIKNAPEILALLTAVWLPKRVAVMHCKGHQKDDAPTSTGNRRADEVAREVAIRPLSTQATISAGKRTADGSEFEKRTADGSEFESPKKKAKVE

SEQ ID NO: 1381 - protein, 2098 aa, synthetic construct
  source 1..2098: note = Description of Artificial Sequence: Synthetic polypeptide
MPAAKRVKLDGGDKKYSIGLDIGTNSVGWAVITDEYKVPSKKFKVLGNTDRHSIKKNLIGALLFDSGETAEATRLKRTARRRYTRRKNRICYLQEIFSNEMAKVDDSFFHRLEESFLVEEDKKHERHPIFGNIVDEVAYHEKYPTIYHLRKKLVDSTDKADLRLIYLALAHMIKFRGHFLIEGDLNPDNSDVDKLFIQLVQTYNQLFEENPINASGVDAKAILSARLSKSRRLENLIAQLPGEKKNGLFGNLIALSLGLTPNFKSNFDLAEDAKLQLSKDTYDDDLDNLLAQIGDQYADLFLAAKNLSDAILLSDILRVNTEITKAPLSASMIKRYDEHHQDLTLLKALVRQQLPEKYKEIFFDQSKNGYAGYIDGGASQEEFYKFIKPILEKMDGTEELLVKLNREDLLRKQRTFDNGSIPHQIHLGELHAILRRQEDFYPFLKDNREKIEKILTFRIPYYVGPLARGNSRFAWMTRKSEETITPWNFEEVVDKGASAQSFIERMTNFDKNLPNEKVLPKHSLLYEYFTVYNELTKVKYVTEGMRKPAFLSGEQKKAIVDLLFKTNRKVTVKQLKEDYFKKIECFDSVEISGVEDRFNASLGTYHDLLKIIKDKDFLDNEENEDILEDIVLTLTLFEDREMIEERLKTYAHLFDDKVMKQLKRRRYTGWGRLSRKLINGIRDKQSGKTILDFLKSDGFANRNFMQLIHDDSLTFKEDIQKAQVSGQGDSLHEHIANLAGSPAIKKGILQTVKVVDELVKVMGRHKPENIVIEMARENQTTQKGQKNSRERMKRIEEGIKELGSQILKEHPVENTQLQNEKLYLYYLQNGRDMYVDQELDINRLSDYDVDHIVPQSFLKDDSIDNKVLTRSDKARGKSDNVPSEEVVKKMKNYWRQLLNAKLITQRKFDNLTKAERGGLSELDKAGFIKRQLVETRQITKHVAQILDSRMNTKYDENDKLIREVKVITLKSKLVSDFRKDFQFYKVREINNYHHAHDAYLNAVVGTALIKKYPKLESEFVYGDYKVYDVRKMIAKSEQEIGKATAKYFFYSNIMNFFKTEITLANGEIRKRPLIETNGETGEIVWDKGRDFATVRKVLSMPQVNIVKKTEVQTGGFSKESILPKRNSDKLIARKKDWDPKKYGGFDSPTVAYSVLVVAKVEKGKSKKLKSVKELLGITIMERSSFEKNPIDFLEAKGYKEVKKDLIIKLPKYSLFELENGRKRMLASAGELQKGNELALPSKYVNFLYLASHYEKLKGSPEDNEQKQLFVEQHKHYLDEIIEQISEFSKRVILADANLDKVLSAYNKHRDKPIREQAENIIHLFTLTNLGAPAAFKYFDTTIDRKRYTSTKEVLDATLIHQSITGLYETRIDLSQLGGDGGGSSEAAAKPAPGGTAPLEEEYRLFLEAPIQNVTLLEQWKREIPKVWAEINPPGLASTQAPIHVQLLSTALPVRVRQYPITLEAKRSLRETIRKFRAAGILRPVHSPWNTPLLPVRKSGTSEYRMVQDLREVNKRVETIHPTVPNPYTLLSLLPPDRIWYSVLDLKDAFFCIPLAPESQLIFAFEWADAEEGESGQLTWTRLPQGFKNSPTLFNEALNRDLQGFRLDHPSVSLLQYVDDLLIAADTQAACLSATRDLLMTLAELGYRVSGKKAQLCQEEVTYLGFKIHKGSRSLSNSRTQAILQIPVPKTKRQVREFLGKIGYCRLFIPGFAELAQPLYAATRPGNDPLVWGEKEEEAFQSLKLALTQPPALALPSLDKPFQLFVEETSGAAKGVLTQALGPWKRPVAYLSKRLDPVAAGWPRCLRAIAAAALLTREASKLTFGQDIEITSSHNLESLLRSPPDKWLTNARITQYQVLLLDPPRVRFKQTAALNPATLLPETDDTLPIHHCLDTLDSLTSTRPDLTDQPLAQAEATLFTDGSSYIRDGKRYAGAAVVTLDSVIWAEPLPIGTSAQKAELIALTKALEWSKDKSVNIYTDSRYAFATLHVHGMIYRERGWLTAGGKAIKNAPEILALLTAVWLPKRVAVMHCKGHQKDDAPTSTGNRRADEVAREVAIRPLSTQATISAGKRTADGSEFEKRTADGSEFESPKKKAKVE

SEQ ID NO: 1382 - protein, 2105 aa, synthetic construct
  source 1..2105: note = Description of Artificial Sequence: Synthetic polypeptide
MPAAKRVKLDGGDKKYSIGLDIGTNSVGWAVITDEYKVPSKKFKVLGNTDRHSIKKNLIGALLFDSGETAEATRLKRTARRRYTRRKNRICYLQEIFSNEMAKVDDSFFHRLEESFLVEEDKKHERHPIFGNIVDEVAYHEKYPTIYHLRKKLVDSTDKADLRLIYLALAHMIKFRGHFLIEGDLNPDNSDVDKLFIQLVQTYNQLFEENPINASGVDAKAILSARLSKSRRLENLIAQLPGEKKNGLFGNLIALSLGLTPNFKSNFDLAEDAKLQLSKDTYDDDLDNLLAQIGDQYADLFLAAKNLSDAILLSDILRVNTEITKAPLSASMIKRYDEHHQDLTLLKALVRQQLPEKYKEIFFDQSKNGYAGYIDGGASQEEFYKFIKPILEKMDGTEELLVKLNREDLLRKQRTFDNGSIPHQIHLGELHAILRRQEDFYPFLKDNREKIEKILTFRIPYYVGPLARGNSRFAWMTRKSEETITPWNFEEVVDKGASAQSFIERMTNFDKNLPNEKVLPKHSLLYEYFTVYNELTKVKYVTEGMRKPAFLSGEQKKAIVDLLFKTNRKVTVKQLKEDYFKKIECFDSVEISGVEDRFNASLGTYHDLLKIIKDKDFLDNEENEDILEDIVLTLTLFEDREMIEERLKTYAHLFDDKVMKQLKRRRYTGWGRLSRKLINGIRDKQSGKTILDFLKSDGFANRNFMQLIHDDSLTFKEDIQKAQVSGQGDSLHEHIANLAGSPAIKKGILQTVKVVDELVKVMGRHKPENIVIEMARENQTTQKGQKNSRERMKRIEEGIKELGSQILKEHPVENTQLQNEKLYLYYLQNGRDMYVDQELDINRLSDYDVDHIVPQSFLKDDSIDNKVLTRSDKARGKSDNVPSEEVVKKMKNYWRQLLNAKLITQRKFDNLTKAERGGLSELDKAGFIKRQLVETRQITKHVAQILDSRMNTKYDENDKLIREVKVITLKSKLVSDFRKDFQFYKVREINNYHHAHDAYLNAVVGTALIKKYPKLESEFVYGDYKVYDVRKMIAKSEQEIGKATAKYFFYSNIMNFFKTEITLANGEIRKRPLIETNGETGEIVWDKGRDFATVRKVLSMPQVNIVKKTEVQTGGFSKESILPKRNSDKLIARKKDWDPKKYGGFDSPTVAYSVLVVAKVEKGKSKKLKSVKELLGITIMERSSFEKNPIDFLEAKGYKEVKKDLIIKLPKYSLFELENGRKRMLASAGELQKGNELALPSKYVNFLYLASHYEKLKGSPEDNEQKQLFVEQHKHYLDEIIEQISEFSKRVILADANLDKVLSAYNKHRDKPIREQAENIIHLFTLTNLGAPAAFKYFDTTIDRKRYTSTKEVLDATLIHQSITGLYETRIDLSQLGGDGGGSSGSSGSSGSSGSSGSSGGTAPLEEEYRLFLEAPIQNVTLLEQWKREIPKVWAEINPPGLASTQAPIHVQLLSTALPVRVRQYPITLEAKRSLRETIRKFRAAGILRPVHSPWNTPLLPVRKSGTSEYRMVQDLREVNKRVETIHPTVPNPYTLLSLLPPDRIWYSVLDLKDAFFCIPLAPESQLIFAFEWADAEEGESGQLTWTRLPQGFKNSPTLFNEALNRDLQGFRLDHPSVSLLQYVDDLLIAADTQAACLSATRDLLMTLAELGYRVSGKKAQLCQEEVTYLGFKIHKGSRSLSNSRTQAILQIPVPKTKRQVREFLGKIGYCRLFIPGFAELAQPLYAATRPGNDPLVWGEKEEEAFQSLKLALTQPPALALPSLDKPFQLFVEETSGAAKGVLTQALGPWKRPVAYLSKRLDPVAAGWPRCLRAIAAAALLTREASKLTFGQDIEITSSHNLESLLRSPPDKWLTNARITQYQVLLLDPPRVRFKQTAALNPATLLPETDDTLPIHHCLDTLDSLTSTRPDLTDQPLAQAEATLFTDGSSYIRDGKRYAGAAVVTLDSVIWAEPLPIGTSAQKAELIALTKALEWSKDKSVNIYTDSRYAFATLHVHGMIYRERGWLTAGGKAIKNAPEILALLTAVWLPKRVAVMHCKGHQKDDAPTSTGNRRADEVAREVAIRPLSTQATISAGKRTADGSEFEKRTADGSEFESPKKKAKVE

SEQ ID NO: 1383 - protein, 2096 aa, synthetic construct
  source 1..2096: note = Description of Artificial Sequence: Synthetic polypeptide
MPAAKRVKLDGGDKKYSIGLDIGTNSVGWAVITDEYKVPSKKFKVLGNTDRHSIKKNLIGALLFDSGETAEATRLKRTARRRYTRRKNRICYLQEIFSNEMAKVDDSFFHRLEESFLVEEDKKHERHPIFGNIVDEVAYHEKYPTIYHLRKKLVDSTDKADLRLIYLALAHMIKFRGHFLIEGDLNPDNSDVDKLFIQLVQTYNQLFEENPINASGVDAKAILSARLSKSRRLENLIAQLPGEKKNGLFGNLIALSLGLTPNFKSNFDLAEDAKLQLSKDTYDDDLDNLLAQIGDQYADLFLAAKNLSDAILLSDILRVNTEITKAPLSASMIKRYDEHHQDLTLLKALVRQQLPEKYKEIFFDQSKNGYAGYIDGGASQEEFYKFIKPILEKMDGTEELLVKLNREDLLRKQRTFDNGSIPHQIHLGELHAILRRQEDFYPFLKDNREKIEKILTFRIPYYVGPLARGNSRFAWMTRKSEETITPWNFEEVVDKGASAQSFIERMTNFDKNLPNEKVLPKHSLLYEYFTVYNELTKVKYVTEGMRKPAFLSGEQKKAIVDLLFKTNRKVTVKQLKEDYFKKIECFDSVEISGVEDRFNASLGTYHDLLKIIKDKDFLDNEENEDILEDIVLTLTLFEDREMIEERLKTYAHLFDDKVMKQLKRRRYTGWGRLSRKLINGIRDKQSGKTILDFLKSDGFANRNFMQLIHDDSLTFKEDIQKAQVSGQGDSLHEHIANLAGSPAIKKGILQTVKVVDELVKVMGRHKPENIVIEMARENQTTQKGQKNSRERMKRIEEGIKELGSQILKEHPVENTQLQNEKLYLYYLQNGRDMYVDQELDINRLSDYDVDHIVPQSFLKDDSIDNKVLTRSDKARGKSDNVPSEEVVKKMKNYWRQLLNAKLITQRKFDNLTKAERGGLSELDKAGFIKRQLVETRQITKHVAQILDSRMNTKYDENDKLIREVKVITLKSKLVSDFRKDFQFYKVREINNYHHAHDAYLNAVVGTALIKKYPKLESEFVYGDYKVYDVRKMIAKSEQEIGKATAKYFFYSNIMNFFKTEITLANGEIRKRPLIETNGETGEIVWDKGRDFATVRKVLSMPQVNIVKKTEVQTGGFSKESILPKRNSDKLIARKKDWDPKKYGGFDSPTVAYSVLVVAKVEKGKSKKLKSVKELLGITIMERSSFEKNPIDFLEAKGYKEVKKDLIIKLPKYSLFELENGRKRMLASAGELQKGNELALPSKYVNFLYLASHYEKLKGSPEDNEQKQLFVEQHKHYLDEIIEQISEFSKRVILADANLDKVLSAYNKHRDKPIREQAENIIHLFTLTNLGAPAAFKYFDTTIDRKRYTSTKEVLDATLIHQSITGLYETRIDLSQLGGDGGGGSPAPGGGGGTAPLEEEYRLFLEAPIQNVTLLEQWKREIPKVWAEINPPGLASTQAPIHVQLLSTALPVRVRQYPITLEAKRSLRETIRKFRAAGILRPVHSPWNTPLLPVRKSGTSEYRMVQDLREVNKRVETIHPTVPNPYTLLSLLPPDRIWYSVLDLKDAFFCIPLAPESQLIFAFEWADAEEGESGQLTWTRLPQGFKNSPTLFNEALNRDLQGFRLDHPSVSLLQYVDDLLIAADTQAACLSATRDLLMTLAELGYRVSGKKAQLCQEEVTYLGFKIHKGSRSLSNSRTQAILQIPVPKTKRQVREFLGKIGYCRLFIPGFAELAQPLYAATRPGNDPLVWGEKEEEAFQSLKLALTQPPALALPSLDKPFQLFVEETSGAAKGVLTQALGPWKRPVAYLSKRLDPVAAGWPRCLRAIAAAALLTREASKLTFGQDIEITSSHNLESLLRSPPDKWLTNARITQYQVLLLDPPRVRFKQTAALNPATLLPETDDTLPIHHCLDTLDSLTSTRPDLTDQPLAQAEATLFTDGSSYIRDGKRYAGAAVVTLDSVIWAEPLPIGTSAQKAELIALTKALEWSKDKSVNIYTDSRYAFATLHVHGMIYRERGWLTAGGKAIKNAPEILALLTAVWLPKRVAVMHCKGHQKDDAPTSTGNRRADEVAREVAIRPLSTQATISAGKRTADGSEFEKRTADGSEFESPKKKAKVE

SEQ ID NO: 1384 - protein, 2098 aa, synthetic construct
  source 1..2098: note = Description of Artificial Sequence: Synthetic polypeptide
MPAAKRVKLDGGDKKYSIGLDIGTNSVGWAVITDEYKVPSKKFKVLGNTDRHSIKKNLIGALLFDSGETAEATRLKRTARRRYTRRKNRICYLQEIFSNEMAKVDDSFFHRLEESFLVEEDKKHERHPIFGNIVDEVAYHEKYPTIYHLRKKLVDSTDKADLRLIYLALAHMIKFRGHFLIEGDLNPDNSDVDKLFIQLVQTYNQLFEENPINASGVDAKAILSARLSKSRRLENLIAQLPGEKKNGLFGNLIALSLGLTPNFKSNFDLAEDAKLQLSKDTYDDDLDNLLAQIGDQYADLFLAAKNLSDAILLSDILRVNTEITKAPLSASMIKRYDEHHQDLTLLKALVRQQLPEKYKEIFFDQSKNGYAGYIDGGASQEEFYKFIKPILEKMDGTEELLVKLNREDLLRKQRTFDNGSIPHQIHLGELHAILRRQEDFYPFLKDNREKIEKILTFRIPYYVGPLARGNSRFAWMTRKSEETITPWNFEEVVDKGASAQSFIERMTNFDKNLPNEKVLPKHSLLYEYFTVYNELTKVKYVTEGMRKPAFLSGEQKKAIVDLLFKTNRKVTVKQLKEDYFKKIECFDSVEISGVEDRFNASLGTYHDLLKIIKDKDFLDNEENEDILEDIVLTLTLFEDREMIEERLKTYAHLFDDKVMKQLKRRRYTGWGRLSRKLINGIRDKQSGKTILDFLKSDGFANRNFMQLIHDDSLTFKEDIQKAQVSGQGDSLHEHIANLAGSPAIKKGILQTVKVVDELVKVMGRHKPENIVIEMARENQTTQKGQKNSRERMKRIEEGIKELGSQILKEHPVENTQLQNEKLYLYYLQNGRDMYVDQELDINRLSDYDVDHIVPQSFLKDDSIDNKVLTRSDKARGKSDNVPSEEVVKKMKNYWRQLLNAKLITQRKFDNLTKAERGGLSELDKAGFIKRQLVETRQITKHVAQILDSRMNTKYDENDKLIREVKVITLKSKLVSDFRKDFQFYKVREINNYHHAHDAYLNAVVGTALIKKYPKLESEFVYGDYKVYDVRKMIAKSEQEIGKATAKYFFYSNIMNFFKTEITLANGEIRKRPLIETNGETGEIVWDKGRDFATVRKVLSMPQVNIVKKTEVQTGGFSKESILPKRNSDKLIARKKDWDPKKYGGFDSPTVAYSVLVVAKVEKGKSKKLKSVKELLGITIMERSSFEKNPIDFLEAKGYKEVKKDLIIKLPKYSLFELENGRKRMLASAGELQKGNELALPSKYVNFLYLASHYEKLKGSPEDNEQKQLFVEQHKHYLDEIIEQISEFSKRVILADANLDKVLSAYNKHRDKPIREQAENIIHLFTLTNLGAPAAFKYFDTTIDRKRYTSTKEVLDATLIHQSITGLYETRIDLSQLGGDGGGGGEAAAKPAPGGTAPLEEEYRLFLEAPIQNVTLLEQWKREIPKVWAEINPPGLASTQAPIHVQLLSTALPVRVRQYPITLEAKRSLRETIRKFRAAGILRPVHSPWNTPLLPVRKSGTSEYRMVQDLREVNKRVETIHPTVPNPYTLLSLLPPDRIWYSVLDLKDAFFCIPLAPESQLIFAFEWADAEEGESGQLTWTRLPQGFKNSPTLFNEALNRDLQGFRLDHPSVSLLQYVDDLLIAADTQAACLSATRDLLMTLAELGYRVSGKKAQLCQEEVTYLGFKIHKGSRSLSNSRTQAILQIPVPKTKRQVREFLGKIGYCRLFIPGFAELAQPLYAATRPGNDPLVWGEKEEEAFQSLKLALTQPPALALPSLDKPFQLFVEETSGAAKGVLTQALGPWKRPVAYLSKRLDPVAAGWPRCLRAIAAAALLTREASKLTFGQDIEITSSHNLESLLRSPPDKWLTNARITQYQVLLLDPPRVRFKQTAALNPATLLPETDDTLPIHHCLDTLDSLTSTRPDLTDQPLAQAEATLFTDGSSYIRDGKRYAGAAVVTLDSVIWAEPLPIGTSAQKAELIALTKALEWSKDKSVNIYTDSRYAFATLHVHGMIYRERGWLTAGGKAIKNAPEILALLTAVWLPKRVAVMHCKGHQKDDAPTSTGNRRADEVAREVAIRPLSTQATISAGKRTADGSEFEKRTADGSEFESPKKKAKVE

SEQ ID NO: 1385 - protein, 2096 aa, synthetic construct
  source 1..2096: note = Description of Artificial Sequence: Synthetic polypeptide
MPAAKRVKLDGGDKKYSIGLDIGTNSVGWAVITDEYKVPSKKFKVLGNTDRHSIKKNLIGALLFDSGETAEATRLKRTARRRYTRRKNRICYLQEIFSNEMAKVDDSFFHRLEESFLVEEDKKHERHPIFGNIVDEVAYHEKYPTIYHLRKKLVDSTDKADLRLIYLALAHMIKFRGHFLIEGDLNPDNSDVDKLFIQLVQTYNQLFEENPINASGVDAKAILSARLSKSRRLENLIAQLPGEKKNGLFGNLIALSLGLTPNFKSNFDLAEDAKLQLSKDTYDDDLDNLLAQIGDQYADLFLAAKNLSDAILLSDILRVNTEITKAPLSASMIKRYDEHHQDLTLLKALVRQQLPEKYKEIFFDQSKNGYAGYIDGGASQEEFYKFIKPILEKMDGTEELLVKLNREDLLRKQRTFDNGSIPHQIHLGELHAILRRQEDFYPFLKDNREKIEKILTFRIPYYVGPLARGNSRFAWMTRKSEETITPWNFEEVVDKGASAQSFIERMTNFDKNLPNEKVLPKHSLLYEYFTVYNELTKVKYVTEGMRKPAFLSGEQKKAIVDLLFKTNRKVTVKQLKEDYFKKIECFDSVEISGVEDRFNASLGTYHDLLKIIKDKDFLDNEENEDILEDIVLTLTLFEDREMIEERLKTYAHLFDDKVMKQLKRRRYTGWGRLSRKLINGIRDKQSGKTILDFLKSDGFANRNFMQLIHDDSLTFKEDIQKAQVSGQGDSLHEHIANLAGSPAIKKGILQTVKVVDELVKVMGRHKPENIVIEMARENQTTQKGQKNSRERMKRIEEGIKELGSQILKEHPVENTQLQNEKLYLYYLQNGRDMYVDQELDINRLSDYDVDHIVPQSFLKDDSIDNKVLTRSDKARGKSDNVPSEEVVKKMKNYWRQLLNAKLITQRKFDNLTKAERGGLSELDKAGFIKRQLVETRQITKHVAQILDSRMNTKYDENDKLIREVKVITLKSKLVSDFRKDFQFYKVREINNYHHAHDAYLNAVVGTALIKKYPKLESEFVYGDYKVYDVRKMIAKSEQEIGKATAKYFFYSNIMNFFKTEITLANGEIRKRPLIETNGETGEIVWDKGRDFATVRKVLSMPQVNIVKKTEVQTGGFSKESILPKRNSDKLIARKKDWDPKKYGGFDSPTVAYSVLVVAKVEKGKSKKLKSVKELLGITIMERSSFEKNPIDFLEAKGYKEVKKDLIIKLPKYSLFELENGRKRMLASAGELQKGNELALPSKYVNFLYLASHYEKLKGSPEDNEQKQLFVEQHKHYLDEIIEQISEFSKRVILADANLDKVLSAYNKHRDKPIREQAENIIHLFTLTNLGAPAAFKYFDTTIDRKRYTSTKEVLDATLIHQSITGLYETRIDLSQLGGDGGPAPGGSGSSGGTAPLEEEYRLFLEAPIQNVTLLEQWKREIPKVWAEINPPGLASTQAPIHVQLLSTALPVRVRQYPITLEAKRSLRETIRKFRAAGILRPVHSPWNTPLLPVRKSGTSEYRMVQDLREVNKRVETIHPTVPNPYTLLSLLPPDRIWYSVLDLKDAFFCIPLAPESQLIFAFEWADAEEGESGQLTWTRLPQGFKNSPTLFNEALNRDLQGFRLDHPSVSLLQYVDDLLIAADTQAACLSATRDLLMTLAELGYRVSGKKAQLCQEEVTYLGFKIHKGSRSLSNSRTQAILQIPVPKTKRQVREFLGKIGYCRLFIPGFAELAQPLYAATRPGNDPLVWGEKEEEAFQSLKLALTQPPALALPSLDKPFQLFVEETSGAAKGVLTQALGPWKRPVAYLSKRLDPVAAGWPRCLRAIAAAALLTREASKLTFGQDIEITSSHNLESLLRSPPDKWLTNARITQYQVLLLDPPRVRFKQTAALNPATLLPETDDTLPIHHCLDTLDSLTSTRPDLTDQPLAQAEATLFTDGSSYIRDGKRYAGAAVVTLDSVIWAEPLPIGTSAQKAELIALTKALEWSKDKSVNIYTDSRYAFATLHVHGMIYRERGWLTAGGKAIKNAPEILALLTAVWLPKRVAVMHCKGHQKDDAPTSTGNRRADEVAREVAIRPLSTQATISAGKRTADGSEFEKRTADGSEFESPKKKAKVE

SEQ ID NO: 1386 - protein, 2099 aa, synthetic construct
  source 1..2099: note = Description of Artificial Sequence: Synthetic polypeptide
MPAAKRVKLDGGDKKYSIGLDIGTNSVGWAVITDEYKVPSKKFKVLGNTDRHSIKKNLIGALLFDSGETAEATRLKRTARRRYTRRKNRICYLQEIFSNEMAKVDDSFFHRLEESFLVEEDKKHERHPIFGNIVDEVAYHEKYPTIYHLRKKLVDSTDKADLRLIYLALAHMIKFRGHFLIEGDLNPDNSDVDKLFIQLVQTYNQLFEENPINASGVDAKAILSARLSKSRRLENLIAQLPGEKKNGLFGNLIALSLGLTPNFKSNFDLAEDAKLQLSKDTYDDDLDNLLAQIGDQYADLFLAAKNLSDAILLSDILRVNTEITKAPLSASMIKRYDEHHQDLTLLKALVRQQLPEKYKEIFFDQSKNGYAGYIDGGASQEEFYKFIKPILEKMDGTEELLVKLNREDLLRKQRTFDNGSIPHQIHLGELHAILRRQEDFYPFLKDNREKIEKILTFRIPYYVGPLARGNSRFAWMTRKSEETITPWNFEEVVDKGASAQSFIERMTNFDKNLPNEKVLPKHSLLYEYFTVYNELTKVKYVTEGMRKPAFLSGEQKKAIVDLLFKTNRKVTVKQLKEDYFKKIECFDSVEISGVEDRFNASLGTYHDLLKIIKDKDFLDNEENEDILEDIVLTLTLFEDREMIEERLKTYAHLFDDKVMKQLKRRRYTGWGRLSRKLINGIRDKQSGKTILDFLKSDGFANRNFMQLIHDDSLTFKEDIQKAQVSGQGDSLHEHIANLAGSPAIKKGILQTVKVVDELVKVMGRHKPENIVIEMARENQTTQKGQKNSRERMKRIEEGIKELGSQILKEHPVENTQLQNEKLYLYYLQNGRDMYVDQELDINRLSDYDVDHIVPQSFLKDDSIDNKVLTRSDKARGKSDNVPSEEVVKKMKNYWRQLLNAKLITQRKFDNLTKAERGGLSELDKAGFIKRQLVETRQITKHVAQILDSRMNTKYDENDKLIREVKVITLKSKLVSDFRKDFQFYKVREINNYHHAHDAYLNAVVGTALIKKYPKLESEFVYGDYKVYDVRKMIAKSEQEIGKATAKYFFYSNIMNFFKTEITLANGEIRKRPLIETNGETGEIVWDKGRDFATVRKVLSMPQVNIVKKTEVQTGGFSKESILPKRNSDKLIARKKDWDPKKYGGFDSPTVAYSVLVVAKVEKGKSKKLKSVKELLGITIMERSSFEKNPIDFLEAKGYKEVKKDLIIKLPKYSLFELENGRKRMLASAGELQKGNELALPSKYVNFLYLASHYEKLKGSPEDNEQKQLFVEQHKHYLDEIIEQISEFSKRVILADANLDKVLSAYNKHRDKPIREQAENIIHLFTLTNLGAPAAFKYFDTTIDRKRYTSTKEVLDATLIHQSITGLYETRIDLSQLGGDGGGSSGSSGSSGSSGGTAPLEEEYRLFLEAPIQNVTLLEQWKREIPKVWAEINPPGLASTQAPIHVQLLSTALPVRVRQYPITLEAKRSLRETIRKFRAAGILRPVHSPWNTPLLPVRKSGTSEYRMVQDLREVNKRVETIHPTVPNPYTLLSLLPPDRIWYSVLDLKDAFFCIPLAPESQLIFAFEWADAEEGESGQLTWTRLPQGFKNSPTLFNEALNRDLQGFRLDHPSVSLLQYVDDLLIAADTQAACLSATRDLLMTLAELGYRVSGKKAQLCQEEVTYLGFKIHKGSRSLSNSRTQAILQIPVPKTKRQVREFLGKIGYCRLFIPGFAELAQPLYAATRPGNDPLVWGEKEEEAFQSLKLALTQPPALALPSLDKPFQLFVEETSGAAKGVLTQALGPWKRPVAYLSKRLDPVAAGWPRCLRAIAAAALLTREASKLTFGQDIEITSSHNLESLLRSPPDKWLTNARITQYQVLLLDPPRVRFKQTAALNPATLLPETDDTLPIHHCLDTLDSLTSTRPDLTDQPLAQAEATLFTDGSSYIRDGKRYAGAAVVTLDSVIWAEPLPIGTSAQKAELIALTKALEWSKDKSVNIYTDSRYAFATLHVHGMIYRERGWLTAGGKAIKNAPEILALLTAVWLPKRVAVMHCKGHQKDDAPTSTGNRRADEVAREVAIRPLSTQATISAGKRTADGSEFEKRTADGSEFESPKKKAKVE

SEQ ID NO: 1387 - protein, 2098 aa, synthetic construct
  source 1..2098: note = Description of Artificial Sequence: Synthetic polypeptide
MPAAKRVKLDGGDKKYSIGLDIGTNSVGWAVITDEYKVPSKKFKVLGNTDRHSIKKNLIGALLFDSGETAEATRLKRTARRRYTRRKNRICYLQEIFSNEMAKVDDSFFHRLEESFLVEEDKKHERHPIFGNIVDEVAYHEKYPTIYHLRKKLVDSTDKADLRLIYLALAHMIKFRGHFLIEGDLNPDNSDVDKLFIQLVQTYNQLFEENPINASGVDAKAILSARLSKSRRLENLIAQLPGEKKNGLFGNLIALSLGLTPNFKSNFDLAEDAKLQLSKDTYDDDLDNLLAQIGDQYADLFLAAKNLSDAILLSDILRVNTEITKAPLSASMIKRYDEHHQDLTLLKALVRQQLPEKYKEIFFDQSKNGYAGYIDGGASQEEFYKFIKPILEKMDGTEELLVKLNREDLLRKQRTFDNGSIPHQIHLGELHAILRRQEDFYPFLKDNREKIEKILTFRIPYYVGPLARGNSRFAWMTRKSEETITPWNFEEVVDKGASAQSFIERMTNFDKNLPNEKVLPKHSLLYEYFTVYNELTKVKYVTEGMRKPAFLSGEQKKAIVDLLFKTNRKVTVKQLKEDYFKKIECFDSVEISGVEDRFNASLGTYHDLLKIIKDKDFLDNEENEDILEDIVLTLTLFEDREMIEERLKTYAHLFDDKVMKQLKRRRYTGWGRLSRKLINGIRDKQSGKTILDFLKSDGFANRNFMQLIHDDSLTFKEDIQKAQVSGQGDSLHEHIANLAGSPAIKKGILQTVKVVDELVKVMGRHKPENIVIEMARENQTTQKGQKNSRERMKRIEEGIKELGSQILKEHPVENTQLQNEKLYLYYLQNGRDMYVDQELDINRLSDYDVDHIVPQSFLKDDSIDNKVLTRSDKARGKSDNVPSEEVVKKMKNYWRQLLNAKLITQRKFDNLTKAERGGLSELDKAGFIKRQLVETRQITKHVAQILDSRMNTKYDENDKLIREVKVITLKSKLVSDFRKDFQFYKVREINNYHHAHDAYLNAVVGTALIKKYPKLESEFVYGDYKVYDVRKMIAKSEQEIGKATAKYFFYSNIMNFFKTEITLANGEIRKRPLIETNGETGEIVWDKGRDFATVRKVLSMPQVNIVKKTEVQTGGFSKESILPKRNSDKLIARKKDWDPKKYGGFDSPTVAYSVLVVAKVEKGKSKKLKSVKELLGITIMERSSFEKNPIDFLEAKGYKEVKKDLIIKLPKYSLFELENGRKRMLASAGELQKGNELALPSKYVNFLYLASHYEKLKGSPEDNEQKQLFVEQHKHYLDEIIEQISEFSKRVILADANLDKVLSAYNKHRDKPIREQAENIIHLFTLTNLGAPAAFKYFDTTIDRKRYTSTKEVLDATLIHQSITGLYETRIDLSQLGGDGGPAPEAAAKGGGGGTAPLEEEYRLFLEAPIQNVTLLEQWKREIPKVWAEINPPGLASTQAPIHVQLLSTALPVRVRQYPITLEAKRSLRETIRKFRAAGILRPVHSPWNTPLLPVRKSGTSEYRMVQDLREVNKRVETIHPTVPNPYTLLSLLPPDRIWYSVLDLKDAFFCIPLAPESQLIFAFEWADAEEGESGQLTWTRLPQGFKNSPTLFNEALNRDLQGFRLDHPSVSLLQYVDDLLIAADTQAACLSATRDLLMTLAELGYRVSGKKAQLCQEEVTYLGFKIHKGSRSLSNSRTQAILQIPVPKTKRQVREFLGKIGYCRLFIPGFAELAQPLYAATRPGNDPLVWGEKEEEAFQSLKLALTQPPALALPSLDKPFQLFVEETSGAAKGVLTQALGPWKRPVAYLSKRLDPVAAGWPRCLRAIAAAALLTREASKLTFGQDIEITSSHNLESLLRSPPDKWLTNARITQYQVLLLDPPRVRFKQTAALNPATLLPETDDTLPIHHCLDTLDSLTSTRPDLTDQPLAQAEATLFTDGSSYIRDGKRYAGAAVVTLDSVIWAEPLPIGTSAQKAELIALTKALEWSKDKSVNIYTDSRYAFATLHVHGMIYRERGWLTAGGKAIKNAPEILALLTAVWLPKRVAVMHCKGHQKDDAPTSTGNRRADEVAREVAIRPLSTQATISAGKRTADGSEFEKRTADGSEFESPKKKAKVE

SEQ ID NO: 1388 - protein, 2098 aa, synthetic construct
  source 1..2098: note = Description of Artificial Sequence: Synthetic polypeptide
MPAAKRVKLDGGDKKYSIGLDIGTNSVGWAVITDEYKVPSKKFKVLGNTDRHSIKKNLIGALLFDSGETAEATRLKRTARRRYTRRKNRICYLQEIFSNEMAKVDDSFFHRLEESFLVEEDKKHERHPIFGNIVDEVAYHEKYPTIYHLRKKLVDSTDKADLRLIYLALAHMIKFRGHFLIEGDLNPDNSDVDKLFIQLVQTYNQLFEENPINASGVDAKAILSARLSKSRRLENLIAQLPGEKKNGLFGNLIALSLGLTPNFKSNFDLAEDAKLQLSKDTYDDDLDNLLAQIGDQYADLFLAAKNLSDAILLSDILRVNTEITKAPLSASMIKRYDEHHQDLTLLKALVRQQLPEKYKEIFFDQSKNGYAGYIDGGASQEEFYKFIKPILEKMDGTEELLVKLNREDLLRKQRTFDNGSIPHQIHLGELHAILRRQEDFYPFLKDNREKIEKILTFRIPYYVGPLARGNSRFAWMTRKSEETITPWNFEEVVDKGASAQSFIERMTNFDKNLPNEKVLPKHSLLYEYFTVYNELTKVKYVTEGMRKPAFLSGEQKKAIVDLLFKTNRKVTVKQLKEDYFKKIECFDSVEISGVEDRFNASLGTYHDLLKIIKDKDFLDNEENEDILEDIVLTLTLFEDREMIEERLKTYAHLFDDKVMKQLKRRRYTGWGRLSRKLINGIRDKQSGKTILDFLKSDGFANRNFMQLIHDDSLTFKEDIQKAQVSGQGDSLHEHIANLAGSPAIKKGILQTVKVVDELVKVMGRHKPENIVIEMARENQTTQKGQKNSRERMKRIEEGIKELGSQILKEHPVENTQLQNEKLYLYYLQNGRDMYVDQELDINRLSDYDVDHIVPQSFLKDDSIDNKVLTRSDKARGKSDNVPSEEVVKKMKNYWRQLLNAKLITQRKFDNLTKAERGGLSELDKAGFIKRQLVETRQITKHVAQILDSRMNTKYDENDKLIREVKVITLKSKLVSDFRKDFQFYKVREINNYHHAHDAYLNAVVGTALIKKYPKLESEFVYGDYKVYDVRKMIAKSEQEIGKATAKYFFYSNIMNFFKTEITLANGEIRKRPLIETNGETGEIVWDKGRDFATVRKVLSMPQVNIVKKTEVQTGGFSKESILPKRNSDKLIARKKDWDPKKYGGFDSPTVAYSVLVVAKVEKGKSKKLKSVKELLGITIMERSSFEKNPIDFLEAKGYKEVKKDLIIKLPKYSLFELENGRKRMLASAGELQKGNELALPSKYVNFLYLASHYEKLKGSPEDNEQKQLFVEQHKHYLDEIIEQISEFSKRVILADANLDKVLSAYNKHRDKPIREQAENIIHLFTLTNLGAPAAFKYFDTTIDRKRYTSTKEVLDATLIHQSITGLYETRIDLSQLGGDGGPAPEAAAKGSSGGTAPLEEEYRLFLEAPIQNVTLLEQWKREIPKVWAEINPPGLASTQAPIHVQLLSTALPVRVRQYPITLEAKRSLRETIRKFRAAGILRPVHSPWNTPLLPVRKSGTSEYRMVQDLREVNKRVETIHPTVPNPYTLLSLLPPDRIWYSVLDLKDAFFCIPLAPESQLIFAFEWADAEEGESGQLTWTRLPQGFKNSPTLFNEALNRDLQGFRLDHPSVSLLQYVDDLLIAADTQAACLSATRDLLMTLAELGYRVSGKKAQLCQEEVTYLGFKIHKGSRSLSNSRTQAILQIPVPKTKRQVREFLGKIGYCRLFIPGFAELAQPLYAATRPGNDPLVWGEKEEEAFQSLKLALTQPPALALPSLDKPFQLFVEETSGAAKGVLTQALGPWKRPVAYLSKRLDPVAAGWPRCLRAIAAAALLTREASKLTFGQDIEITSSHNLESLLRSPPDKWLTNARITQYQVLLLDPPRVRFKQTAALNPATLLPETDDTLPIHHCLDTLDSLTSTRPDLTDQPLAQAEATLFTDGSSYIRDGKRYAGAAVVTLDSVIWAEPLPIGTSAQKAELIALTKALEWSKDKSVNIYTDSRYAFATLHVHGMIYRERGWLTAGGKAIKNAPEILALLTAVWLPKRVAVMHCKGHQKDDAPTSTGNRRADEVAREVAIRPLSTQATISAGKRTADGSEFEKRTADGSEFESPKKKAKVE

SEQ ID NO: 1389 - protein, 2090 aa, synthetic construct
  source 1..2090: note = Description of Artificial Sequence: Synthetic polypeptide
MPAAKRVKLDGGDKKYSIGLDIGTNSVGWAVITDEYKVPSKKFKVLGNTDRHSIKKNLIGALLFDSGETAEATRLKRTARRRYTRRKNRICYLQEIFSNEMAKVDDSFFHRLEESFLVEEDKKHERHPIFGNIVDEVAYHEKYPTIYHLRKKLVDSTDKADLRLIYLALAHMIKFRGHFLIEGDLNPDNSDVDKLFIQLVQTYNQLFEENPINASGVDAKAILSARLSKSRRLENLIAQLPGEKKNGLFGNLIALSLGLTPNFKSNFDLAEDAKLQLSKDTYDDDLDNLLAQIGDQYADLFLAAKNLSDAILLSDILRVNTEITKAPLSASMIKRYDEHHQDLTLLKALVRQQLPEKYKEIFFDQSKNGYAGYIDGGASQEEFYKFIKPILEKMDGTEELLVKLNREDLLRKQRTFDNGSIPHQIHLGELHAILRRQEDFYPFLKDNREKIEKILTFRIPYYVGPLARGNSRFAWMTRKSEETITPWNFEEVVDKGASAQSFIERMTNFDKNLPNEKVLPKHSLLYEYFTVYNELTKVKYVTEGMRKPAFLSGEQKKAIVDLLFKTNRKVTVKQLKEDYFKKIECFDSVEISGVEDRFNASLGTYHDLLKIIKDKDFLDNEENEDILEDIVLTLTLFEDREMIEERLKTYAHLFDDKVMKQLKRRRYTGWGRLSRKLINGIRDKQSGKTILDFLKSDGFANRNFMQLIHDDSLTFKEDIQKAQVSGQGDSLHEHIANLAGSPAIKKGILQTVKVVDELVKVMGRHKPENIVIEMARENQTTQKGQKNSRERMKRIEEGIKELGSQILKEHPVENTQLQNEKLYLYYLQNGRDMYVDQELDINRLSDYDVDHIVPQSFLKDDSIDNKVLTRSDKARGKSDNVPSEEVVKKMKNYWRQLLNAKLITQRKFDNLTKAERGGLSELDKAGFIKRQLVETRQITKHVAQILDSRMNTKYDENDKLIREVKVITLKSKLVSDFRKDFQFYKVREINNYHHAHDAYLNAVVGTALIKKYPKLESEFVYGDYKVYDVRKMIAKSEQEIGKATAKYFFYSNIMNFFKTEITLANGEIRKRPLIETNGETGEIVWDKGRDFATVRKVLSMPQVNIVKKTEVQTGGFSKESILPKRNSDKLIARKKDWDPKKYGGFDSPTVAYSVLVVAKVEKGKSKKLKSVKELLGITIMERSSFEKNPIDFLEAKGYKEVKKDLIIKLPKYSLFELENGRKRMLASAGELQKGNELALPSKYVNFLYLASHYEKLKGSPEDNEQKQLFVEQHKHYLDEIIEQISEFSKRVILADANLDKVLSAYNKHRDKPIREQAENIIHLFTLTNLGAPAAFKYFDTTIDRKRYTSTKEVLDATLIHQSITGLYETRIDLSQLGGDGGGGGGGTAPLEEEYRLFLEAPIQNVTLLEQWKREIPKVWAEINPPGLASTQAPIHVQLLSTALPVRVRQYPITLEAKRSLRETIRKFRAAGILRPVHSPWNTPLLPVRKSGTSEYRMVQDLREVNKRVETIHPTVPNPYTLLSLLPPDRIWYSVLDLKDAFFCIPLAPESQLIFAFEWADAEEGESGQLTWTRLPQGFKNSPTLFNEALNRDLQGFRLDHPSVSLLQYVDDLLIAADTQAACLSATRDLLMTLAELGYRVSGKKAQLCQEEVTYLGFKIHKGSRSLSNSRTQAILQIPVPKTKRQVREFLGKIGYCRLFIPGFAELAQPLYAATRPGNDPLVWGEKEEEAFQSLKLALTQPPALALPSLDKPFQLFVEETSGAAKGVLTQALGPWKRPVAYLSKRLDPVAAGWPRCLRAIAAAALLTREASKLTFGQDIEITSSHNLESLLRSPPDKWLTNARITQYQVLLLDPPRVRFKQTAALNPATLLPETDDTLPIHHCLDTLDSLTSTRPDLTDQPLAQAEATLFTDGSSYIRDGKRYAGAAVVTLDSVIWAEPLPIGTSAQKAELIALTKALEWSKDKSVNIYTDSRYAFATLHVHGMIYRERGWLTAGGKAIKNAPEILALLTAVWLPKRVAVMHCKGHQKDDAPTSTGNRRADEVAREVAIRPLSTQATISAGKRTADGSEFEKRTADGSEFESPKKKAKVE

SEQ ID NO: 1390 - protein, 2098 aa, synthetic construct
  source 1..2098: note = Description of Artificial Sequence: Synthetic polypeptide
MPAAKRVKLDGGDKKYSIGLDIGTNSVGWAVITDEYKVPSKKFKVLGNTDRHSIKKNLIGALLFDSGETAEATRLKRTARRRYTRRKNRICYLQEIFSNEMAKVDDSFFHRLEESFLVEEDKKHERHPIFGNIVDEVAYHEKYPTIYHLRKKLVDSTDKADLRLIYLALAHMIKFRGHFLIEGDLNPDNSDVDKLFIQLVQTYNQLFEENPINASGVDAKAILSARLSKSRRLENLIAQLPGEKKNGLFGNLIALSLGLTPNFKSNFDLAEDAKLQLSKDTYDDDLDNLLAQIGDQYADLFLAAKNLSDAILLSDILRVNTEITKAPLSASMIKRYDEHHQDLTLLKALVRQQLPEKYKEIFFDQSKNGYAGYIDGGASQEEFYKFIKPILEKMDGTEELLVKLNREDLLRKQRTFDNGSIPHQIHLGELHAILRRQEDFYPFLKDNREKIEKILTFRIPYYVGPLARGNSRFAWMTRKSEETITPWNFEEVVDKGASAQSFIERMTNFDKNLPNEKVLPKHSLLYEYFTVYNELTKVKYVTEGMRKPAFLSGEQKKAIVDLLFKTNRKVTVKQLKEDYFKKIECFDSVEISGVEDRFNASLGTYHDLLKIIKDKDFLDNEENEDILEDIVLTLTLFEDREMIEERLKTYAHLFDDKVMKQLKRRRYTGWGRLSRKLINGIRDKQSGKTILDFLKSDGFANRNFMQLIHDDSLTFKEDIQKAQVSGQGDSLHEHIANLAGSPAIKKGILQTVKVVDELVKVMGRHKPENIVIEMARENQTTQKGQKNSRERMKRIEEGIKELGSQILKEHPVENTQLQNEKLYLYYLQNGRDMYVDQELDINRLSDYDVDHIVPQSFLKDDSIDNKVLTRSDKARGKSDNVPSEEVVKKMKNYWRQLLNAKLITQRKFDNLTKAERGGLSELDKAGFIKRQLVETRQITKHVAQILDSRMNTKYDENDKLIREVKVITLKSKLVSDFRKDFQFYKVREINNYHHAHDAYLNAVVGTALIKKYPKLESEFVYGDYKVYDVRKMIAKSEQEIGKATAKYFFYSNIMNFFKTEITLANGEIRKRPLIETNGETGEIVWDKGRDFATVRKVLSMPQVNIVKKTEVQTGGFSKESILPKRNSDKLIARKKDWDPKKYGGFDSPTVAYSVLVVAKVEKGKSKKLKSVKELLGITIMERSSFEKNPIDFLEAKGYKEVKKDLIIKLPKYSLFELENGRKRMLASAGELQKGNELALPSKYVNFLYLASHYEKLKGSPEDNEQKQLFVEQHKHYLDEIIEQISEFSKRVILADANLDKVLSAYNKHRDKPIREQAENIIHLFTLTNLGAPAAFKYFDTTIDRKRYTSTKEVLDATLIHQSITGLYETRIDLSQLGGDGGEAAAKGGGGGSGGTAPLEEEYRLFLEAPIQNVTLLEQWKREIPKVWAEINPPGLASTQAPIHVQLLSTALPVRVRQYPITLEAKRSLRETIRKFRAAGILRPVHSPWNTPLLPVRKSGTSEYRMVQDLREVNKRVETIHPTVPNPYTLLSLLPPDRIWYSVLDLKDAFFCIPLAPESQLIFAFEWADAEEGESGQLTWTRLPQGFKNSPTLFNEALNRDLQGFRLDHPSVSLLQYVDDLLIAADTQAACLSATRDLLMTLAELGYRVSGKKAQLCQEEVTYLGFKIHKGSRSLSNSRTQAILQIPVPKTKRQVREFLGKIGYCRLFIPGFAELAQPLYAATRPGNDPLVWGEKEEEAFQSLKLALTQPPALALPSLDKPFQLFVEETSGAAKGVLTQALGPWKRPVAYLSKRLDPVAAGWPRCLRAIAAAALLTREASKLTFGQDIEITSSHNLESLLRSPPDKWLTNARITQYQVLLLDPPRVRFKQTAALNPATLLPETDDTLPIHHCLDTLDSLTSTRPDLTDQPLAQAEATLFTDGSSYIRDGKRYAGAAVVTLDSVIWAEPLPIGTSAQKAELIALTKALEWSKDKSVNIYTDSRYAFATLHVHGMIYRERGWLTAGGKAIKNAPEILALLTAVWLPKRVAVMHCKGHQKDDAPTSTGNRRADEVAREVAIRPLSTQATISAGKRTADGSEFEKRTADGSEFESPKKKAKVE

SEQ ID NO: 1391 - protein, 2093 aa, synthetic construct
  source 1..2093: note = Description of Artificial Sequence: Synthetic polypeptide
MPAAKRVKLDGGDKKYSIGLDIGTNSVGWAVITDEYKVPSKKFKVLGNTDRHSIKKNLIGALLFDSGETAEATRLKRTARRRYTRRKNRICYLQEIFSNEMAKVDDSFFHRLEESFLVEEDKKHERHPIFGNIVDEVAYHEKYPTIYHLRKKLVDSTDKADLRLIYLALAHMIKFRGHFLIEGDLNPDNSDVDKLFIQLVQTYNQLFEENPINASGVDAKAILSARLSKSRRLENLIAQLPGEKKNGLFGNLIALSLGLTPNFKSNFDLAEDAKLQLSKDTYDDDLDNLLAQIGDQYADLFLAAKNLSDAILLSDILRVNTEITKAPLSASMIKRYDEHHQDLTLLKALVRQQLPEKYKEIFFDQSKNGYAGYIDGGASQEEFYKFIKPILEKMDGTEELLVKLNREDLLRKQRTFDNGSIPHQIHLGELHAILRRQEDFYPFLKDNREKIEKILTFRIPYYVGPLARGNSRFAWMTRKSEETITPWNFEEVVDKGASAQSFIERMTNFDKNLPNEKVLPKHSLLYEYFTVYNELTKVKYVTEGMRKPAFLSGEQKKAIVDLLFKTNRKVTVKQLKEDYFKKIECFDSVEISGVEDRFNASLGTYHDLLKIIKDKDFLDNEENEDILEDIVLTLTLFEDREMIEERLKTYAHLFDDKVMKQLKRRRYTGWGRLSRKLINGIRDKQSGKTILDFLKSDGFANRNFMQLIHDDSLTFKEDIQKAQVSGQGDSLHEHIANLAGSPAIKKGILQTVKVVDELVKVMGRHKPENIVIEMARENQTTQKGQKNSRERMKRIEEGIKELGSQILKEHPVENTQLQNEKLYLYYLQNGRDMYVDQELDINRLSDYDVDHIVPQSFLKDDSIDNKVLTRSDKARGKSDNVPSEEVVKKMKNYWRQLLNAKLITQRKFDNLTKAERGGLSELDKAGFIKRQLVETRQITKHVAQILDSRMNTKYDENDKLIREVKVITLKSKLVSDFRKDFQFYKVREINNYHHAHDAYLNAVVGTALIKKYPKLESEFVYGDYKVYDVRKMIAKSEQEIGKATAKYFFYSNIMNFFKTEITLANGEIRKRPLIETNGETGEIVWDKGRDFATVRKVLSMPQVNIVKKTEVQTGGFSKESILPKRNSDKLIARKKDWDPKKYGGFDSPTVAYSVLVVAKVEKGKSKKLKSVKELLGITIMERSSFEKNPIDFLEAKGYKEVKKDLIIKLPKYSLFELENGRKRMLASAGELQKGNELALPSKYVNFLYLASHYEKLKGSPEDNEQKQLFVEQHKHYLDEIIEQISEFSKRVILADANLDKVLSAYNKHRDKPIREQAENIIHLFTLTNLGAPAAFKYFDTTIDRKRYTSTKEVLDATLIHQSITGLYETRIDLSQLGGDGGGGSGGGGGTAPLEEEYRLFLEAPIQNVTLLEQWKREIPKVWAEINPPGLASTQAPIHVQLLSTALPVRVRQYPITLEAKRSLRETIRKFRAAGILRPVHSPWNTPLLPVRKSGTSEYRMVQDLREVNKRVETIHPTVPNPYTLLSLLPPDRIWYSVLDLKDAFFCIPLAPESQLIFAFEWADAEEGESGQLTWTRLPQGFKNSPTLFNEALNRDLQGFRLDHPSVSLLQYVDDLLIAADTQAACLSATRDLLMTLAELGYRVSGKKAQLCQEEVTYLGFKIHKGSRSLSNSRTQAILQIPVPKTKRQVREFLGKIGYCRLFIPGFAELAQPLYAATRPGNDPLVWGEKEEEAFQSLKLALTQPPALALPSLDKPFQLFVEETSGAAKGVLTQALGPWKRPVAYLSKRLDPVAAGWPRCLRAIAAAALLTREASKLTFGQDIEITSSHNLESLLRSPPDKWLTNARITQYQVLLLDPPRVRFKQTAALNPATLLPETDDTLPIHHCLDTLDSLTSTRPDLTDQPLAQAEATLFTDGSSYIRDGKRYAGAAVVTLDSVIWAEPLPIGTSAQKAELIALTKALEWSKDKSVNIYTDSRYAFATLHVHGMIYRERGWLTAGGKAIKNAPEILALLTAVWLPKRVAVMHCKGHQKDDAPTSTGNRRADEVAREVAIRPLSTQATISAGKRTADGSEFEKRTADGSEFESPKKKAKVE

SEQ ID NO: 1392 - protein, 2093 aa, synthetic construct
  source 1..2093: note = Description of Artificial Sequence: Synthetic polypeptide
MPAAKRVKLDGGDKKYSIGLDIGTNSVGWAVITDEYKVPSKKFKVLGNTDRHSIKKNLIGALLFDSGETAEATRLKRTARRRYTRRKNRICYLQEIFSNEMAKVDDSFFHRLEESFLVEEDKKHERHPIFGNIVDEVAYHEKYPTIYHLRKKLVDSTDKADLRLIYLALAHMIKFRGHFLIEGDLNPDNSDVDKLFIQLVQTYNQLFEENPINASGVDAKAILSARLSKSRRLENLIAQLPGEKKNGLFGNLIALSLGLTPNFKSNFDLAEDAKLQLSKDTYDDDLDNLLAQIGDQYADLFLAAKNLSDAILLSDILRVNTEITKAPLSASMIKRYDEHHQDLTLLKALVRQQLPEKYKEIFFDQSKNGYAGYIDGGASQEEFYKFIKPILEKMDGTEELLVKLNREDLLRKQRTFDNGSIPHQIHLGELHAILRRQEDFYPFLKDNREKIEKILTFRIPYYVGPLARGNSRFAWMTRKSEETITPWNFEEVVDKGASAQSFIERMTNFDKNLPNEKVLPKHSLLYEYFTVYNELTKVKYVTEGMRKPAFLSGEQKKAIVDLLFKTNRKVTVKQLKEDYFKKIECFDSVEISGVEDRFNASLGTYHDLLKIIKDKDFLDNEENEDILEDIVLTLTLFEDREMIEERLKTYAHLFDDKVMKQLKRRRYTGWGRLSRKLINGIRDKQSGKTILDFLKSDGFANRNFMQLIHDDSLTFKEDIQKAQVSGQGDSLHEHIANLAGSPAIKKGILQTVKVVDELVKVMGRHKPENIVIEMARENQTTQKGQKNSRERMKRIEEGIKELGSQILKEHPVENTQLQNEKLYLYYLQNGRDMYVDQELDINRLSDYDVDHIVPQSFLKDDSIDNKVLTRSDKARGKSDNVPSEEVVKKMKNYWRQLLNAKLITQRKFDNLTKAERGGLSELDKAGFIKRQLVETRQITKHVAQILDSRMNTKYDENDKLIREVKVITLKSKLVSDFRKDFQFYKVREINNYHHAHDAYLNAVVGTALIKKYPKLESEFVYGDYKVYDVRKMIAKSEQEIGKATAKYFFYSNIMNFFKTEITLANGEIRKRPLIETNGETGEIVWDKGRDFATVRKVLSMPQVNIVKKTEVQTGGFSKESILPKRNSDKLIARKKDWDPKKYGGFDSPTVAYSVLVVAKVEKGKSKKLKSVKELLGITIMERSSFEKNPIDFLEAKGYKEVKKDLIIKLPKYSLFELENGRKRMLASAGELQKGNELALPSKYVNFLYLASHYEKLKGSPEDNEQKQLFVEQHKHYLDEIIEQISEFSKRVILADANLDKVLSAYNKHRDKPIREQAENIIHLFTLTNLGAPAAFKYFDTTIDRKRYTSTKEVLDATLIHQSITGLYETRIDLSQLGGDGGGGSPAPGGTAPLEEEYRLFLEAPIQNVTLLEQWKREIPKVWAEINPPGLASTQAPIHVQLLSTALPVRVRQYPITLEAKRSLRETIRKFRAAGILRPVHSPWNTPLLPVRKSGTSEYRMVQDLREVNKRVETIHPTVPNPYTLLSLLPPDRIWYSVLDLKDAFFCIPLAPESQLIFAFEWADAEEGESGQLTWTRLPQGFKNSPTLFNEALNRDLQGFRLDHPSVSLLQYVDDLLIAADTQAACLSATRDLLMTLAELGYRVSGKKAQLCQEEVTYLGFKIHKGSRSLSNSRTQAILQIPVPKTKRQVREFLGKIGYCRLFIPGFAELAQPLYAATRPGNDPLVWGEKEEEAFQSLKLALTQPPALALPSLDKPFQLFVEETSGAAKGVLTQALGPWKRPVAYLSKRLDPVAAGWPRCLRAIAAAALLTREASKLTFGQDIEITSSHNLESLLRSPPDKWLTNARITQYQVLLLDPPRVRFKQTAALNPATLLPETDDTLPIHHCLDTLDSLTSTRPDLTDQPLAQAEATLFTDGSSYIRDGKRYAGAAVVTLDSVIWAEPLPIGTSAQKAELIALTKALEWSKDKSVNIYTDSRYAFATLHVHGMIYRERGWLTAGGKAIKNAPEILALLTAVWLPKRVAVMHCKGHQKDDAPTSTGNRRADEVAREVAIRPLSTQATISAGKRTADGSEFEKRTADGSEFESPKKKAKVE

SEQ ID NO: 1393 - protein, 2102 aa, synthetic construct
  source 1..2102: note = Description of Artificial Sequence: Synthetic polypeptide
MPAAKRVKLDGGDKKYSIGLDIGTNSVGWAVITDEYKVPSKKFKVLGNTDRHSIKKNLIGALLFDSGETAEATRLKRTARRRYTRRKNRICYLQEIFSNEMAKVDDSFFHRLEESFLVEEDKKHERHPIFGNIVDEVAYHEKYPTIYHLRKKLVDSTDKADLRLIYLALAHMIKFRGHFLIEGDLNPDNSDVDKLFIQLVQTYNQLFEENPINASGVDAKAILSARLSKSRRLENLIAQLPGEKKNGLFGNLIALSLGLTPNFKSNFDLAEDAKLQLSKDTYDDDLDNLLAQIGDQYADLFLAAKNLSDAILLSDILRVNTEITKAPLSASMIKRYDEHHQDLTLLKALVRQQLPEKYKEIFFDQSKNGYAGYIDGGASQEEFYKFIKPILEKMDGTEELLVKLNREDLLRKQRTFDNGSIPHQIHLGELHAILRRQEDFYPFLKDNREKIEKILTFRIPYYVGPLARGNSRFAWMTRKSEETITPWNFEEVVDKGASAQSFIERMTNFDKNLPNEKVLPKHSLLYEYFTVYNELTKVKYVTEGMRKPAFLSGEQKKAIVDLLFKTNRKVTVKQLKEDYFKKIECFDSVEISGVEDRFNASLGTYHDLLKIIKDKDFLDNEENEDILEDIVLTLTLFEDREMIEERLKTYAHLFDDKVMKQLKRRRYTGWGRLSRKLINGIRDKQSGKTILDFLKSDGFANRNFMQLIHDDSLTFKEDIQKAQVSGQGDSLHEHIANLAGSPAIKKGILQTVKVVDELVKVMGRHKPENIVIEMARENQTTQKGQKNSRERMKRIEEGIKELGSQILKEHPVENTQLQNEKLYLYYLQNGRDMYVDQELDINRLSDYDVDHIVPQSFLKDDSIDNKVLTRSDKARGKSDNVPSEEVVKKMKNYWRQLLNAKLITQRKFDNLTKAERGGLSELDKAGFIKRQLVETRQITKHVAQILDSRMNTKYDENDKLIREVKVITLKSKLVSDFRKDFQFYKVREINNYHHAHDAYLNAVVGTALIKKYPKLESEFVYGDYKVYDVRKMIAKSEQEIGKATAKYFFYSNIMNFFKTEITLANGEIRKRPLIETNGETGEIVWDKGRDFATVRKVLSMPQVNIVKKTEVQTGGFSKESILPKRNSDKLIARKKDWDPKKYGGFDSPTVAYSVLVVAKVEKGKSKKLKSVKELLGITIMERSSFEKNPIDFLEAKGYKEVKKDLIIKLPKYSLFELENGRKRMLASAGELQKGNELALPSKYVNFLYLASHYEKLKGSPEDNEQKQLFVEQHKHYLDEIIEQISEFSKRVILADANLDKVLSAYNKHRDKPIREQAENIIHLFTLTNLGAPAAFKYFDTTIDRKRYTSTKEVLDATLIHQSITGLYETRIDLSQLGGDGGGGGGSEAAAKGGGGSGGTAPLEEEYRLFLEAPIQNVTLLEQWKREIPKVWAEINPPGLASTQAPIHVQLLSTALPVRVRQYPITLEAKRSLRETIRKFRAAGILRPVHSPWNTPLLPVRKSGTSEYRMVQDLREVNKRVETIHPTVPNPYTLLSLLPPDRIWYSVLDLKDAFFCIPLAPESQLIFAFEWADAEEGESGQLTWTRLPQGFKNSPTLFNEALNRDLQGFRLDHPSVSLLQYVDDLLIAADTQAACLSATRDLLMTLAELGYRVSGKKAQLCQEEVTYLGFKIHKGSRSLSNSRTQAILQIPVPKTKRQVREFLGKIGYCRLFIPGFAELAQPLYAATRPGNDPLVWGEKEEEAFQSLKLALTQPPALALPSLDKPFQLFVEETSGAAKGVLTQALGPWKRPVAYLSKRLDPVAAGWPRCLRAIAAAALLTREASKLTFGQDIEITSSHNLESLLRSPPDKWLTNARITQYQVLLLDPPRVRFKQTAALNPATLLPETDDTLPIHHCLDTLDSLTSTRPDLTDQPLAQAEATLFTDGSSYIRDGKRYAGAAVVTLDSVIWAEPLPIGTSAQKAELIALTKALEWSKDKSVNIYTDSRYAFATLHVHGMIYRERGWLTAGGKAIKNAPEILALLTAVWLPKRVAVMHCKGHQKDDAPTSTGNRRADEVAREVAIRPLSTQATISAGKRTADGSEFEKRTADGSEFESPKKKAKVE

SEQ ID NO: 1394 - protein, 2098 aa, synthetic construct
  source 1..2098: note = Description of Artificial Sequence: Synthetic polypeptide
MPAAKRVKLDGGDKKYSIGLDIGTNSVGWAVITDEYKVPSKKFKVLGNTDRHSIKKNLIGALLFDSGETAEATRLKRTARRRYTRRKNRICYLQEIFSNEMAKVDDSFFHRLEESFLVEEDKKHERHPIFGNIVDEVAYHEKYPTIYHLRKKLVDSTDKADLRLIYLALAHMIKFRGHFLIEGDLNPDNSDVDKLFIQLVQTYNQLFEENPINASGVDAKAILSARLSKSRRLENLIAQLPGEKKNGLFGNLIALSLGLTPNFKSNFDLAEDAKLQLSKDTYDDDLDNLLAQIGDQYADLFLAAKNLSDAILLSDILRVNTEITKAPLSASMIKRYDEHHQDLTLLKALVRQQLPEKYKEIFFDQSKNGYAGYIDGGASQEEFYKFIKPILEKMDGTEELLVKLNREDLLRKQRTFDNGSIPHQIHLGELHAILRRQEDFYPFLKDNREKIEKILTFRIPYYVGPLARGNSRFAWMTRKSEETITPWNFEEVVDKGASAQSFIERMTNFDKNLPNEKVLPKHSLLYEYFTVYNELTKVKYVTEGMRKPAFLSGEQKKAIVDLLFKTNRKVTVKQLKEDYFKKIECFDSVEISGVEDRFNASLGTYHDLLKIIKDKDFLDNEENEDILEDIVLTLTLFEDREMIEERLKTYAHLFDDKVMKQLKRRRYTGWGRLSRKLINGIRDKQSGKTILDFLKSDGFANRNFMQLIHDDSLTFKEDIQKAQVSGQGDSLHEHIANLAGSPAIKKGILQTVKVVDELVKVMGRHKPENIVIEMARENQTTQKGQKNSRERMKRIEEGIKELGSQILKEHPVENTQLQNEKLYLYYLQNGRDMYVDQELDINRLSDYDVDHIVPQSFLKDDSIDNKVLTRSDKARGKSDNVPSEEVVKKMKNYWRQLLNAKLITQRKFDNLTKAERGGLSELDKAGFIKRQLVETRQITKHVAQILDSRMNTKYDENDKLIREVKVITLKSKLVSDFRKDFQFYKVREINNYHHAHDAYLNAVVGTALIKKYPKLESEFVYGDYKVYDVRKMIAKSEQEIGKATAKYFFYSNIMNFFKTEITLANGEIRKRPLIETNGETGEIVWDKGRDFATVRKVLSMPQVNIVKKTEVQTGGFSKESILPKRNSDKLIARKKDWDPKKYGGFDSPTVAYSVLVVAKVEKGKSKKLKSVKELLGITIMERSSFEKNPIDFLEAKGYKEVKKDLIIKLPKYSLFELENGRKRMLASAGELQKGNELALPSKYVNFLYLASHYEKLKGSPEDNEQKQLFVEQHKHYLDEIIEQISEFSKRVILADANLDKVLSAYNKHRDKPIREQAENIIHLFTLTNLGAPAAFKYFDTTIDRKRYTSTKEVLDATLIHQSITGLYETRIDLSQLGGDGGGSSEAAAKGGGGGTAPLEEEYRLFLEAPIQNVTLLEQWKREIPKVWAEINPPGLASTQAPIHVQLLSTALPVRVRQYPITLEAKRSLRETIRKFRAAGILRPVHSPWNTPLLPVRKSGTSEYRMVQDLREVNKRVETIHPTVPNPYTLLSLLPPDRIWYSVLDLKDAFFCIPLAPESQLIFAFEWADAEEGESGQLTWTRLPQGFKNSPTLFNEALNRDLQGFRLDHPSVSLLQYVDDLLIAADTQAACLSATRDLLMTLAELGYRVSGKKAQLCQEEVTYLGFKIHKGSRSLSNSRTQAILQIPVPKTKRQVREFLGKIGYCRLFIPGFAELAQPLYAATRPGNDPLVWGEKEEEAFQSLKLALTQPPALALPSLDKPFQLFVEETSGAAKGVLTQALGPWKRPVAYLSKRLDPVAAGWPRCLRAIAAAALLTREASKLTFGQDIEITSSHNLESLLRSPPDKWLTNARITQYQVLLLDPPRVRFKQTAALNPATLLPETDDTLPIHHCLDTLDSLTSTRPDLTDQPLAQAEATLFTDGSSYIRDGKRYAGAAVVTLDSVIWAEPLPIGTSAQKAELIALTKALEWSKDKSVNIYTDSRYAFATLHVHGMIYRERGWLTAGGKAIKNAPEILALLTAVWLPKRVAVMHCKGHQKDDAPTSTGNRRADEVAREVAIRPLSTQATISAGKRTADGSEFEKRTADGSEFESPKKKAKVE

SEQ ID NO: 1395 - protein, 2098 aa, synthetic construct
  source 1..2098: note = Description of Artificial Sequence: Synthetic polypeptide
MPAAKRVKLDGGDKKYSIGLDIGTNSVGWAVITDEYKVPSKKFKVLGNTDRHSIKKNLIGALLFDSGETAEATRLKRTARRRYTRRKNRICYLQEIFSNEMAKVDDSFFHRLEESFLVEEDKKHERHPIFGNIVDEVAYHEKYPTIYHLRKKLVDSTDKADLRLIYLALAHMIKFRGHFLIEGDLNPDNSDVDKLFIQLVQTYNQLFEENPINASGVDAKAILSARLSKSRRLENLIAQLPGEKKNGLFGNLIALSLGLTPNFKSNFDLAEDAKLQLSKDTYDDDLDNLLAQIGDQYADLFLAAKNLSDAILLSDILRVNTEITKAPLSASMIKRYDEHHQDLTLLKALVRQQLPEKYKEIFFDQSKNGYAGYIDGGASQEEFYKFIKPILEKMDGTEELLVKLNREDLLRKQRTFDNGSIPHQIHLGELHAILRRQEDFYPFLKDNREKIEKILTFRIPYYVGPLARGNSRFAWMTRKSEETITPWNFEEVVDKGASAQSFIERMTNFDKNLPNEKVLPKHSLLYEYFTVYNELTKVKYVTEGMRKPAFLSGEQKKAIVDLLFKTNRKVTVKQLKEDYFKKIECFDSVEISGVEDRFNASLGTYHDLLKIIKDKDFLDNEENEDILEDIVLTLTLFEDREMIEERLKTYAHLFDDKVMKQLKRRRYTGWGRLSRKLINGIRDKQSGKTILDFLKSDGFANRNFMQLIHDDSLTFKEDIQKAQVSGQGDSLHEHIANLAGSPAIKKGILQTVKVVDELVKVMGRHKPENIVIEMARENQTTQKGQKNSRERMKRIEEGIKELGSQILKEHPVENTQLQNEKLYLYYLQNGRDMYVDQELDINRLSDYDVDHIVPQSFLKDDSIDNKVLTRSDKARGKSDNVPSEEVVKKMKNYWRQLLNAKLITQRKFDNLTKAERGGLSELDKAGFIKRQLVETRQITKHVAQILDSRMNTKYDENDKLIREVKVITLKSKLVSDFRKDFQFYKVREINNYHHAHDAYLNAVVGTALIKKYPKLESEFVYGDYKVYDVRKMIAKSEQEIGKATAKYFFYSNIMNFFKTEITLANGEIRKRPLIETNGETGEIVWDKGRDFATVRKVLSMPQVNIVKKTEVQTGGFSKESILPKRNSDKLIARKKDWDPKKYGGFDSPTVAYSVLVVAKVEKGKSKKLKSVKELLGITIMERSSFEKNPIDFLEAKGYKEVKKDLIIKLPKYSLFELENGRKRMLASAGELQKGNELALPSKYVNFLYLASHYEKLKGSPEDNEQKQLFVEQHKHYLDEIIEQISEFSKRVILADANLDKVLSAYNKHRDKPIREQAENIIHLFTLTNLGAPAAFKYFDTTIDRKRYTSTKEVLDATLIHQSITGLYETRIDLSQLGGDGGGGGEAAAKGSSGGTAPLEEEYRLFLEAPIQNVTLLEQWKREIPKVWAEINPPGLASTQAPIHVQLLSTALPVRVRQYPITLEAKRSLRETIRKFRAAGILRPVHSPWNTPLLPVRKSGTSEYRMVQDLREVNKRVETIHPTVPNPYTLLSLLPPDRIWYSVLDLKDAFFCIPLAPESQLIFAFEWADAEEGESGQLTWTRLPQGFKNSPTLFNEALNRDLQGFRLDHPSVSLLQYVDDLLIAADTQAACLSATRDLLMTLAELGYRVSGKKAQLCQEEVTYLGFKIHKGSRSLSNSRTQAILQIPVPKTKRQVREFLGKIGYCRLFIPGFAELAQPLYAATRPGNDPLVWGEKEEEAFQSLKLALTQPPALALPSLDKPFQLFVEETSGAAKGVLTQALGPWKRPVAYLSKRLDPVAAGWPRCLRAIAAAALLTREASKLTFGQDIEITSSHNLESLLRSPPDKWLTNARITQYQVLLLDPPRVRFKQTAALNPATLLPETDDTLPIHHCLDTLDSLTSTRPDLTDQPLAQAEATLFTDGSSYIRDGKRYAGAAVVTLDSVIWAEPLPIGTSAQKAELIALTKALEWSKDKSVNIYTDSRYAFATLHVHGMIYRERGWLTAGGKAIKNAPEILALLTAVWLPKRVAVMHCKGHQKDDAPTSTGNRRADEVAREVAIRPLSTQATISAGKRTADGSEFEKRTADGSEFESPKKKAKVE

SEQ ID NO: 1396 - protein, 2093 aa, synthetic construct
  source 1..2093: note = Description of Artificial Sequence: Synthetic polypeptide
MPAAKRVKLDGGDKKYSIGLDIGTNSVGWAVITDEYKVPSKKFKVLGNTDRHSIKKNLIGALLFDSGETAEATRLKRTARRRYTRRKNRICYLQEIFSNEMAKVDDSFFHRLEESFLVEEDKKHERHPIFGNIVDEVAYHEKYPTIYHLRKKLVDSTDKADLRLIYLALAHMIKFRGHFLIEGDLNPDNSDVDKLFIQLVQTYNQLFEENPINASGVDAKAILSARLSKSRRLENLIAQLPGEKKNGLFGNLIALSLGLTPNFKSNFDLAEDAKLQLSKDTYDDDLDNLLAQIGDQYADLFLAAKNLSDAILLSDILRVNTEITKAPLSASMIKRYDEHHQDLTLLKALVRQQLPEKYKEIFFDQSKNGYAGYIDGGASQEEFYKFIKPILEKMDGTEELLVKLNREDLLRKQRTFDNGSIPHQIHLGELHAILRRQEDFYPFLKDNREKIEKILTFRIPYYVGPLARGNSRFAWMTRKSEETITPWNFEEVVDKGASAQSFIERMTNFDKNLPNEKVLPKHSLLYEYFTVYNELTKVKYVTEGMRKPAFLSGEQKKAIVDLLFKTNRKVTVKQLKEDYFKKIECFDSVEISGVEDRFNASLGTYHDLLKIIKDKDFLDNEENEDILEDIVLTLTLFEDREMIEERLKTYAHLFDDKVMKQLKRRRYTGWGRLSRKLINGIRDKQSGKTILDFLKSDGFANRNFMQLIHDDSLTFKEDIQKAQVSGQGDSLHEHIANLAGSPAIKKGILQTVKVVDELVKVMGRHKPENIVIEMARENQTTQKGQKNSRERMKRIEEGIKELGSQILKEHPVENTQLQNEKLYLYYLQNGRDMYVDQELDINRLSDYDVDHIVPQSFLKDDSIDNKVLTRSDKARGKSDNVPSEEVVKKMKNYWRQLLNAKLITQRKFDNLTKAERGGLSELDKAGFIKRQLVETRQITKHVAQILDSRMNTKYDENDKLIREVKVITLKSKLVSDFRKDFQFYKVREINNYHHAHDAYLNAVVGTALIKKYPKLESEFVYGDYKVYDVRKMIAKSEQEIGKATAKYFFYSNIMNFFKTEITLANGEIRKRPLIETNGETGEIVWDKGRDFATVRKVLSMPQVNIVKKTEVQTGGFSKESILPKRNSDKLIARKKDWDPKKYGGFDSPTVAYSVLVVAKVEKGKSKKLKSVKELLGITIMERSSFEKNPIDFLEAKGYKEVKKDLIIKLPKYSLFELENGRKRMLASAGELQKGNELALPSKYVNFLYLASHYEKLKGSPEDNEQKQLFVEQHKHYLDEIIEQISEFSKRVILADANLDKVLSAYNKHRDKPIREQAENIIHLFTLTNLGAPAAFKYFDTTIDRKRYTSTKEVLDATLIHQSITGLYETRIDLSQLGGDGGGGGGGGGGTAPLEEEYRLFLEAPIQNVTLLEQWKREIPKVWAEINPPGLASTQAPIHVQLLSTALPVRVRQYPITLEAKRSLRETIRKFRAAGILRPVHSPWNTPLLPVRKSGTSEYRMVQDLREVNKRVETIHPTVPNPYTLLSLLPPDRIWYSVLDLKDAFFCIPLAPESQLIFAFEWADAEEGESGQLTWTRLPQGFKNSPTLFNEALNRDLQGFRLDHPSVSLLQYVDDLLIAADTQAACLSATRDLLMTLAELGYRVSGKKAQLCQEEVTYLGFKIHKGSRSLSNSRTQAILQIPVPKTKRQVREFLGKIGYCRLFIPGFAELAQPLYAATRPGNDPLVWGEKEEEAFQSLKLALTQPPALALPSLDKPFQLFVEETSGAAKGVLTQALGPWKRPVAYLSKRLDPVAAGWPRCLRAIAAAALLTREASKLTFGQDIEITSSHNLESLLRSPPDKWLTNARITQYQVLLLDPPRVRFKQTAALNPATLLPETDDTLPIHHCLDTLDSLTSTRPDLTDQPLAQAEATLFTDGSSYIRDGKRYAGAAVVTLDSVIWAEPLPIGTSAQKAELIALTKALEWSKDKSVNIYTDSRYAFATLHVHGMIYRERGWLTAGGKAIKNAPEILALLTAVWLPKRVAVMHCKGHQKDDAPTSTGNRRADEVAREVAIRPLSTQATISAGKRTADGSEFEKRTADGSEFESPKKKAKVE

SEQ ID NO: 1397 - protein, 2093 aa, synthetic construct
  source 1..2093: note = Description of Artificial Sequence: Synthetic polypeptide
MPAAKRVKLDGGDKKYSIGLDIGTNSVGWAVITDEYKVPSKKFKVLGNTDRHSIKKNLIGALLFDSGETAEATRLKRTARRRYTRRKNRICYLQEIFSNEMAKVDDSFFHRLEESFLVEEDKKHERHPIFGNIVDEVAYHEKYPTIYHLRKKLVDSTDKADLRLIYLALAHMIKFRGHFLIEGDLNPDNSDVDKLFIQLVQTYNQLFEENPINASGVDAKAILSARLSKSRRLENLIAQLPGEKKNGLFGNLIALSLGLTPNFKSNFDLAEDAKLQLSKDTYDDDLDNLLAQIGDQYADLFLAAKNLSDAILLSDILRVNTEITKAPLSASMIKRYDEHHQDLTLLKALVRQQLPEKYKEIFFDQSKNGYAGYIDGGASQEEFYKFIKPILEKMDGTEELLVKLNREDLLRKQRTFDNGSIPHQIHLGELHAILRRQEDFYPFLKDNREKIEKILTFRIPYYVGPLARGNSRFAWMTRKSEETITPWNFEEVVDKGASAQSFIERMTNFDKNLPNEKVLPKHSLLYEYFTVYNELTKVKYVTEGMRKPAFLSGEQKKAIVDLLFKTNRKVTVKQLKEDYFKKIECFDSVEISGVEDRFNASLGTYHDLLKIIKDKDFLDNEENEDILEDIVLTLTLFEDREMIEERLKTYAHLFDDKVMKQLKRRRYTGWGRLSRKLINGIRDKQSGKTILDFLKSDGFANRNFMQLIHDDSLTFKEDIQKAQVSGQGDSLHEHIANLAGSPAIKKGILQTVKVVDELVKVMGRHKPENIVIEMARENQTTQKGQKNSRERMKRIEEGIKELGSQILKEHPVENTQLQNEKLYLYYLQNGRDMYVDQELDINRLSDYDVDHIVPQSFLKDDSIDNKVLTRSDKARGKSDNVPSEEVVKKMKNYWRQLLNAKLITQRKFDNLTKAERGGLSELDKAGFIKRQLVETRQITKHVAQILDSRMNTKYDENDKLIREVKVITLKSKLVSDFRKDFQFYKVREINNYHHAHDAYLNAVVGTALIKKYPKLESEFVYGDYKVYDVRKMIAKSEQEIGKATAKYFFYSNIMNFFKTEITLANGEIRKRPLIETNGETGEIVWDKGRDFATVRKVLSMPQVNIVKKTEVQTGGFSKESILPKRNSDKLIARKKDWDPKKYGGFDSPTVAYSVLVVAKVEKGKSKKLKSVKELLGITIMERSSFEKNPIDFLEAKGYKEVKKDLIIKLPKYSLFELENGRKRMLASAGELQKGNELALPSKYVNFLYLASHYEKLKGSPEDNEQKQLFVEQHKHYLDEIIEQISEFSKRVILADANLDKVLSAYNKHRDKPIREQAENIIHLFTLTNLGAPAAFKYFDTTIDRKRYTSTKEVLDATLIHQSITGLYETRIDLSQLGGDGGGGGPAPGGTAPLEEEYRLFLEAPIQNVTLLEQWKREIPKVWAEINPPGLASTQAPIHVQLLSTALPVRVRQYPITLEAKRSLRETIRKFRAAGILRPVHSPWNTPLLPVRKSGTSEYRMVQDLREVNKRVETIHPTVPNPYTLLSLLPPDRIWYSVLDLKDAFFCIPLAPESQLIFAFEWADAEEGESGQLTWTRLPQGFKNSPTLFNEALNRDLQGFRLDHPSVSLLQYVDDLLIAADTQAACLSATRDLLMTLAELGYRVSGKKAQLCQEEVTYLGFKIHKGSRSLSNSRTQAILQIPVPKTKRQVREFLGKIGYCRLFIPGFAELAQPLYAATRPGNDPLVWGEKEEEAFQSLKLALTQPPALALPSLDKPFQLFVEETSGAAKGVLTQALGPWKRPVAYLSKRLDPVAAGWPRCLRAIAAAALLTREASKLTFGQDIEITSSHNLESLLRSPPDKWLTNARITQYQVLLLDPPRVRFKQTAALNPATLLPETDDTLPIHHCLDTLDSLTSTRPDLTDQPLAQAEATLFTDGSSYIRDGKRYAGAAVVTLDSVIWAEPLPIGTSAQKAELIALTKALEWSKDKSVNIYTDSRYAFATLHVHGMIYRERGWLTAGGKAIKNAPEILALLTAVWLPKRVAVMHCKGHQKDDAPTSTGNRRADEVAREVAIRPLSTQATISAGKRTADGSEFEKRTADGSEFESPKKKAKVE

SEQ ID NO: 1398 - protein, 2099 aa, synthetic construct
  source 1..2099: note = Description of Artificial Sequence: Synthetic polypeptide
MPAAKRVKLDGGDKKYSIGLDIGTNSVGWAVITDEYKVPSKKFKVLGNTDRHSIKKNLIGALLFDSGETAEATRLKRTARRRYTRRKNRICYLQEIFSNEMAKVDDSFFHRLEESFLVEEDKKHERHPIFGNIVDEVAYHEKYPTIYHLRKKLVDSTDKADLRLIYLALAHMIKFRGHFLIEGDLNPDNSDVDKLFIQLVQTYNQLFEENPINASGVDAKAILSARLSKSRRLENLIAQLPGEKKNGLFGNLIALSLGLTPNFKSNFDLAEDAKLQLSKDTYDDDLDNLLAQIGDQYADLFLAAKNLSDAILLSDILRVNTEITKAPLSASMIKRYDEHHQDLTLLKALVRQQLPEKYKEIFFDQSKNGYAGYIDGGASQEEFYKFIKPILEKMDGTEELLVKLNREDLLRKQRTFDNGSIPHQIHLGELHAILRRQEDFYPFLKDNREKIEKILTFRIPYYVGPLARGNSRFAWMTRKSEETITPWNFEEVVDKGASAQSFIERMTNFDKNLPNEKVLPKHSLLYEYFTVYNELTKVKYVTEGMRKPAFLSGEQKKAIVDLLFKTNRKVTVKQLKEDYFKKIECFDSVEISGVEDRFNASLGTYHDLLKIIKDKDFLDNEENEDILEDIVLTLTLFEDREMIEERLKTYAHLFDDKVMKQLKRRRYTGWGRLSRKLINGIRDKQSGKTILDFLKSDGFANRNFMQLIHDDSLTFKEDIQKAQVSGQGDSLHEHIANLAGSPAIKKGILQTVKVVDELVKVMGRHKPENIVIEMARENQTTQKGQKNSRERMKRIEEGIKELGSQILKEHPVENTQLQNEKLYLYYLQNGRDMYVDQELDINRLSDYDVDHIVPQSFLKDDSIDNKVLTRSDKARGKSDNVPSEEVVKKMKNYWRQLLNAKLITQRKFDNLTKAERGGLSELDKAGFIKRQLVETRQITKHVAQILDSRMNTKYDENDKLIREVKVITLKSKLVSDFRKDFQFYKVREINNYHHAHDAYLNAVVGTALIKKYPKLESEFVYGDYKVYDVRKMIAKSEQEIGKATAKYFFYSNIMNFFKTEITLANGEIRKRPLIETNGETGEIVWDKGRDFATVRKVLSMPQVNIVKKTEVQTGGFSKESILPKRNSDKLIARKKDWDPKKYGGFDSPTVAYSVLVVAKVEKGKSKKLKSVKELLGITIMERSSFEKNPIDFLEAKGYKEVKKDLIIKLPKYSLFELENGRKRMLASAGELQKGNELALPSKYVNFLYLASHYEKLKGSPEDNEQKQLFVEQHKHYLDEIIEQISEFSKRVILADANLDKVLSAYNKHRDKPIREQAENIIHLFTLTNLGAPAAFKYFDTTIDRKRYTSTKEVLDATLIHQSITGLYETRIDLSQLGGDGGGGSGGSGGSGGSGGTAPLEEEYRLFLEAPIQNVTLLEQWKREIPKVWAEINPPGLASTQAPIHVQLLSTALPVRVRQYPITLEAKRSLRETIRKFRAAGILRPVHSPWNTPLLPVRKSGTSEYRMVQDLREVNKRVETIHPTVPNPYTLLSLLPPDRIWYSVLDLKDAFFCIPLAPESQLIFAFEWADAEEGESGQLTWTRLPQGFKNSPTLFNEALNRDLQGFRLDHPSVSLLQYVDDLLIAADTQAACLSATRDLLMTLAELGYRVSGKKAQLCQEEVTYLGFKIHKGSRSLSNSRTQAILQIPVPKTKRQVREFLGKIGYCRLFIPGFAELAQPLYAATRPGNDPLVWGEKEEEAFQSLKLALTQPPALALPSLDKPFQLFVEETSGAAKGVLTQALGPWKRPVAYLSKRLDPVAAGWPRCLRAIAAAALLTREASKLTFGQDIEITSSHNLESLLRSPPDKWLTNARITQYQVLLLDPPRVRFKQTAALNPATLLPETDDTLPIHHCLDTLDSLTSTRPDLTDQPLAQAEATLFTDGSSYIRDGKRYAGAAVVTLDSVIWAEPLPIGTSAQKAELIALTKALEWSKDKSVNIYTDSRYAFATLHVHGMIYRERGWLTAGGKAIKNAPEILALLTAVWLPKRVAVMHCKGHQKDDAPTSTGNRRADEVAREVAIRPLSTQATISAGKRTADGSEFEKRTADGSEFESPKKKAKVE

SEQ ID NO: 1399 - protein, 2102 aa, synthetic construct
  source 1..2102: note = Description of Artificial Sequence: Synthetic polypeptide
MPAAKRVKLDGGDKKYSIGLDIGTNSVGWAVITDEYKVPSKKFKVLGNTDRHSIKKNLIGALLFDSGETAEATRLKRTARRRYTRRKNRICYLQEIFSNEMAKVDDSFFHRLEESFLVEEDKKHERHPIFGNIVDEVAYHEKYPTIYHLRKKLVDSTDKADLRLIYLALAHMIKFRGHFLIEGDLNPDNSDVDKLFIQLVQTYNQLFEENPINASGVDAKAILSARLSKSRRLENLIAQLPGEKKNGLFGNLIALSLGLTPNFKSNFDLAEDAKLQLSKDTYDDDLDNLLAQIGDQYADLFLAAKNLSDAILLSDILRVNTEITKAPLSASMIKRYDEHHQDLTLLKALVRQQLPEKYKEIFFDQSKNGYAGYIDGGASQEEFYKFIKPILEKMDGTEELLVKLNREDLLRKQRTFDNGSIPHQIHLGELHAILRRQEDFYPFLKDNREKIEKILTFRIPYYVGPLARGNSRFAWMTRKSEETITPWNFEEVVDKGASAQSFIERMTNFDKNLPNEKVLPKHSLLYEYFTVYNELTKVKYVTEGMRKPAFLSGEQKKAIVDLLFKTNRKVTVKQLKEDYFKKIECFDSVEISGVEDRFNASLGTYHDLLKIIKDKDFLDNEENEDILEDIVLTLTLFEDREMIEERLKTYAHLFDDKVMKQLKRRRYTGWGRLSRKLINGIRDKQSGKTILDFLKSDGFANRNFMQLIHDDSLTFKEDIQKAQVSGQGDSLHEHIANLAGSPAIKKGILQTVKVVDELVKVMGRHKPENIVIEMARENQTTQKGQKNSRERMKRIEEGIKELGSQILKEHPVENTQLQNEKLYLYYLQNGRDMYVDQELDINRLSDYDVDHIVPQSFLKDDSIDNKVLTRSDKARGKSDNVPSEEVVKKMKNYWRQLLNAKLITQRKFDNLTKAERGGLSELDKAGFIKRQLVETRQITKHVAQILDSRMNTKYDENDKLIREVKVITLKSKLVSDFRKDFQFYKVREINNYHHAHDAYLNAVVGTALIKKYPKLESEFVYGDYKVYDVRKMIAKSEQEIGKATAKYFFYSNIMNFFKTEITLANGEIRKRPLIETNGETGEIVWDKGRDFATVRKVLSMPQVNIVKKTEVQTGGFSKESILPKRNSDKLIARKKDWDPKKYGGFDSPTVAYSVLVVAKVEKGKSKKLKSVKELLGITIMERSSFEKNPIDFLEAKGYKEVKKDLIIKLPKYSLFELENGRKRMLASAGELQKGNELALPSKYVNFLYLASHYEKLKGSPEDNEQKQLFVEQHKHYLDEIIEQISEFSKRVILADANLDKVLSAYNKHRDKPIREQAENIIHLFTLTNLGAPAAFKYFDTTIDRKRYTSTKEVLDATLIHQSITGLYETRIDLSQLGGDGGEAAAKGGGGSEAAAKGGTAPLEEEYRLFLEAPIQNVTLLEQWKREIPKVWAEINPPGLASTQAPIHVQLLSTALPVRVRQYPITLEAKRSLRETIRKFRAAGILRPVHSPWNTPLLPVRKSGTSEYRMVQDLREVNKRVETIHPTVPNPYTLLSLLPPDRIWYSVLDLKDAFFCIPLAPESQLIFAFEWADAEEGESGQLTWTRLPQGFKNSPTLFNEALNRDLQGFRLDHPSVSLLQYVDDLLIAADTQAACLSATRDLLMTLAELGYRVSGKKAQLCQEEVTYLGFKIHKGSRSLSNSRTQAILQIPVPKTKRQVREFLGKIGYCRLFIPGFAELAQPLYAATRPGNDPLVWGEKEEEAFQSLKLALTQPPALALPSLDKPFQLFVEETSGAAKGVLTQALGPWKRPVAYLSKRLDPVAAGWPRCLRAIAAAALLTREASKLTFGQDIEITSSHNLESLLRSPPDKWLTNARITQYQVLLLDPPRVRFKQTAALNPATLLPETDDTLPIHHCLDTLDSLTSTRPDLTDQPLAQAEATLFTDGSSYIRDGKRYAGAAVVTLDSVIWAEPLPIGTSAQKAELIALTKALEWSKDKSVNIYTDSRYAFATLHVHGMIYRERGWLTAGGKAIKNAPEILALLTAVWLPKRVAVMHCKGHQKDDAPTSTGNRRADEVAREVAIRPLSTQATISAGKRTADGSEFEKRTADGSEFESPKKKAKVE

SEQ ID NO: 1400 - protein, 2112 aa, synthetic construct
  source 1..2112: note = Description of Artificial Sequence: Synthetic polypeptide
MPAAKRVKLDGGDKKYSIGLDIGTNSVGWAVITDEYKVPSKKFKVLGNTDRHSIKKNLIGALLFDSGETAEATRLKRTARRRYTRRKNRICYLQEIFSNEMAKVDDSFFHRLEESFLVEEDKKHERHPIFGNIVDEVAYHEKYPTIYHLRKKLVDSTDKADLRLIYLALAHMIKFRGHFLIEGDLNPDNSDVDKLFIQLVQTYNQLFEENPINASGVDAKAILSARLSKSRRLENLIAQLPGEKKNGLFGNLIALSLGLTPNFKSNFDLAEDAKLQLSKDTYDDDLDNLLAQIGDQYADLFLAAKNLSDAILLSDILRVNTEITKAPLSASMIKRYDEHHQDLTLLKALVRQQLPEKYKEIFFDQSKNGYAGYIDGGASQEEFYKFIKPILEKMDGTEELLVKLNREDLLRKQRTFDNGSIPHQIHLGELHAILRRQEDFYPFLKDNREKIEKILTFRIPYYVGPLARGNSRFAWMTRKSEETITPWNFEEVVDKGASAQSFIERMTNFDKNLPNEKVLPKHSLLYEYFTVYNELTKVKYVTEGMRKPAFLSGEQKKAIVDLLFKTNRKVTVKQLKEDYFKKIECFDSVEISGVEDRFNASLGTYHDLLKIIKDKDFLDNEENEDILEDIVLTLTLFEDREMIEERLKTYAHLFDDKVMKQLKRRRYTGWGRLSRKLINGIRDKQSGKTILDFLKSDGFANRNFMQLIHDDSLTFKEDIQKAQVSGQGDSLHEHIANLAGSPAIKKGILQTVKVVDELVKVMGRHKPENIVIEMARENQTTQKGQKNSRERMKRIEEGIKELGSQILKEHPVENTQLQNEKLYLYYLQNGRDMYVDQELDINRLSDYDVDHIVPQSFLKDDSIDNKVLTRSDKARGKSDNVPSEEVVKKMKNYWRQLLNAKLITQRKFDNLTKAERGGLSELDKAGFIKRQLVETRQITKHVAQILDSRMNTKYDENDKLIREVKVITLKSKLVSDFRKDFQFYKVREINNYHHAHDAYLNAVVGTALIKKYPKLESEFVYGDYKVYDVRKMIAKSEQEIGKATAKYFFYSNIMNFFKTEITLANGEIRKRPLIETNGETGEIVWDKGRDFATVRKVLSMPQVNIVKKTEVQTGGFSKESILPKRNSDKLIARKKDWDPKKYGGFDSPTVAYSVLVVAKVEKGKSKKLKSVKELLGITIMERSSFEKNPIDFLEAKGYKEVKKDLIIKLPKYSLFELENGRKRMLASAGELQKGNELALPSKYVNFLYLASHYEKLKGSPEDNEQKQLFVEQHKHYLDEIIEQISEFSKRVILADANLDKVLSAYNKHRDKPIREQAENIIHLFTLTNLGAPAAFKYFDTTIDRKRYTSTKEVLDATLIHQSITGLYETRIDLSQLGGDGGEAAAKEAAAKEAAAKEAAAKEAAAKGGTAPLEEEYRLFLEAPIQNVTLLEQWKREIPKVWAEINPPGLASTQAPIHVQLLSTALPVRVRQYPITLEAKRSLRETIRKFRAAGILRPVHSPWNTPLLPVRKSGTSEYRMVQDLREVNKRVETIHPTVPNPYTLLSLLPPDRIWYSVLDLKDAFFCIPLAPESQLIFAFEWADAEEGESGQLTWTRLPQGFKNSPTLFNEALNRDLQGFRLDHPSVSLLQYVDDLLIAADTQAACLSATRDLLMTLAELGYRVSGKKAQLCQEEVTYLGFKIHKGSRSLSNSRTQAILQIPVPKTKRQVREFLGKIGYCRLFIPGFAELAQPLYAATRPGNDPLVWGEKEEEAFQSLKLALTQPPALALPSLDKPFQLFVEETSGAAKGVLTQALGPWKRPVAYLSKRLDPVAAGWPRCLRAIAAAALLTREASKLTFGQDIEITSSHNLESLLRSPPDKWLTNARITQYQVLLLDPPRVRFKQTAALNPATLLPETDDTLPIHHCLDTLDSLTSTRPDLTDQPLAQAEATLFTDGSSYIRDGKRYAGAAVVTLDSVIWAEPLPIGTSAQKAELIALTKALEWSKDKSVNIYTDSRYAFATLHVHGMIYRERGWLTAGGKAIKNAPEILALLTAVWLPKRVAVMHCKGHQKDDAPTSTGNRRADEVAREVAIRPLSTQATISAGKRTADGSEFEKRTADGSEFESPKKKAKVE

SEQ ID NO: 1401 - protein, 2096 aa, synthetic construct
  source 1..2096: note = Description of Artificial Sequence: Synthetic polypeptide
MPAAKRVKLDGGDKKYSIGLDIGTNSVGWAVITDEYKVPSKKFKVLGNTDRHSIKKNLIGALLFDSGETAEATRLKRTARRRYTRRKNRICYLQEIFSNEMAKVDDSFFHRLEESFLVEEDKKHERHPIFGNIVDEVAYHEKYPTIYHLRKKLVDSTDKADLRLIYLALAHMIKFRGHFLIEGDLNPDNSDVDKLFIQLVQTYNQLFEENPINASGVDAKAILSARLSKSRRLENLIAQLPGEKKNGLFGNLIALSLGLTPNFKSNFDLAEDAKLQLSKDTYDDDLDNLLAQIGDQYADLFLAAKNLSDAILLSDILRVNTEITKAPLSASMIKRYDEHHQDLTLLKALVRQQLPEKYKEIFFDQSKNGYAGYIDGGASQEEFYKFIKPILEKMDGTEELLVKLNREDLLRKQRTFDNGSIPHQIHLGELHAILRRQEDFYPFLKDNREKIEKILTFRIPYYVGPLARGNSRFAWMTRKSEETITPWNFEEVVDKGASAQSFIERMTNFDKNLPNEKVLPKHSLLYEYFTVYNELTKVKYVTEGMRKPAFLSGEQKKAIVDLLFKTNRKVTVKQLKEDYFKKIECFDSVEISGVEDRFNASLGTYHDLLKIIKDKDFLDNEENEDILEDIVLTLTLFEDREMIEERLKTYAHLFDDKVMKQLKRRRYTGWGRLSRKLINGIRDKQSGKTILDFLKSDGFANRNFMQLIHDDSLTFKEDIQKAQVSGQGDSLHEHIANLAGSPAIKKGILQTVKVVDELVKVMGRHKPENIVIEMARENQTTQKGQKNSRERMKRIEEGIKELGSQILKEHPVENTQLQNEKLYLYYLQNGRDMYVDQELDINRLSDYDVDHIVPQSFLKDDSIDNKVLTRSDKARGKSDNVPSEEVVKKMKNYWRQLLNAKLITQRKFDNLTKAERGGLSELDKAGFIKRQLVETRQITKHVAQILDSRMNTKYDENDKLIREVKVITLKSKLVSDFRKDFQFYKVREINNYHHAHDAYLNAVVGTALIKKYPKLESEFVYGDYKVYDVRKMIAKSEQEIGKATAKYFFYSNIMNFFKTEITLANGEIRKRPLIETNGETGEIVWDKGRDFATVRKVLSMPQVNIVKKTEVQTGGFSKESILPKRNSDKLIARKKDWDPKKYGGFDSPTVAYSVLVVAKVEKGKSKKLKSVKELLGITIMERSSFEKNPIDFLEAKGYKEVKKDLIIKLPKYSLFELENGRKRMLASAGELQKGNELALPSKYVNFLYLASHYEKLKGSPEDNEQKQLFVEQHKHYLDEIIEQISEFSKRVILADANLDKVLSAYNKHRDKPIREQAENIIHLFTLTNLGAPAAFKYFDTTIDRKRYTSTKEVLDATLIHQSITGLYETRIDLSQLGGDGGPAPGSSGGSGGTAPLEEEYRLFLEAPIQNVTLLEQWKREIPKVWAEINPPGLASTQAPIHVQLLSTALPVRVRQYPITLEAKRSLRETIRKFRAAGILRPVHSPWNTPLLPVRKSGTSEYRMVQDLREVNKRVETIHPTVPNPYTLLSLLPPDRIWYSVLDLKDAFFCIPLAPESQLIFAFEWADAEEGESGQLTWTRLPQGFKNSPTLFNEALNRDLQGFRLDHPSVSLLQYVDDLLIAADTQAACLSATRDLLMTLAELGYRVSGKKAQLCQEEVTYLGFKIHKGSRSLSNSRTQAILQIPVPKTKRQVREFLGKIGYCRLFIPGFAELAQPLYAATRPGNDPLVWGEKEEEAFQSLKLALTQPPALALPSLDKPFQLFVEETSGAAKGVLTQALGPWKRPVAYLSKRLDPVAAGWPRCLRAIAAAALLTREASKLTFGQDIEITSSHNLESLLRSPPDKWLTNARITQYQVLLLDPPRVRFKQTAALNPATLLPETDDTLPIHHCLDTLDSLTSTRPDLTDQPLAQAEATLFTDGSSYIRDGKRYAGAAVVTLDSVIWAEPLPIGTSAQKAELIALTKALEWSKDKSVNIYTDSRYAFATLHVHGMIYRERGWLTAGGKAIKNAPEILALLTAVWLPKRVAVMHCKGHQKDDAPTSTGNRRADEVAREVAIRPLSTQATISAGKRTADGSEFEKRTADGSEFESPKKKAKVE

SEQ ID NO: 1402 - protein, 2096 aa, synthetic construct
  source 1..2096: note = Description of Artificial Sequence: Synthetic polypeptide
MPAAKRVKLDGGDKKYSIGLDIGTNSVGWAVITDEYKVPSKKFKVLGNTDRHSIKKNLIGALLFDSGETAEATRLKRTARRRYTRRKNRICYLQEIFSNEMAKVDDSFFHRLEESFLVEEDKKHERHPIFGNIVDEVAYHEKYPTIYHLRKKLVDSTDKADLRLIYLALAHMIKFRGHFLIEGDLNPDNSDVDKLFIQLVQTYNQLFEENPINASGVDAKAILSARLSKSRRLENLIAQLPGEKKNGLFGNLIALSLGLTPNFKSNFDLAEDAKLQLSKDTYDDDLDNLLAQIGDQYADLFLAAKNLSDAILLSDILRVNTEITKAPLSASMIKRYDEHHQDLTLLKALVRQQLPEKYKEIFFDQSKNGYAGYIDGGASQEEFYKFIKPILEKMDGTEELLVKLNREDLLRKQRTFDNGSIPHQIHLGELHAILRRQEDFYPFLKDNREKIEKILTFRIPYYVGPLARGNSRFAWMTRKSEETITPWNFEEVVDKGASAQSFIERMTNFDKNLPNEKVLPKHSLLYEYFTVYNELTKVKYVTEGMRKPAFLSGEQKKAIVDLLFKTNRKVTVKQLKEDYFKKIECFDSVEISGVEDRFNASLGTYHDLLKIIKDKDFLDNEENEDILEDIVLTLTLFEDREMIEERLKTYAHLFDDKVMKQLKRRRYTGWGRLSRKLINGIRDKQSGKTILDFLKSDGFANRNFMQLIHDDSLTFKEDIQKAQVSGQGDSLHEHIANLAGSPAIKKGILQTVKVVDELVKVMGRHKPENIVIEMARENQTTQKGQKNSRERMKRIEEGIKELGSQILKEHPVENTQLQNEKLYLYYLQNGRDMYVDQELDINRLSDYDVDHIVPQSFLKDDSIDNKVLTRSDKARGKSDNVPSEEVVKKMKNYWRQLLNAKLITQRKFDNLTKAERGGLSELDKAGFIKRQLVETRQITKHVAQILDSRMNTKYDENDKLIREVKVITLKSKLVSDFRKDFQFYKVREINNYHHAHDAYLNAVVGTALIKKYPKLESEFVYGDYKVYDVRKMIAKSEQEIGKATAKYFFYSNIMNFFKTEITLANGEIRKRPLIETNGETGEIVWDKGRDFATVRKVLSMPQVNIVKKTEVQTGGFSKESILPKRNSDKLIARKKDWDPKKYGGFDSPTVAYSVLVVAKVEKGKSKKLKSVKELLGITIMERSSFEKNPIDFLEAKGYKEVKKDLIIKLPKYSLFELENGRKRMLASAGELQKGNELALPSKYVNFLYLASHYEKLKGSPEDNEQKQLFVEQHKHYLDEIIEQISEFSKRVILADANLDKVLSAYNKHRDKPIREQAENIIHLFTLTNLGAPAAFKYFDTTIDRKRYTSTKEVLDATLIHQSITGLYETRIDLSQLGGDGGGGGPAPGGSGGTAPLEEEYRLFLEAPIQNVTLLEQWKREIPKVWAEINPPGLASTQAPIHVQLLSTALPVRVRQYPITLEAKRSLRETIRKFRAAGILRPVHSPWNTPLLPVRKSGTSEYRMVQDLREVNKRVETIHPTVPNPYTLLSLLPPDRIWYSVLDLKDAFFCIPLAPESQLIFAFEWADAEEGESGQLTWTRLPQGFKNSPTLFNEALNRDLQGFRLDHPSVSLLQYVDDLLIAADTQAACLSATRDLLMTLAELGYRVSGKKAQLCQEEVTYLGFKIHKGSRSLSNSRTQAILQIPVPKTKRQVREFLGKIGYCRLFIPGFAELAQPLYAATRPGNDPLVWGEKEEEAFQSLKLALTQPPALALPSLDKPFQLFVEETSGAAKGVLTQALGPWKRPVAYLSKRLDPVAAGWPRCLRAIAAAALLTREASKLTFGQDIEITSSHNLESLLRSPPDKWLTNARITQYQVLLLDPPRVRFKQTAALNPATLLPETDDTLPIHHCLDTLDSLTSTRPDLTDQPLAQAEATLFTDGSSYIRDGKRYAGAAVVTLDSVIWAEPLPIGTSAQKAELIALTKALEWSKDKSVNIYTDSRYAFATLHVHGMIYRERGWLTAGGKAIKNAPEILALLTAVWLPKRVAVMHCKGHQKDDAPTSTGNRRADEVAREVAIRPLSTQATISAGKRTADGSEFEKRTADGSEFESPKKKAKVE

SEQ ID NO: 1403 - protein, 2096 aa, synthetic construct
  source 1..2096: note = Description of Artificial Sequence: Synthetic polypeptide
MPAAKRVKLDGGDKKYSIGLDIGTNSVGWAVITDEYKVPSKKFKVLGNTDRHSIKKNLIGALLFDSGETAEATRLKRTARRRYTRRKNRICYLQEIFSNEMAKVDDSFFHRLEESFLVEEDKKHERHPIFGNIVDEVAYHEKYPTIYHLRKKLVDSTDKADLRLIYLALAHMIKFRGHFLIEGDLNPDNSDVDKLFIQLVQTYNQLFEENPINASGVDAKAILSARLSKSRRLENLIAQLPGEKKNGLFGNLIALSLGLTPNFKSNFDLAEDAKLQLSKDTYDDDLDNLLAQIGDQYADLFLAAKNLSDAILLSDILRVNTEITKAPLSASMIKRYDEHHQDLTLLKALVRQQLPEKYKEIFFDQSKNGYAGYIDGGASQEEFYKFIKPILEKMDGTEELLVKLNREDLLRKQRTFDNGSIPHQIHLGELHAILRRQEDFYPFLKDNREKIEKILTFRIPYYVGPLARGNSRFAWMTRKSEETITPWNFEEVVDKGASAQSFIERMTNFDKNLPNEKVLPKHSLLYEYFTVYNELTKVKYVTEGMRKPAFLSGEQKKAIVDLLFKTNRKVTVKQLKEDYFKKIECFDSVEISGVEDRFNASLGTYHDLLKIIKDKDFLDNEENEDILEDIVLTLTLFEDREMIEERLKTYAHLFDDKVMKQLKRRRYTGWGRLSRKLINGIRDKQSGKTILDFLKSDGFANRNFMQLIHDDSLTFKEDIQKAQVSGQGDSLHEHIANLAGSPAIKKGILQTVKVVDELVKVMGRHKPENIVIEMARENQTTQKGQKNSRERMKRIEEGIKELGSQILKEHPVENTQLQNEKLYLYYLQNGRDMYVDQELDINRLSDYDVDHIVPQSFLKDDSIDNKVLTRSDKARGKSDNVPSEEVVKKMKNYWRQLLNAKLITQRKFDNLTKAERGGLSELDKAGFIKRQLVETRQITKHVAQILDSRMNTKYDENDKLIREVKVITLKSKLVSDFRKDFQFYKVREINNYHHAHDAYLNAVVGTALIKKYPKLESEFVYGDYKVYDVRKMIAKSEQEIGKATAKYFFYSNIMNFFKTEITLANGEIRKRPLIETNGETGEIVWDKGRDFATVRKVLSMPQVNIVKKTEVQTGGFSKESILPKRNSDKLIARKKDWDPKKYGGFDSPTVAYSVLVVAKVEKGKSKKLKSVKELLGITIMERSSFEKNPIDFLEAKGYKEVKKDLIIKLPKYSLFELENGRKRMLASAGELQKGNELALPSKYVNFLYLASHYEKLKGSPEDNEQKQLFVEQHKHYLDEIIEQISEFSKRVILADANLDKVLSAYNKHRDKPIREQAENIIHLFTLTNLGAPAAFKYFDTTIDRKRYTSTKEVLDATLIHQSITGLYETRIDLSQLGGDGGPAPGGSGGGGGTAPLEEEYRLFLEAPIQNVTLLEQWKREIPKVWAEINPPGLASTQAPIHVQLLSTALPVRVRQYPITLEAKRSLRETIRKFRAAGILRPVHSPWNTPLLPVRKSGTSEYRMVQDLREVNKRVETIHPTVPNPYTLLSLLPPDRIWYSVLDLKDAFFCIPLAPESQLIFAFEWADAEEGESGQLTWTRLPQGFKNSPTLFNEALNRDLQGFRLDHPSVSLLQYVDDLLIAADTQAACLSATRDLLMTLAELGYRVSGKKAQLCQEEVTYLGFKIHKGSRSLSNSRTQAILQIPVPKTKRQVREFLGKIGYCRLFIPGFAELAQPLYAATRPGNDPLVWGEKEEEAFQSLKLALTQPPALALPSLDKPFQLFVEETSGAAKGVLTQALGPWKRPVAYLSKRLDPVAAGWPRCLRAIAAAALLTREASKLTFGQDIEITSSHNLESLLRSPPDKWLTNARITQYQVLLLDPPRVRFKQTAALNPATLLPETDDTLPIHHCLDTLDSLTSTRPDLTDQPLAQAEATLFTDGSSYIRDGKRYAGAAVVTLDSVIWAEPLPIGTSAQKAELIALTKALEWSKDKSVNIYTDSRYAFATLHVHGMIYRERGWLTAGGKAIKNAPEILALLTAVWLPKRVAVMHCKGHQKDDAPTSTGNRRADEVAREVAIRPLSTQATISAGKRTADGSEFEKRTADGSEFESPKKKAKVE

SEQ ID NO: 1404 - protein, 2098 aa, synthetic construct
  source 1..2098: note = Description of Artificial Sequence: Synthetic polypeptide
MPAAKRVKLDGGDKKYSIGLDIGTNSVGWAVITDEYKVPSKKFKVLGNTDRHSIKKNLIGALLFDSGETAEATRLKRTARRRYTRRKNRICYLQEIFSNEMAKVDDSFFHRLEESFLVEEDKKHERHPIFGNIVDEVAYHEKYPTIYHLRKKLVDSTDKADLRLIYLALAHMIKFRGHFLIEGDLNPDNSDVDKLFIQLVQTYNQLFEENPINASGVDAKAILSARLSKSRRLENLIAQLPGEKKNGLFGNLIALSLGLTPNFKSNFDLAEDAKLQLSKDTYDDDLDNLLAQIGDQYADLFLAAKNLSDAILLSDILRVNTEITKAPLSASMIKRYDEHHQDLTLLKALVRQQLPEKYKEIFFDQSKNGYAGYIDGGASQEEFYKFIKPILEKMDGTEELLVKLNREDLLRKQRTFDNGSIPHQIHLGELHAILRRQEDFYPFLKDNREKIEKILTFRIPYYVGPLARGNSRFAWMTRKSEETITPWNFEEVVDKGASAQSFIERMTNFDKNLPNEKVLPKHSLLYEYFTVYNELTKVKYVTEGMRKPAFLSGEQKKAIVDLLFKTNRKVTVKQLKEDYFKKIECFDSVEISGVEDRFNASLGTYHDLLKIIKDKDFLDNEENEDILEDIVLTLTLFEDREMIEERLKTYAHLFDDKVMKQLKRRRYTGWGRLSRKLINGIRDKQSGKTILDFLKSDGFANRNFMQLIHDDSLTFKEDIQKAQVSGQGDSLHEHIANLAGSPAIKKGILQTVKVVDELVKVMGRHKPENIVIEMARENQTTQKGQKNSRERMKRIEEGIKELGSQILKEHPVENTQLQNEKLYLYYLQNGRDMYVDQELDINRLSDYDVDHIVPQSFLKDDSIDNKVLTRSDKARGKSDNVPSEEVVKKMKNYWRQLLNAKLITQRKFDNLTKAERGGLSELDKAGFIKRQLVETRQITKHVAQILDSRMNTKYDENDKLIREVKVITLKSKLVSDFRKDFQFYKVREINNYHHAHDAYLNAVVGTALIKKYPKLESEFVYGDYKVYDVRKMIAKSEQEIGKATAKYFFYSNIMNFFKTEITLANGEIRKRPLIETNGETGEIVWDKGRDFATVRKVLSMPQVNIVKKTEVQTGGFSKESILPKRNSDKLIARKKDWDPKKYGGFDSPTVAYSVLVVAKVEKGKSKKLKSVKELLGITIMERSSFEKNPIDFLEAKGYKEVKKDLIIKLPKYSLFELENGRKRMLASAGELQKGNELALPSKYVNFLYLASHYEKLKGSPEDNEQKQLFVEQHKHYLDEIIEQISEFSKRVILADANLDKVLSAYNKHRDKPIREQAENIIHLFTLTNLGAPAAFKYFDTTIDRKRYTSTKEVLDATLIHQSITGLYETRIDLSQLGGDGGGGGGSSEAAAKGGTAPLEEEYRLFLEAPIQNVTLLEQWKREIPKVWAEINPPGLASTQAPIHVQLLSTALPVRVRQYPITLEAKRSLRETIRKFRAAGILRPVHSPWNTPLLPVRKSGTSEYRMVQDLREVNKRVETIHPTVPNPYTLLSLLPPDRIWYSVLDLKDAFFCIPLAPESQLIFAFEWADAEEGESGQLTWTRLPQGFKNSPTLFNEALNRDLQGFRLDHPSVSLLQYVDDLLIAADTQAACLSATRDLLMTLAELGYRVSGKKAQLCQEEVTYLGFKIHKGSRSLSNSRTQAILQIPVPKTKRQVREFLGKIGYCRLFIPGFAELAQPLYAATRPGNDPLVWGEKEEEAFQSLKLALTQPPALALPSLDKPFQLFVEETSGAAKGVLTQALGPWKRPVAYLSKRLDPVAAGWPRCLRAIAAAALLTREASKLTFGQDIEITSSHNLESLLRSPPDKWLTNARITQYQVLLLDPPRVRFKQTAALNPATLLPETDDTLPIHHCLDTLDSLTSTRPDLTDQPLAQAEATLFTDGSSYIRDGKRYAGAAVVTLDSVIWAEPLPIGTSAQKAELIALTKALEWSKDKSVNIYTDSRYAFATLHVHGMIYRERGWLTAGGKAIKNAPEILALLTAVWLPKRVAVMHCKGHQKDDAPTSTGNRRADEVAREVAIRPLSTQATISAGKRTADGSEFEKRTADGSEFESPKKKAKVE

SEQ ID NO: 1405 - protein, 2095 aa, synthetic construct
  source 1..2095: note = Description of Artificial Sequence: Synthetic polypeptide
MPAAKRVKLDGGDKKYSIGLDIGTNSVGWAVITDEYKVPSKKFKVLGNTDRHSIKKNLIGALLFDSGETAEATRLKRTARRRYTRRKNRICYLQEIFSNEMAKVDDSFFHRLEESFLVEEDKKHERHPIFGNIVDEVAYHEKYPTIYHLRKKLVDSTDKADLRLIYLALAHMIKFRGHFLIEGDLNPDNSDVDKLFIQLVQTYNQLFEENPINASGVDAKAILSARLSKSRRLENLIAQLPGEKKNGLFGNLIALSLGLTPNFKSNFDLAEDAKLQLSKDTYDDDLDNLLAQIGDQYADLFLAAKNLSDAILLSDILRVNTEITKAPLSASMIKRYDEHHQDLTLLKALVRQQLPEKYKEIFFDQSKNGYAGYIDGGASQEEFYKFIKPILEKMDGTEELLVKLNREDLLRKQRTFDNGSIPHQIHLGELHAILRRQEDFYPFLKDNREKIEKILTFRIPYYVGPLARGNSRFAWMTRKSEETITPWNFEEVVDKGASAQSFIERMTNFDKNLPNEKVLPKHSLLYEYFTVYNELTKVKYVTEGMRKPAFLSGEQKKAIVDLLFKTNRKVTVKQLKEDYFKKIECFDSVEISGVEDRFNASLGTYHDLLKIIKDKDFLDNEENEDILEDIVLTLTLFEDREMIEERLKTYAHLFDDKVMKQLKRRRYTGWGRLSRKLINGIRDKQSGKTILDFLKSDGFANRNFMQLIHDDSLTFKEDIQKAQVSGQGDSLHEHIANLAGSPAIKKGILQTVKVVDELVKVMGRHKPENIVIEMARENQTTQKGQKNSRERMKRIEEGIKELGSQILKEHPVENTQLQNEKLYLYYLQNGRDMYVDQELDINRLSDYDVDHIVPQSFLKDDSIDNKVLTRSDKARGKSDNVPSEEVVKKMKNYWRQLLNAKLITQRKFDNLTKAERGGLSELDKAGFIKRQLVETRQITKHVAQILDSRMNTKYDENDKLIREVKVITLKSKLVSDFRKDFQFYKVREINNYHHAHDAYLNAVVGTALIKKYPKLESEFVYGDYKVYDVRKMIAKSEQEIGKATAKYFFYSNIMNFFKTEITLANGEIRKRPLIETNGETGEIVWDKGRDFATVRKVLSMPQVNIVKKTEVQTGGFSKESILPKRNSDKLIARKKDWDPKKYGGFDSPTVAYSVLVVAKVEKGKSKKLKSVKELLGITIMERSSFEKNPIDFLEAKGYKEVKKDLIIKLPKYSLFELENGRKRMLASAGELQKGNELALPSKYVNFLYLASHYEKLKGSPEDNEQKQLFVEQHKHYLDEIIEQISEFSKRVILADANLDKVLSAYNKHRDKPIREQAENIIHLFTLTNLGAPAAFKYFDTTIDRKRYTSTKEVLDATLIHQSITGLYETRIDLSQLGGDGGGSSEAAAKGGTAPLEEEYRLFLEAPIQNVTLLEQWKREIPKVWAEINPPGLASTQAPIHVQLLSTALPVRVRQYPITLEAKRSLRETIRKFRAAGILRPVHSPWNTPLLPVRKSGTSEYRMVQDLREVNKRVETIHPTVPNPYTLLSLLPPDRIWYSVLDLKDAFFCIPLAPESQLIFAFEWADAEEGESGQLTWTRLPQGFKNSPTLFNEALNRDLQGFRLDHPSVSLLQYVDDLLIAADTQAACLSATRDLLMTLAELGYRVSGKKAQLCQEEVTYLGFKIHKGSRSLSNSRTQAILQIPVPKTKRQVREFLGKIGYCRLFIPGFAELAQPLYAATRPGNDPLVWGEKEEEAFQSLKLALTQPPALALPSLDKPFQLFVEETSGAAKGVLTQALGPWKRPVAYLSKRLDPVAAGWPRCLRAIAAAALLTREASKLTFGQDIEITSSHNLESLLRSPPDKWLTNARITQYQVLLLDPPRVRFKQTAALNPATLLPETDDTLPIHHCLDTLDSLTSTRPDLTDQPLAQAEATLFTDGSSYIRDGKRYAGAAVVTLDSVIWAEPLPIGTSAQKAELIALTKALEWSKDKSVNIYTDSRYAFATLHVHGMIYRERGWLTAGGKAIKNAPEILALLTAVWLPKRVAVMHCKGHQKDDAPTSTGNRRADEVAREVAIRPLSTQATISAGKRTADGSEFEKRTADGSEFESPKKKAKVE

SEQ ID NO: 1406 - protein, 2098 aa, synthetic construct
  source 1..2098: note = Description of Artificial Sequence: Synthetic polypeptide
MPAAKRVKLDGGDKKYSIGLDIGTNSVGWAVITDEYKVPSKKFKVLGNTDRHSIKKNLIGALLFDSGETAEATRLKRTARRRYTRRKNRICYLQEIFSNEMAKVDDSFFHRLEESFLVEEDKKHERHPIFGNIVDEVAYHEKYPTIYHLRKKLVDSTDKADLRLIYLALAHMIKFRGHFLIEGDLNPDNSDVDKLFIQLVQTYNQLFEENPINASGVDAKAILSARLSKSRRLENLIAQLPGEKKNGLFGNLIALSLGLTPNFKSNFDLAEDAKLQLSKDTYDDDLDNLLAQIGDQYADLFLAAKNLSDAILLSDILRVNTEITKAPLSASMIKRYDEHHQDLTLLKALVRQQLPEKYKEIFFDQSKNGYAGYIDGGASQEEFYKFIKPILEKMDGTEELLVKLNREDLLRKQRTFDNGSIPHQIHLGELHAILRRQEDFYPFLKDNREKIEKILTFRIPYYVGPLARGNSRFAWMTRKSEETITPWNFEEVVDKGASAQSFIERMTNFDKNLPNEKVLPKHSLLYEYFTVYNELTKVKYVTEGMRKPAFLSGEQKKAIVDLLFKTNRKVTVKQLKEDYFKKIECFDSVEISGVEDRFNASLGTYHDLLKIIKDKDFLDNEENEDILEDIVLTLTLFEDREMIEERLKTYAHLFDDKVMKQLKRRRYTGWGRLSRKLINGIRDKQSGKTILDFLKSDGFANRNFMQLIHDDSLTFKEDIQKAQVSGQGDSLHEHIANLAGSPAIKKGILQTVKVVDELVKVMGRHKPENIVIEMARENQTTQKGQKNSRERMKRIEEGIKELGSQILKEHPVENTQLQNEKLYLYYLQNGRDMYVDQELDINRLSDYDVDHIVPQSFLKDDSIDNKVLTRSDKARGKSDNVPSEEVVKKMKNYWRQLLNAKLITQRKFDNLTKAERGGLSELDKAGFIKRQLVETRQITKHVAQILDSRMNTKYDENDKLIREVKVITLKSKLVSDFRKDFQFYKVREINNYHHAHDAYLNAVVGTALIKKYPKLESEFVYGDYKVYDVRKMIAKSEQEIGKATAKYFFYSNIMNFFKTEITLANGEIRKRPLIETNGETGEIVWDKGRDFATVRKVLSMPQVNIVKKTEVQTGGFSKESILPKRNSDKLIARKKDWDPKKYGGFDSPTVAYSVLVVAKVEKGKSKKLKSVKELLGITIMERSSFEKNPIDFLEAKGYKEVKKDLIIKLPKYSLFELENGRKRMLASAGELQKGNELALPSKYVNFLYLASHYEKLKGSPEDNEQKQLFVEQHKHYLDEIIEQISEFSKRVILADANLDKVLSAYNKHRDKPIREQAENIIHLFTLTNLGAPAAFKYFDTTIDRKRYTSTKEVLDATLIHQSITGLYETRIDLSQLGGDGGEAAAKGGSGSSGGTAPLEEEYRLFLEAPIQNVTLLEQWKREIPKVWAEINPPGLASTQAPIHVQLLSTALPVRVRQYPITLEAKRSLRETIRKFRAAGILRPVHSPWNTPLLPVRKSGTSEYRMVQDLREVNKRVETIHPTVPNPYTLLSLLPPDRIWYSVLDLKDAFFCIPLAPESQLIFAFEWADAEEGESGQLTWTRLPQGFKNSPTLFNEALNRDLQGFRLDHPSVSLLQYVDDLLIAADTQAACLSATRDLLMTLAELGYRVSGKKAQLCQEEVTYLGFKIHKGSRSLSNSRTQAILQIPVPKTKRQVREFLGKIGYCRLFIPGFAELAQPLYAATRPGNDPLVWGEKEEEAFQSLKLALTQPPALALPSLDKPFQLFVEETSGAAKGVLTQALGPWKRPVAYLSKRLDPVAAGWPRCLRAIAAAALLTREASKLTFGQDIEITSSHNLESLLRSPPDKWLTNARITQYQVLLLDPPRVRFKQTAALNPATLLPETDDTLPIHHCLDTLDSLTSTRPDLTDQPLAQAEATLFTDGSSYIRDGKRYAGAAVVTLDSVIWAEPLPIGTSAQKAELIALTKALEWSKDKSVNIYTDSRYAFATLHVHGMIYRERGWLTAGGKAIKNAPEILALLTAVWLPKRVAVMHCKGHQKDDAPTSTGNRRADEVAREVAIRPLSTQATISAGKRTADGSEFEKRTADGSEFESPKKKAKVE

SEQ ID NO: 1407 - protein, 2095 aa, synthetic construct
  source 1..2095: note = Description of Artificial Sequence: Synthetic polypeptide
MPAAKRVKLDGGDKKYSIGLDIGTNSVGWAVITDEYKVPSKKFKVLGNTDRHSIKKNLIGALLFDSGETAEATRLKRTARRRYTRRKNRICYLQEIFSNEMAKVDDSFFHRLEESFLVEEDKKHERHPIFGNIVDEVAYHEKYPTIYHLRKKLVDSTDKADLRLIYLALAHMIKFRGHFLIEGDLNPDNSDVDKLFIQLVQTYNQLFEENPINASGVDAKAILSARLSKSRRLENLIAQLPGEKKNGLFGNLIALSLGLTPNFKSNFDLAEDAKLQLSKDTYDDDLDNLLAQIGDQYADLFLAAKNLSDAILLSDILRVNTEITKAPLSASMIKRYDEHHQDLTLLKALVRQQLPEKYKEIFFDQSKNGYAGYIDGGASQEEFYKFIKPILEKMDGTEELLVKLNREDLLRKQRTFDNGSIPHQIHLGELHAILRRQEDFYPFLKDNREKIEKILTFRIPYYVGPLARGNSRFAWMTRKSEETITPWNFEEVVDKGASAQSFIERMTNFDKNLPNEKVLPKHSLLYEYFTVYNELTKVKYVTEGMRKPAFLSGEQKKAIVDLLFKTNRKVTVKQLKEDYFKKIECFDSVEISGVEDRFNASLGTYHDLLKIIKDKDFLDNEENEDILEDIVLTLTLFEDREMIEERLKTYAHLFDDKVMKQLKRRRYTGWGRLSRKLINGIRDKQSGKTILDFLKSDGFANRNFMQLIHDDSLTFKEDIQKAQVSGQGDSLHEHIANLAGSPAIKKGILQTVKVVDELVKVMGRHKPENIVIEMARENQTTQKGQKNSRERMKRIEEGIKELGSQILKEHPVENTQLQNEKLYLYYLQNGRDMYVDQELDINRLSDYDVDHIVPQSFLKDDSIDNKVLTRSDKARGKSDNVPSEEVVKKMKNYWRQLLNAKLITQRKFDNLTKAERGGLSELDKAGFIKRQLVETRQITKHVAQILDSRMNTKYDENDKLIREVKVITLKSKLVSDFRKDFQFYKVREINNYHHAHDAYLNAVVGTALIKKYPKLESEFVYGDYKVYDVRKMIAKSEQEIGKATAKYFFYSNIMNFFKTEITLANGEIRKRPLIETNGETGEIVWDKGRDFATVRKVLSMPQVNIVKKTEVQTGGFSKESILPKRNSDKLIARKKDWDPKKYGGFDSPTVAYSVLVVAKVEKGKSKKLKSVKELLGITIMERSSFEKNPIDFLEAKGYKEVKKDLIIKLPKYSLFELENGRKRMLASAGELQKGNELALPSKYVNFLYLASHYEKLKGSPEDNEQKQLFVEQHKHYLDEIIEQISEFSKRVILADANLDKVLSAYNKHRDKPIREQAENIIHLFTLTNLGAPAAFKYFDTTIDRKRYTSTKEVLDATLIHQSITGLYETRIDLSQLGGDGGPAPEAAAKGGTAPLEEEYRLFLEAPIQNVTLLEQWKREIPKVWAEINPPGLASTQAPIHVQLLSTALPVRVRQYPITLEAKRSLRETIRKFRAAGILRPVHSPWNTPLLPVRKSGTSEYRMVQDLREVNKRVETIHPTVPNPYTLLSLLPPDRIWYSVLDLKDAFFCIPLAPESQLIFAFEWADAEEGESGQLTWTRLPQGFKNSPTLFNEALNRDLQGFRLDHPSVSLLQYVDDLLIAADTQAACLSATRDLLMTLAELGYRVSGKKAQLCQEEVTYLGFKIHKGSRSLSNSRTQAILQIPVPKTKRQVREFLGKIGYCRLFIPGFAELAQPLYAATRPGNDPLVWGEKEEEAFQSLKLALTQPPALALPSLDKPFQLFVEETSGAAKGVLTQALGPWKRPVAYLSKRLDPVAAGWPRCLRAIAAAALLTREASKLTFGQDIEITSSHNLESLLRSPPDKWLTNARITQYQVLLLDPPRVRFKQTAALNPATLLPETDDTLPIHHCLDTLDSLTSTRPDLTDQPLAQAEATLFTDGSSYIRDGKRYAGAAVVTLDSVIWAEPLPIGTSAQKAELIALTKALEWSKDKSVNIYTDSRYAFATLHVHGMIYRERGWLTAGGKAIKNAPEILALLTAVWLPKRVAVMHCKGHQKDDAPTSTGNRRADEVAREVAIRPLSTQATISAGKRTADGSEFEKRTADGSEFESPKKKAKVE

SEQ ID NO: 1408 - protein, 2099 aa, synthetic construct
  source 1..2099: note = Description of Artificial Sequence: Synthetic polypeptide
MPAAKRVKLDGGDKKYSIGLDIGTNSVGWAVITDEYKVPSKKFKVLGNTDRHSIKKNLIGALLFDSGETAEATRLKRTARRRYTRRKNRICYLQEIFSNEMAKVDDSFFHRLEESFLVEEDKKHERHPIFGNIVDEVAYHEKYPTIYHLRKKLVDSTDKADLRLIYLALAHMIKFRGHFLIEGDLNPDNSDVDKLFIQLVQTYNQLFEENPINASGVDAKAILSARLSKSRRLENLIAQLPGEKKNGLFGNLIALSLGLTPNFKSNFDLAEDAKLQLSKDTYDDDLDNLLAQIGDQYADLFLAAKNLSDAILLSDILRVNTEITKAPLSASMIKRYDEHHQDLTLLKALVRQQLPEKYKEIFFDQSKNGYAGYIDGGASQEEFYKFIKPILEKMDGTEELLVKLNREDLLRKQRTFDNGSIPHQIHLGELHAILRRQEDFYPFLKDNREKIEKILTFRIPYYVGPLARGNSRFAWMTRKSEETITPWNFEEVVDKGASAQSFIERMTNFDKNLPNEKVLPKHSLLYEYFTVYNELTKVKYVTEGMRKPAFLSGEQKKAIVDLLFKTNRKVTVKQLKEDYFKKIECFDSVEISGVEDRFNASLGTYHDLLKIIKDKDFLDNEENEDILEDIVLTLTLFEDREMIEERLKTYAHLFDDKVMKQLKRRRYTGWGRLSRKLINGIRDKQSGKTILDFLKSDGFANRNFMQLIHDDSLTFKEDIQKAQVSGQGDSLHEHIANLAGSPAIKKGILQTVKVVDELVKVMGRHKPENIVIEMARENQTTQKGQKNSRERMKRIEEGIKELGSQILKEHPVENTQLQNEKLYLYYLQNGRDMYVDQELDINRLSDYDVDHIVPQSFLKDDSIDNKVLTRSDKARGKSDNVPSEEVVKKMKNYWRQLLNAKLITQRKFDNLTKAERGGLSELDKAGFIKRQLVETRQITKHVAQILDSRMNTKYDENDKLIREVKVITLKSKLVSDFRKDFQFYKVREINNYHHAHDAYLNAVVGTALIKKYPKLESEFVYGDYKVYDVRKMIAKSEQEIGKATAKYFFYSNIMNFFKTEITLANGEIRKRPLIETNGETGEIVWDKGRDFATVRKVLSMPQVNIVKKTEVQTGGFSKESILPKRNSDKLIARKKDWDPKKYGGFDSPTVAYSVLVVAKVEKGKSKKLKSVKELLGITIMERSSFEKNPIDFLEAKGYKEVKKDLIIKLPKYSLFELENGRKRMLASAGELQKGNELALPSKYVNFLYLASHYEKLKGSPEDNEQKQLFVEQHKHYLDEIIEQISEFSKRVILADANLDKVLSAYNKHRDKPIREQAENIIHLFTLTNLGAPAAFKYFDTTIDRKRYTSTKEVLDATLIHQSITGLYETRIDLSQLGGDGGGSAGSAAGSGEFGGTAPLEEEYRLFLEAPIQNVTLLEQWKREIPKVWAEINPPGLASTQAPIHVQLLSTALPVRVRQYPITLEAKRSLRETIRKFRAAGILRPVHSPWNTPLLPVRKSGTSEYRMVQDLREVNKRVETIHPTVPNPYTLLSLLPPDRIWYSVLDLKDAFFCIPLAPESQLIFAFEWADAEEGESGQLTWTRLPQGFKNSPTLFNEALNRDLQGFRLDHPSVSLLQYVDDLLIAADTQAACLSATRDLLMTLAELGYRVSGKKAQLCQEEVTYLGFKIHKGSRSLSNSRTQAILQIPVPKTKRQVREFLGKIGYCRLFIPGFAELAQPLYAATRPGNDPLVWGEKEEEAFQSLKLALTQPPALALPSLDKPFQLFVEETSGAAKGVLTQALGPWKRPVAYLSKRLDPVAAGWPRCLRAIAAAALLTREASKLTFGQDIEITSSHNLESLLRSPPDKWLTNARITQYQVLLLDPPRVRFKQTAALNPATLLPETDDTLPIHHCLDTLDSLTSTRPDLTDQPLAQAEATLFTDGSSYIRDGKRYAGAAVVTLDSVIWAEPLPIGTSAQKAELIALTKALEWSKDKSVNIYTDSRYAFATLHVHGMIYRERGWLTAGGKAIKNAPEILALLTAVWLPKRVAVMHCKGHQKDDAPTSTGNRRADEVAREVAIRPLSTQATISAGKRTADGSEFEKRTADGSEFESPKKKAKVE

SEQ ID NO: 1409 - protein, 2096 aa, synthetic construct
  source 1..2096: note = Description of Artificial Sequence: Synthetic polypeptide
MPAAKRVKLDGGDKKYSIGLDIGTNSVGWAVITDEYKVPSKKFKVLGNTDRHSIKKNLIGALLFDSGETAEATRLKRTARRRYTRRKNRICYLQEIFSNEMAKVDDSFFHRLEESFLVEEDKKHERHPIFGNIVDEVAYHEKYPTIYHLRKKLVDSTDKADLRLIYLALAHMIKFRGHFLIEGDLNPDNSDVDKLFIQLVQTYNQLFEENPINASGVDAKAILSARLSKSRRLENLIAQLPGEKKNGLFGNLIALSLGLTPNFKSNFDLAEDAKLQLSKDTYDDDLDNLLAQIGDQYADLFLAAKNLSDAILLSDILRVNTEITKAPLSASMIKRYDEHHQDLTLLKALVRQQLPEKYKEIFFDQSKNGYAGYIDGGASQEEFYKFIKPILEKMDGTEELLVKLNREDLLRKQRTFDNGSIPHQIHLGELHAILRRQEDFYPFLKDNREKIEKILTFRIPYYVGPLARGNSRFAWMTRKSEETITPWNFEEVVDKGASAQSFIERMTNFDKNLPNEKVLPKHSLLYEYFTVYNELTKVKYVTEGMRKPAFLSGEQKKAIVDLLFKTNRKVTVKQLKEDYFKKIECFDSVEISGVEDRFNASLGTYHDLLKIIKDKDFLDNEENEDILEDIVLTLTLFEDREMIEERLKTYAHLFDDKVMKQLKRRRYTGWGRLSRKLINGIRDKQSGKTILDFLKSDGFANRNFMQLIHDDSLTFKEDIQKAQVSGQGDSLHEHIANLAGSPAIKKGILQTVKVVDELVKVMGRHKPENIVIEMARENQTTQKGQKNSRERMKRIEEGIKELGSQILKEHPVENTQLQNEKLYLYYLQNGRDMYVDQELDINRLSDYDVDHIVPQSFLKDDSIDNKVLTRSDKARGKSDNVPSEEVVKKMKNYWRQLLNAKLITQRKFDNLTKAERGGLSELDKAGFIKRQLVETRQITKHVAQILDSRMNTKYDENDKLIREVKVITLKSKLVSDFRKDFQFYKVREINNYHHAHDAYLNAVVGTALIKKYPKLESEFVYGDYKVYDVRKMIAKSEQEIGKATAKYFFYSNIMNFFKTEITLANGEIRKRPLIETNGETGEIVWDKGRDFATVRKVLSMPQVNIVKKTEVQTGGFSKESILPKRNSDKLIARKKDWDPKKYGGFDSPTVAYSVLVVAKVEKGKSKKLKSVKELLGITIMERSSFEKNPIDFLEAKGYKEVKKDLIIKLPKYSLFELENGRKRMLASAGELQKGNELALPSKYVNFLYLASHYEKLKGSPEDNEQKQLFVEQHKHYLDEIIEQISEFSKRVILADANLDKVLSAYNKHRDKPIREQAENIIHLFTLTNLGAPAAFKYFDTTIDRKRYTSTKEVLDATLIHQSITGLYETRIDLSQLGGDGGGGSPAPGSSGGTAPLEEEYRLFLEAPIQNVTLLEQWKREIPKVWAEINPPGLASTQAPIHVQLLSTALPVRVRQYPITLEAKRSLRETIRKFRAAGILRPVHSPWNTPLLPVRKSGTSEYRMVQDLREVNKRVETIHPTVPNPYTLLSLLPPDRIWYSVLDLKDAFFCIPLAPESQLIFAFEWADAEEGESGQLTWTRLPQGFKNSPTLFNEALNRDLQGFRLDHPSVSLLQYVDDLLIAADTQAACLSATRDLLMTLAELGYRVSGKKAQLCQEEVTYLGFKIHKGSRSLSNSRTQAILQIPVPKTKRQVREFLGKIGYCRLFIPGFAELAQPLYAATRPGNDPLVWGEKEEEAFQSLKLALTQPPALALPSLDKPFQLFVEETSGAAKGVLTQALGPWKRPVAYLSKRLDPVAAGWPRCLRAIAAAALLTREASKLTFGQDIEITSSHNLESLLRSPPDKWLTNARITQYQVLLLDPPRVRFKQTAALNPATLLPETDDTLPIHHCLDTLDSLTSTRPDLTDQPLAQAEATLFTDGSSYIRDGKRYAGAAVVTLDSVIWAEPLPIGTSAQKAELIALTKALEWSKDKSVNIYTDSRYAFATLHVHGMIYRERGWLTAGGKAIKNAPEILALLTAVWLPKRVAVMHCKGHQKDDAPTSTGNRRADEVAREVAIRPLSTQATISAGKRTADGSEFEKRTADGSEFESPKKKAKVE

SEQ ID NO: 1410 - protein, 2093 aa, synthetic construct
  source 1..2093: note = Description of Artificial Sequence: Synthetic polypeptide
MPAAKRVKLDGGDKKYSIGLDIGTNSVGWAVITDEYKVPSKKFKVLGNTDRHSIKKNLIGALLFDSGETAEATRLKRTARRRYTRRKNRICYLQEIFSNEMAKVDDSFFHRLEESFLVEEDKKHERHPIFGNIVDEVAYHEKYPTIYHLRKKLVDSTDKADLRLIYLALAHMIKFRGHFLIEGDLNPDNSDVDKLFIQLVQTYNQLFEENPINASGVDAKAILSARLSKSRRLENLIAQLPGEKKNGLFGNLIALSLGLTPNFKSNFDLAEDAKLQLSKDTYDDDLDNLLAQIGDQYADLFLAAKNLSDAILLSDILRVNTEITKAPLSASMIKRYDEHHQDLTLLKALVRQQLPEKYKEIFFDQSKNGYAGYIDGGASQEEFYKFIKPILEKMDGTEELLVKLNREDLLRKQRTFDNGSIPHQIHLGELHAILRRQEDFYPFLKDNREKIEKILTFRIPYYVGPLARGNSRFAWMTRKSEETITPWNFEEVVDKGASAQSFIERMTNFDKNLPNEKVLPKHSLLYEYFTVYNELTKVKYVTEGMRKPAFLSGEQKKAIVDLLFKTNRKVTVKQLKEDYFKKIECFDSVEISGVEDRFNASLGTYHDLLKIIKDKDFLDNEENEDILEDIVLTLTLFEDREMIEERLKTYAHLFDDKVMKQLKRRRYTGWGRLSRKLINGIRDKQSGKTILDFLKSDGFANRNFMQLIHDDSLTFKEDIQKAQVSGQGDSLHEHIANLAGSPAIKKGILQTVKVVDELVKVMGRHKPENIVIEMARENQTTQKGQKNSRERMKRIEEGIKELGSQILKEHPVENTQLQNEKLYLYYLQNGRDMYVDQELDINRLSDYDVDHIVPQSFLKDDSIDNKVLTRSDKARGKSDNVPSEEVVKKMKNYWRQLLNAKLITQRKFDNLTKAERGGLSELDKAGFIKRQLVETRQITKHVAQILDSRMNTKYDENDKLIREVKVITLKSKLVSDFRKDFQFYKVREINNYHHAHDAYLNAVVGTALIKKYPKLESEFVYGDYKVYDVRKMIAKSEQEIGKATAKYFFYSNIMNFFKTEITLANGEIRKRPLIETNGETGEIVWDKGRDFATVRKVLSMPQVNIVKKTEVQTGGFSKESILPKRNSDKLIARKKDWDPKKYGGFDSPTVAYSVLVVAKVEKGKSKKLKSVKELLGITIMERSSFEKNPIDFLEAKGYKEVKKDLIIKLPKYSLFELENGRKRMLASAGELQKGNELALPSKYVNFLYLASHYEKLKGSPEDNEQKQLFVEQHKHYLDEIIEQISEFSKRVILADANLDKVLSAYNKHRDKPIREQAENIIHLFTLTNLGAPAAFKYFDTTIDRKRYTSTKEVLDATLIHQSITGLYETRIDLSQLGGDGGPAPGGGGGTAPLEEEYRLFLEAPIQNVTLLEQWKREIPKVWAEINPPGLASTQAPIHVQLLSTALPVRVRQYPITLEAKRSLRETIRKFRAAGILRPVHSPWNTPLLPVRKSGTSEYRMVQDLREVNKRVETIHPTVPNPYTLLSLLPPDRIWYSVLDLKDAFFCIPLAPESQLIFAFEWADAEEGESGQLTWTRLPQGFKNSPTLFNEALNRDLQGFRLDHPSVSLLQYVDDLLIAADTQAACLSATRDLLMTLAELGYRVSGKKAQLCQEEVTYLGFKIHKGSRSLSNSRTQAILQIPVPKTKRQVREFLGKIGYCRLFIPGFAELAQPLYAATRPGNDPLVWGEKEEEAFQSLKLALTQPPALALPSLDKPFQLFVEETSGAAKGVLTQALGPWKRPVAYLSKRLDPVAAGWPRCLRAIAAAALLTREASKLTFGQDIEITSSHNLESLLRSPPDKWLTNARITQYQVLLLDPPRVRFKQTAALNPATLLPETDDTLPIHHCLDTLDSLTSTRPDLTDQPLAQAEATLFTDGSSYIRDGKRYAGAAVVTLDSVIWAEPLPIGTSAQKAELIALTKALEWSKDKSVNIYTDSRYAFATLHVHGMIYRERGWLTAGGKAIKNAPEILALLTAVWLPKRVAVMHCKGHQKDDAPTSTGNRRADEVAREVAIRPLSTQATISAGKRTADGSEFEKRTADGSEFESPKKKAKVE

SEQ ID NO: 1411 - protein, 2096 aa, synthetic construct
  source 1..2096: note = Description of Artificial Sequence: Synthetic polypeptide
MPAAKRVKLDGGDKKYSIGLDIGTNSVGWAVITDEYKVPSKKFKVLGNTDRHSIKKNLIGALLFDSGETAEATRLKRTARRRYTRRKNRICYLQEIFSNEMAKVDDSFFHRLEESFLVEEDKKHERHPIFGNIVDEVAYHEKYPTIYHLRKKLVDSTDKADLRLIYLALAHMIKFRGHFLIEGDLNPDNSDVDKLFIQLVQTYNQLFEENPINASGVDAKAILSARLSKSRRLENLIAQLPGEKKNGLFGNLIALSLGLTPNFKSNFDLAEDAKLQLSKDTYDDDLDNLLAQIGDQYADLFLAAKNLSDAILLSDILRVNTEITKAPLSASMIKRYDEHHQDLTLLKALVRQQLPEKYKEIFFDQSKNGYAGYIDGGASQEEFYKFIKPILEKMDGTEELLVKLNREDLLRKQRTFDNGSIPHQIHLGELHAILRRQEDFYPFLKDNREKIEKILTFRIPYYVGPLARGNSRFAWMTRKSEETITPWNFEEVVDKGASAQSFIERMTNFDKNLPNEKVLPKHSLLYEYFTVYNELTKVKYVTEGMRKPAFLSGEQKKAIVDLLFKTNRKVTVKQLKEDYFKKIECFDSVEISGVEDRFNASLGTYHDLLKIIKDKDFLDNEENEDILEDIVLTLTLFEDREMIEERLKTYAHLFDDKVMKQLKRRRYTGWGRLSRKLINGIRDKQSGKTILDFLKSDGFANRNFMQLIHDDSLTFKEDIQKAQVSGQGDSLHEHIANLAGSPAIKKGILQTVKVVDELVKVMGRHKPENIVIEMARENQTTQKGQKNSRERMKRIEEGIKELGSQILKEHPVENTQLQNEKLYLYYLQNGRDMYVDQELDINRLSDYDVDHIVPQSFLKDDSIDNKVLTRSDKARGKSDNVPSEEVVKKMKNYWRQLLNAKLITQRKFDNLTKAERGGLSELDKAGFIKRQLVETRQITKHVAQILDSRMNTKYDENDKLIREVKVITLKSKLVSDFRKDFQFYKVREINNYHHAHDAYLNAVVGTALIKKYPKLESEFVYGDYKVYDVRKMIAKSEQEIGKATAKYFFYSNIMNFFKTEITLANGEIRKRPLIETNGETGEIVWDKGRDFATVRKVLSMPQVNIVKKTEVQTGGFSKESILPKRNSDKLIARKKDWDPKKYGGFDSPTVAYSVLVVAKVEKGKSKKLKSVKELLGITIMERSSFEKNPIDFLEAKGYKEVKKDLIIKLPKYSLFELENGRKRMLASAGELQKGNELALPSKYVNFLYLASHYEKLKGSPEDNEQKQLFVEQHKHYLDEIIEQISEFSKRVILADANLDKVLSAYNKHRDKPIREQAENIIHLFTLTNLGAPAAFKYFDTTIDRKRYTSTKEVLDATLIHQSITGLYETRIDLSQLGGDGGGGGPAPGSSGGTAPLEEEYRLFLEAPIQNVTLLEQWKREIPKVWAEINPPGLASTQAPIHVQLLSTALPVRVRQYPITLEAKRSLRETIRKFRAAGILRPVHSPWNTPLLPVRKSGTSEYRMVQDLREVNKRVETIHPTVPNPYTLLSLLPPDRIWYSVLDLKDAFFCIPLAPESQLIFAFEWADAEEGESGQLTWTRLPQGFKNSPTLFNEALNRDLQGFRLDHPSVSLLQYVDDLLIAADTQAACLSATRDLLMTLAELGYRVSGKKAQLCQEEVTYLGFKIHKGSRSLSNSRTQAILQIPVPKTKRQVREFLGKIGYCRLFIPGFAELAQPLYAATRPGNDPLVWGEKEEEAFQSLKLALTQPPALALPSLDKPFQLFVEETSGAAKGVLTQALGPWKRPVAYLSKRLDPVAAGWPRCLRAIAAAALLTREASKLTFGQDIEITSSHNLESLLRSPPDKWLTNARITQYQVLLLDPPRVRFKQTAALNPATLLPETDDTLPIHHCLDTLDSLTSTRPDLTDQPLAQAEATLFTDGSSYIRDGKRYAGAAVVTLDSVIWAEPLPIGTSAQKAELIALTKALEWSKDKSVNIYTDSRYAFATLHVHGMIYRERGWLTAGGKAIKNAPEILALLTAVWLPKRVAVMHCKGHQKDDAPTSTGNRRADEVAREVAIRPLSTQATISAGKRTADGSEFEKRTADGSEFESPKKKAKVE

SEQ ID NO: 1412 - protein, 2093 aa, synthetic construct
  source 1..2093: note = Description of Artificial Sequence: Synthetic polypeptide
MPAAKRVKLDGGDKKYSIGLDIGTNSVGWAVITDEYKVPSKKFKVLGNTDRHSIKKNLIGALLFDSGETAEATRLKRTARRRYTRRKNRICYLQEIFSNEMAKVDDSFFHRLEESFLVEEDKKHERHPIFGNIVDEVAYHEKYPTIYHLRKKLVDSTDKADLRLIYLALAHMIKFRGHFLIEGDLNPDNSDVDKLFIQLVQTYNQLFEENPINASGVDAKAILSARLSKSRRLENLIAQLPGEKKNGLFGNLIALSLGLTPNFKSNFDLAEDAKLQLSKDTYDDDLDNLLAQIGDQYADLFLAAKNLSDAILLSDILRVNTEITKAPLSASMIKRYDEHHQDLTLLKALVRQQLPEKYKEIFFDQSKNGYAGYIDGGASQEEFYKFIKPILEKMDGTEELLVKLNREDLLRKQRTFDNGSIPHQIHLGELHAILRRQEDFYPFLKDNREKIEKILTFRIPYYVGPLARGNSRFAWMTRKSEETITPWNFEEVVDKGASAQSFIERMTNFDKNLPNEKVLPKHSLLYEYFTVYNELTKVKYVTEGMRKPAFLSGEQKKAIVDLLFKTNRKVTVKQLKEDYFKKIECFDSVEISGVEDRFNASLGTYHDLLKIIKDKDFLDNEENEDILEDIVLTLTLFEDREMIEERLKTYAHLFDDKVMKQLKRRRYTGWGRLSRKLINGIRDKQSGKTILDFLKSDGFANRNFMQLIHDDSLTFKEDIQKAQVSGQGDSLHEHIANLAGSPAIKKGILQTVKVVDELVKVMGRHKPENIVIEMARENQTTQKGQKNSRERMKRIEEGIKELGSQILKEHPVENTQLQNEKLYLYYLQNGRDMYVDQELDINRLSDYDVDHIVPQSFLKDDSIDNKVLTRSDKARGKSDNVPSEEVVKKMKNYWRQLLNAKLITQRKFDNLTKAERGGLSELDKAGFIKRQLVETRQITKHVAQILDSRMNTKYDENDKLIREVKVITLKSKLVSDFRKDFQFYKVREINNYHHAHDAYLNAVVGTALIKKYPKLESEFVYGDYKVYDVRKMIAKSEQEIGKATAKYFFYSNIMNFFKTEITLANGEIRKRPLIETNGETGEIVWDKGRDFATVRKVLSMPQVNIVKKTEVQTGGFSKESILPKRNSDKLIARKKDWDPKKYGGFDSPTVAYSVLVVAKVEKGKSKKLKSVKELLGITIMERSSFEKNPIDFLEAKGYKEVKKDLIIKLPKYSLFELENGRKRMLASAGELQKGNELALPSKYVNFLYLASHYEKLKGSPEDNEQKQLFVEQHKHYLDEIIEQISEFSKRVILADANLDKVLSAYNKHRDKPIREQAENIIHLFTLTNLGAPAAFKYFDTTIDRKRYTSTKEVLDATLIHQSITGLYETRIDLSQLGGDGGGGSGSSGGTAPLEEEYRLFLEAPIQNVTLLEQWKREIPKVWAEINPPGLASTQAPIHVQLLSTALPVRVRQYPITLEAKRSLRETIRKFRAAGILRPVHSPWNTPLLPVRKSGTSEYRMVQDLREVNKRVETIHPTVPNPYTLLSLLPPDRIWYSVLDLKDAFFCIPLAPESQLIFAFEWADAEEGESGQLTWTRLPQGFKNSPTLFNEALNRDLQGFRLDHPSVSLLQYVDDLLIAADTQAACLSATRDLLMTLAELGYRVSGKKAQLCQEEVTYLGFKIHKGSRSLSNSRTQAILQIPVPKTKRQVREFLGKIGYCRLFIPGFAELAQPLYAATRPGNDPLVWGEKEEEAFQSLKLALTQPPALALPSLDKPFQLFVEETSGAAKGVLTQALGPWKRPVAYLSKRLDPVAAGWPRCLRAIAAAALLTREASKLTFGQDIEITSSHNLESLLRSPPDKWLTNARITQYQVLLLDPPRVRFKQTAALNPATLLPETDDTLPIHHCLDTLDSLTSTRPDLTDQPLAQAEATLFTDGSSYIRDGKRYAGAAVVTLDSVIWAEPLPIGTSAQKAELIALTKALEWSKDKSVNIYTDSRYAFATLHVHGMIYRERGWLTAGGKAIKNAPEILALLTAVWLPKRVAVMHCKGHQKDDAPTSTGNRRADEVAREVAIRPLSTQATISAGKRTADGSEFEKRTADGSEFESPKKKAKVE

SEQ ID NO: 1413 - protein, 2096 aa, synthetic construct
  source 1..2096: note = Description of Artificial Sequence: Synthetic polypeptide
MPAAKRVKLDGGDKKYSIGLDIGTNSVGWAVITDEYKVPSKKFKVLGNTDRHSIKKNLIGALLFDSGETAEATRLKRTARRRYTRRKNRICYLQEIFSNEMAKVDDSFFHRLEESFLVEEDKKHERHPIFGNIVDEVAYHEKYPTIYHLRKKLVDSTDKADLRLIYLALAHMIKFRGHFLIEGDLNPDNSDVDKLFIQLVQTYNQLFEENPINASGVDAKAILSARLSKSRRLENLIAQLPGEKKNGLFGNLIALSLGLTPNFKSNFDLAEDAKLQLSKDTYDDDLDNLLAQIGDQYADLFLAAKNLSDAILLSDILRVNTEITKAPLSASMIKRYDEHHQDLTLLKALVRQQLPEKYKEIFFDQSKNGYAGYIDGGASQEEFYKFIKPILEKMDGTEELLVKLNREDLLRKQRTFDNGSIPHQIHLGELHAILRRQEDFYPFLKDNREKIEKILTFRIPYYVGPLARGNSRFAWMTRKSEETITPWNFEEVVDKGASAQSFIERMTNFDKNLPNEKVLPKHSLLYEYFTVYNELTKVKYVTEGMRKPAFLSGEQKKAIVDLLFKTNRKVTVKQLKEDYFKKIECFDSVEISGVEDRFNASLGTYHDLLKIIKDKDFLDNEENEDILEDIVLTLTLFEDREMIEERLKTYAHLFDDKVMKQLKRRRYTGWGRLSRKLINGIRDKQSGKTILDFLKSDGFANRNFMQLIHDDSLTFKEDIQKAQVSGQGDSLHEHIANLAGSPAIKKGILQTVKVVDELVKVMGRHKPENIVIEMARENQTTQKGQKNSRERMKRIEEGIKELGSQILKEHPVENTQLQNEKLYLYYLQNGRDMYVDQELDINRLSDYDVDHIVPQSFLKDDSIDNKVLTRSDKARGKSDNVPSEEVVKKMKNYWRQLLNAKLITQRKFDNLTKAERGGLSELDKAGFIKRQLVETRQITKHVAQILDSRMNTKYDENDKLIREVKVITLKSKLVSDFRKDFQFYKVREINNYHHAHDAYLNAVVGTALIKKYPKLESEFVYGDYKVYDVRKMIAKSEQEIGKATAKYFFYSNIMNFFKTEITLANGEIRKRPLIETNGETGEIVWDKGRDFATVRKVLSMPQVNIVKKTEVQTGGFSKESILPKRNSDKLIARKKDWDPKKYGGFDSPTVAYSVLVVAKVEKGKSKKLKSVKELLGITIMERSSFEKNPIDFLEAKGYKEVKKDLIIKLPKYSLFELENGRKRMLASAGELQKGNELALPSKYVNFLYLASHYEKLKGSPEDNEQKQLFVEQHKHYLDEIIEQISEFSKRVILADANLDKVLSAYNKHRDKPIREQAENIIHLFTLTNLGAPAAFKYFDTTIDRKRYTSTKEVLDATLIHQSITGLYETRIDLSQLGGDGGGSSGGGGGSGGTAPLEEEYRLFLEAPIQNVTLLEQWKREIPKVWAEINPPGLASTQAPIHVQLLSTALPVRVRQYPITLEAKRSLRETIRKFRAAGILRPVHSPWNTPLLPVRKSGTSEYRMVQDLREVNKRVETIHPTVPNPYTLLSLLPPDRIWYSVLDLKDAFFCIPLAPESQLIFAFEWADAEEGESGQLTWTRLPQGFKNSPTLFNEALNRDLQGFRLDHPSVSLLQYVDDLLIAADTQAACLSATRDLLMTLAELGYRVSGKKAQLCQEEVTYLGFKIHKGSRSLSNSRTQAILQIPVPKTKRQVREFLGKIGYCRLFIPGFAELAQPLYAATRPGNDPLVWGEKEEEAFQSLKLALTQPPALALPSLDKPFQLFVEETSGAAKGVLTQALGPWKRPVAYLSKRLDPVAAGWPRCLRAIAAAALLTREASKLTFGQDIEITSSHNLESLLRSPPDKWLTNARITQYQVLLLDPPRVRFKQTAALNPATLLPETDDTLPIHHCLDTLDSLTSTRPDLTDQPLAQAEATLFTDGSSYIRDGKRYAGAAVVTLDSVIWAEPLPIGTSAQKAELIALTKALEWSKDKSVNIYTDSRYAFATLHVHGMIYRERGWLTAGGKAIKNAPEILALLTAVWLPKRVAVMHCKGHQKDDAPTSTGNRRADEVAREVAIRPLSTQATISAGKRTADGSEFEKRTADGSEFESPKKKAKVE

SEQ ID NO: 1414 - protein, 2090 aa, synthetic construct
  source 1..2090: note = Description of Artificial Sequence: Synthetic polypeptide
MPAAKRVKLDGGDKKYSIGLDIGTNSVGWAVITDEYKVPSKKFKVLGNTDRHSIKKNLIGALLFDSGETAEATRLKRTARRRYTRRKNRICYLQEIFSNEMAKVDDSFFHRLEESFLVEEDKKHERHPIFGNIVDEVAYHEKYPTIYHLRKKLVDSTDKADLRLIYLALAHMIKFRGHFLIEGDLNPDNSDVDKLFIQLVQTYNQLFEENPINASGVDAKAILSARLSKSRRLENLIAQLPGEKKNGLFGNLIALSLGLTPNFKSNFDLAEDAKLQLSKDTYDDDLDNLLAQIGDQYADLFLAAKNLSDAILLSDILRVNTEITKAPLSASMIKRYDEHHQDLTLLKALVRQQLPEKYKEIFFDQSKNGYAGYIDGGASQEEFYKFIKPILEKMDGTEELLVKLNREDLLRKQRTFDNGSIPHQIHLGELHAILRRQEDFYPFLKDNREKIEKILTFRIPYYVGPLARGNSRFAWMTRKSEETITPWNFEEVVDKGASAQSFIERMTNFDKNLPNEKVLPKHSLLYEYFTVYNELTKVKYVTEGMRKPAFLSGEQKKAIVDLLFKTNRKVTVKQLKEDYFKKIECFDSVEISGVEDRFNASLGTYHDLLKIIKDKDFLDNEENEDILEDIVLTLTLFEDREMIEERLKTYAHLFDDKVMKQLKRRRYTGWGRLSRKLINGIRDKQSGKTILDFLKSDGFANRNFMQLIHDDSLTFKEDIQKAQVSGQGDSLHEHIANLAGSPAIKKGILQTVKVVDELVKVMGRHKPENIVIEMARENQTTQKGQKNSRERMKRIEEGIKELGSQILKEHPVENTQLQNEKLYLYYLQNGRDMYVDQELDINRLSDYDVDHIVPQSFLKDDSIDNKVLTRSDKARGKSDNVPSEEVVKKMKNYWRQLLNAKLITQRKFDNLTKAERGGLSELDKAGFIKRQLVETRQITKHVAQILDSRMNTKYDENDKLIREVKVITLKSKLVSDFRKDFQFYKVREINNYHHAHDAYLNAVVGTALIKKYPKLESEFVYGDYKVYDVRKMIAKSEQEIGKATAKYFFYSNIMNFFKTEITLANGEIRKRPLIETNGETGEIVWDKGRDFATVRKVLSMPQVNIVKKTEVQTGGFSKESILPKRNSDKLIARKKDWDPKKYGGFDSPTVAYSVLVVAKVEKGKSKKLKSVKELLGITIMERSSFEKNPIDFLEAKGYKEVKKDLIIKLPKYSLFELENGRKRMLASAGELQKGNELALPSKYVNFLYLASHYEKLKGSPEDNEQKQLFVEQHKHYLDEIIEQISEFSKRVILADANLDKVLSAYNKHRDKPIREQAENIIHLFTLTNLGAPAAFKYFDTTIDRKRYTSTKEVLDATLIHQSITGLYETRIDLSQLGGDGGPAPGGTAPLEEEYRLFLEAPIQNVTLLEQWKREIPKVWAEINPPGLASTQAPIHVQLLSTALPVRVRQYPITLEAKRSLRETIRKFRAAGILRPVHSPWNTPLLPVRKSGTSEYRMVQDLREVNKRVETIHPTVPNPYTLLSLLPPDRIWYSVLDLKDAFFCIPLAPESQLIFAFEWADAEEGESGQLTWTRLPQGFKNSPTLFNEALNRDLQGFRLDHPSVSLLQYVDDLLIAADTQAACLSATRDLLMTLAELGYRVSGKKAQLCQEEVTYLGFKIHKGSRSLSNSRTQAILQIPVPKTKRQVREFLGKIGYCRLFIPGFAELAQPLYAATRPGNDPLVWGEKEEEAFQSLKLALTQPPALALPSLDKPFQLFVEETSGAAKGVLTQALGPWKRPVAYLSKRLDPVAAGWPRCLRAIAAAALLTREASKLTFGQDIEITSSHNLESLLRSPPDKWLTNARITQYQVLLLDPPRVRFKQTAALNPATLLPETDDTLPIHHCLDTLDSLTSTRPDLTDQPLAQAEATLFTDGSSYIRDGKRYAGAAVVTLDSVIWAEPLPIGTSAQKAELIALTKALEWSKDKSVNIYTDSRYAFATLHVHGMIYRERGWLTAGGKAIKNAPEILALLTAVWLPKRVAVMHCKGHQKDDAPTSTGNRRADEVAREVAIRPLSTQATISAGKRTADGSEFEKRTADGSEFESPKKKAKVE

SEQ ID NO: 1415 - protein, 2098 aa, synthetic construct
  source 1..2098: note = Description of Artificial Sequence: Synthetic polypeptide
MPAAKRVKLDGGDKKYSIGLDIGTNSVGWAVITDEYKVPSKKFKVLGNTDRHSIKKNLIGALLFDSGETAEATRLKRTARRRYTRRKNRICYLQEIFSNEMAKVDDSFFHRLEESFLVEEDKKHERHPIFGNIVDEVAYHEKYPTIYHLRKKLVDSTDKADLRLIYLALAHMIKFRGHFLIEGDLNPDNSDVDKLFIQLVQTYNQLFEENPINASGVDAKAILSARLSKSRRLENLIAQLPGEKKNGLFGNLIALSLGLTPNFKSNFDLAEDAKLQLSKDTYDDDLDNLLAQIGDQYADLFLAAKNLSDAILLSDILRVNTEITKAPLSASMIKRYDEHHQDLTLLKALVRQQLPEKYKEIFFDQSKNGYAGYIDGGASQEEFYKFIKPILEKMDGTEELLVKLNREDLLRKQRTFDNGSIPHQIHLGELHAILRRQEDFYPFLKDNREKIEKILTFRIPYYVGPLARGNSRFAWMTRKSEETITPWNFEEVVDKGASAQSFIERMTNFDKNLPNEKVLPKHSLLYEYFTVYNELTKVKYVTEGMRKPAFLSGEQKKAIVDLLFKTNRKVTVKQLKEDYFKKIECFDSVEISGVEDRFNASLGTYHDLLKIIKDKDFLDNEENEDILEDIVLTLTLFEDREMIEERLKTYAHLFDDKVMKQLKRRRYTGWGRLSRKLINGIRDKQSGKTILDFLKSDGFANRNFMQLIHDDSLTFKEDIQKAQVSGQGDSLHEHIANLAGSPAIKKGILQTVKVVDELVKVMGRHKPENIVIEMARENQTTQKGQKNSRERMKRIEEGIKELGSQILKEHPVENTQLQNEKLYLYYLQNGRDMYVDQELDINRLSDYDVDHIVPQSFLKDDSIDNKVLTRSDKARGKSDNVPSEEVVKKMKNYWRQLLNAKLITQRKFDNLTKAERGGLSELDKAGFIKRQLVETRQITKHVAQILDSRMNTKYDENDKLIREVKVITLKSKLVSDFRKDFQFYKVREINNYHHAHDAYLNAVVGTALIKKYPKLESEFVYGDYKVYDVRKMIAKSEQEIGKATAKYFFYSNIMNFFKTEITLANGEIRKRPLIETNGETGEIVWDKGRDFATVRKVLSMPQVNIVKKTEVQTGGFSKESILPKRNSDKLIARKKDWDPKKYGGFDSPTVAYSVLVVAKVEKGKSKKLKSVKELLGITIMERSSFEKNPIDFLEAKGYKEVKKDLIIKLPKYSLFELENGRKRMLASAGELQKGNELALPSKYVNFLYLASHYEKLKGSPEDNEQKQLFVEQHKHYLDEIIEQISEFSKRVILADANLDKVLSAYNKHRDKPIREQAENIIHLFTLTNLGAPAAFKYFDTTIDRKRYTSTKEVLDATLIHQSITGLYETRIDLSQLGGDGGGGGPAPEAAAKGGTAPLEEEYRLFLEAPIQNVTLLEQWKREIPKVWAEINPPGLASTQAPIHVQLLSTALPVRVRQYPITLEAKRSLRETIRKFRAAGILRPVHSPWNTPLLPVRKSGTSEYRMVQDLREVNKRVETIHPTVPNPYTLLSLLPPDRIWYSVLDLKDAFFCIPLAPESQLIFAFEWADAEEGESGQLTWTRLPQGFKNSPTLFNEALNRDLQGFRLDHPSVSLLQYVDDLLIAADTQAACLSATRDLLMTLAELGYRVSGKKAQLCQEEVTYLGFKIHKGSRSLSNSRTQAILQIPVPKTKRQVREFLGKIGYCRLFIPGFAELAQPLYAATRPGNDPLVWGEKEEEAFQSLKLALTQPPALALPSLDKPFQLFVEETSGAAKGVLTQALGPWKRPVAYLSKRLDPVAAGWPRCLRAIAAAALLTREASKLTFGQDIEITSSHNLESLLRSPPDKWLTNARITQYQVLLLDPPRVRFKQTAALNPATLLPETDDTLPIHHCLDTLDSLTSTRPDLTDQPLAQAEATLFTDGSSYIRDGKRYAGAAVVTLDSVIWAEPLPIGTSAQKAELIALTKALEWSKDKSVNIYTDSRYAFATLHVHGMIYRERGWLTAGGKAIKNAPEILALLTAVWLPKRVAVMHCKGHQKDDAPTSTGNRRADEVAREVAIRPLSTQATISAGKRTADGSEFEKRTADGSEFESPKKKAKVE

SEQ ID NO: 1416 - protein, 2098 aa, synthetic construct
  source 1..2098: note = Description of Artificial Sequence: Synthetic polypeptide
MPAAKRVKLDGGDKKYSIGLDIGTNSVGWAVITDEYKVPSKKFKVLGNTDRHSIKKNLIGALLFDSGETAEATRLKRTARRRYTRRKNRICYLQEIFSNEMAKVDDSFFHRLEESFLVEEDKKHERHPIFGNIVDEVAYHEKYPTIYHLRKKLVDSTDKADLRLIYLALAHMIKFRGHFLIEGDLNPDNSDVDKLFIQLVQTYNQLFEENPINASGVDAKAILSARLSKSRRLENLIAQLPGEKKNGLFGNLIALSLGLTPNFKSNFDLAEDAKLQLSKDTYDDDLDNLLAQIGDQYADLFLAAKNLSDAILLSDILRVNTEITKAPLSASMIKRYDEHHQDLTLLKALVRQQLPEKYKEIFFDQSKNGYAGYIDGGASQEEFYKFIKPILEKMDGTEELLVKLNREDLLRKQRTFDNGSIPHQIHLGELHAILRRQEDFYPFLKDNREKIEKILTFRIPYYVGPLARGNSRFAWMTRKSEETITPWNFEEVVDKGASAQSFIERMTNFDKNLPNEKVLPKHSLLYEYFTVYNELTKVKYVTEGMRKPAFLSGEQKKAIVDLLFKTNRKVTVKQLKEDYFKKIECFDSVEISGVEDRFNASLGTYHDLLKIIKDKDFLDNEENEDILEDIVLTLTLFEDREMIEERLKTYAHLFDDKVMKQLKRRRYTGWGRLSRKLINGIRDKQSGKTILDFLKSDGFANRNFMQLIHDDSLTFKEDIQKAQVSGQGDSLHEHIANLAGSPAIKKGILQTVKVVDELVKVMGRHKPENIVIEMARENQTTQKGQKNSRERMKRIEEGIKELGSQILKEHPVENTQLQNEKLYLYYLQNGRDMYVDQELDINRLSDYDVDHIVPQSFLKDDSIDNKVLTRSDKARGKSDNVPSEEVVKKMKNYWRQLLNAKLITQRKFDNLTKAERGGLSELDKAGFIKRQLVETRQITKHVAQILDSRMNTKYDENDKLIREVKVITLKSKLVSDFRKDFQFYKVREINNYHHAHDAYLNAVVGTALIKKYPKLESEFVYGDYKVYDVRKMIAKSEQEIGKATAKYFFYSNIMNFFKTEITLANGEIRKRPLIETNGETGEIVWDKGRDFATVRKVLSMPQVNIVKKTEVQTGGFSKESILPKRNSDKLIARKKDWDPKKYGGFDSPTVAYSVLVVAKVEKGKSKKLKSVKELLGITIMERSSFEKNPIDFLEAKGYKEVKKDLIIKLPKYSLFELENGRKRMLASAGELQKGNELALPSKYVNFLYLASHYEKLKGSPEDNEQKQLFVEQHKHYLDEIIEQISEFSKRVILADANLDKVLSAYNKHRDKPIREQAENIIHLFTLTNLGAPAAFKYFDTTIDRKRYTSTKEVLDATLIHQSITGLYETRIDLSQLGGDGGEAAAKGSSPAPGGTAPLEEEYRLFLEAPIQNVTLLEQWKREIPKVWAEINPPGLASTQAPIHVQLLSTALPVRVRQYPITLEAKRSLRETIRKFRAAGILRPVHSPWNTPLLPVRKSGTSEYRMVQDLREVNKRVETIHPTVPNPYTLLSLLPPDRIWYSVLDLKDAFFCIPLAPESQLIFAFEWADAEEGESGQLTWTRLPQGFKNSPTLFNEALNRDLQGFRLDHPSVSLLQYVDDLLIAADTQAACLSATRDLLMTLAELGYRVSGKKAQLCQEEVTYLGFKIHKGSRSLSNSRTQAILQIPVPKTKRQVREFLGKIGYCRLFIPGFAELAQPLYAATRPGNDPLVWGEKEEEAFQSLKLALTQPPALALPSLDKPFQLFVEETSGAAKGVLTQALGPWKRPVAYLSKRLDPVAAGWPRCLRAIAAAALLTREASKLTFGQDIEITSSHNLESLLRSPPDKWLTNARITQYQVLLLDPPRVRFKQTAALNPATLLPETDDTLPIHHCLDTLDSLTSTRPDLTDQPLAQAEATLFTDGSSYIRDGKRYAGAAVVTLDSVIWAEPLPIGTSAQKAELIALTKALEWSKDKSVNIYTDSRYAFATLHVHGMIYRERGWLTAGGKAIKNAPEILALLTAVWLPKRVAVMHCKGHQKDDAPTSTGNRRADEVAREVAIRPLSTQATISAGKRTADGSEFEKRTADGSEFESPKKKAKVE

SEQ ID NO: 1417 - protein, 2090 aa, synthetic construct
  source 1..2090: note = Description of Artificial Sequence: Synthetic polypeptide
MPAAKRVKLDGGDKKYSIGLDIGTNSVGWAVITDEYKVPSKKFKVLGNTDRHSIKKNLIGALLFDSGETAEATRLKRTARRRYTRRKNRICYLQEIFSNEMAKVDDSFFHRLEESFLVEEDKKHERHPIFGNIVDEVAYHEKYPTIYHLRKKLVDSTDKADLRLIYLALAHMIKFRGHFLIEGDLNPDNSDVDKLFIQLVQTYNQLFEENPINASGVDAKAILSARLSKSRRLENLIAQLPGEKKNGLFGNLIALSLGLTPNFKSNFDLAEDAKLQLSKDTYDDDLDNLLAQIGDQYADLFLAAKNLSDAILLSDILRVNTEITKAPLSASMIKRYDEHHQDLTLLKALVRQQLPEKYKEIFFDQSKNGYAGYIDGGASQEEFYKFIKPILEKMDGTEELLVKLNREDLLRKQRTFDNGSIPHQIHLGELHAILRRQEDFYPFLKDNREKIEKILTFRIPYYVGPLARGNSRFAWMTRKSEETITPWNFEEVVDKGASAQSFIERMTNFDKNLPNEKVLPKHSLLYEYFTVYNELTKVKYVTEGMRKPAFLSGEQKKAIVDLLFKTNRKVTVKQLKEDYFKKIECFDSVEISGVEDRFNASLGTYHDLLKIIKDKDFLDNEENEDILEDIVLTLTLFEDREMIEERLKTYAHLFDDKVMKQLKRRRYTGWGRLSRKLINGIRDKQSGKTILDFLKSDGFANRNFMQLIHDDSLTFKEDIQKAQVSGQGDSLHEHIANLAGSPAIKKGILQTVKVVDELVKVMGRHKPENIVIEMARENQTTQKGQKNSRERMKRIEEGIKELGSQILKEHPVENTQLQNEKLYLYYLQNGRDMYVDQELDINRLSDYDVDHIVPQSFLKDDSIDNKVLTRSDKARGKSDNVPSEEVVKKMKNYWRQLLNAKLITQRKFDNLTKAERGGLSELDKAGFIKRQLVETRQITKHVAQILDSRMNTKYDENDKLIREVKVITLKSKLVSDFRKDFQFYKVREINNYHHAHDAYLNAVVGTALIKKYPKLESEFVYGDYKVYDVRKMIAKSEQEIGKATAKYFFYSNIMNFFKTEITLANGEIRKRPLIETNGETGEIVWDKGRDFATVRKVLSMPQVNIVKKTEVQTGGFSKESILPKRNSDKLIARKKDWDPKKYGGFDSPTVAYSVLVVAKVEKGKSKKLKSVKELLGITIMERSSFEKNPIDFLEAKGYKEVKKDLIIKLPKYSLFELENGRKRMLASAGELQKGNELALPSKYVNFLYLASHYEKLKGSPEDNEQKQLFVEQHKHYLDEIIEQISEFSKRVILADANLDKVLSAYNKHRDKPIREQAENIIHLFTLTNLGAPAAFKYFDTTIDRKRYTSTKEVLDATLIHQSITGLYETRIDLSQLGGDGGGSSGGTAPLEEEYRLFLEAPIQNVTLLEQWKREIPKVWAEINPPGLASTQAPIHVQLLSTALPVRVRQYPITLEAKRSLRETIRKFRAAGILRPVHSPWNTPLLPVRKSGTSEYRMVQDLREVNKRVETIHPTVPNPYTLLSLLPPDRIWYSVLDLKDAFFCIPLAPESQLIFAFEWADAEEGESGQLTWTRLPQGFKNSPTLFNEALNRDLQGFRLDHPSVSLLQYVDDLLIAADTQAACLSATRDLLMTLAELGYRVSGKKAQLCQEEVTYLGFKIHKGSRSLSNSRTQAILQIPVPKTKRQVREFLGKIGYCRLFIPGFAELAQPLYAATRPGNDPLVWGEKEEEAFQSLKLALTQPPALALPSLDKPFQLFVEETSGAAKGVLTQALGPWKRPVAYLSKRLDPVAAGWPRCLRAIAAAALLTREASKLTFGQDIEITSSHNLESLLRSPPDKWLTNARITQYQVLLLDPPRVRFKQTAALNPATLLPETDDTLPIHHCLDTLDSLTSTRPDLTDQPLAQAEATLFTDGSSYIRDGKRYAGAAVVTLDSVIWAEPLPIGTSAQKAELIALTKALEWSKDKSVNIYTDSRYAFATLHVHGMIYRERGWLTAGGKAIKNAPEILALLTAVWLPKRVAVMHCKGHQKDDAPTSTGNRRADEVAREVAIRPLSTQATISAGKRTADGSEFEKRTADGSEFESPKKKAKVE

SEQ ID NO: 1418 - protein, 2096 aa, synthetic construct
  source 1..2096: note = Description of Artificial Sequence: Synthetic polypeptide
MPAAKRVKLDGGDKKYSIGLDIGTNSVGWAVITDEYKVPSKKFKVLGNTDRHSIKKNLIGALLFDSGETAEATRLKRTARRRYTRRKNRICYLQEIFSNEMAKVDDSFFHRLEESFLVEEDKKHERHPIFGNIVDEVAYHEKYPTIYHLRKKLVDSTDKADLRLIYLALAHMIKFRGHFLIEGDLNPDNSDVDKLFIQLVQTYNQLFEENPINASGVDAKAILSARLSKSRRLENLIAQLPGEKKNGLFGNLIALSLGLTPNFKSNFDLAEDAKLQLSKDTYDDDLDNLLAQIGDQYADLFLAAKNLSDAILLSDILRVNTEITKAPLSASMIKRYDEHHQDLTLLKALVRQQLPEKYKEIFFDQSKNGYAGYIDGGASQEEFYKFIKPILEKMDGTEELLVKLNREDLLRKQRTFDNGSIPHQIHLGELHAILRRQEDFYPFLKDNREKIEKILTFRIPYYVGPLARGNSRFAWMTRKSEETITPWNFEEVVDKGASAQSFIERMTNFDKNLPNEKVLPKHSLLYEYFTVYNELTKVKYVTEGMRKPAFLSGEQKKAIVDLLFKTNRKVTVKQLKEDYFKKIECFDSVEISGVEDRFNASLGTYHDLLKIIKDKDFLDNEENEDILEDIVLTLTLFEDREMIEERLKTYAHLFDDKVMKQLKRRRYTGWGRLSRKLINGIRDKQSGKTILDFLKSDGFANRNFMQLIHDDSLTFKEDIQKAQVSGQGDSLHEHIANLAGSPAIKKGILQTVKVVDELVKVMGRHKPENIVIEMARENQTTQKGQKNSRERMKRIEEGIKELGSQILKEHPVENTQLQNEKLYLYYLQNGRDMYVDQELDINRLSDYDVDHIVPQSFLKDDSIDNKVLTRSDKARGKSDNVPSEEVVKKMKNYWRQLLNAKLITQRKFDNLTKAERGGLSELDKAGFIKRQLVETRQITKHVAQILDSRMNTKYDENDKLIREVKVITLKSKLVSDFRKDFQFYKVREINNYHHAHDAYLNAVVGTALIKKYPKLESEFVYGDYKVYDVRKMIAKSEQEIGKATAKYFFYSNIMNFFKTEITLANGEIRKRPLIETNGETGEIVWDKGRDFATVRKVLSMPQVNIVKKTEVQTGGFSKESILPKRNSDKLIARKKDWDPKKYGGFDSPTVAYSVLVVAKVEKGKSKKLKSVKELLGITIMERSSFEKNPIDFLEAKGYKEVKKDLIIKLPKYSLFELENGRKRMLASAGELQKGNELALPSKYVNFLYLASHYEKLKGSPEDNEQKQLFVEQHKHYLDEIIEQISEFSKRVILADANLDKVLSAYNKHRDKPIREQAENIIHLFTLTNLGAPAAFKYFDTTIDRKRYTSTKEVLDATLIHQSITGLYETRIDLSQLGGDGGGGSGSSGGGGGTAPLEEEYRLFLEAPIQNVTLLEQWKREIPKVWAEINPPGLASTQAPIHVQLLSTALPVRVRQYPITLEAKRSLRETIRKFRAAGILRPVHSPWNTPLLPVRKSGTSEYRMVQDLREVNKRVETIHPTVPNPYTLLSLLPPDRIWYSVLDLKDAFFCIPLAPESQLIFAFEWADAEEGESGQLTWTRLPQGFKNSPTLFNEALNRDLQGFRLDHPSVSLLQYVDDLLIAADTQAACLSATRDLLMTLAELGYRVSGKKAQLCQEEVTYLGFKIHKGSRSLSNSRTQAILQIPVPKTKRQVREFLGKIGYCRLFIPGFAELAQPLYAATRPGNDPLVWGEKEEEAFQSLKLALTQPPALALPSLDKPFQLFVEETSGAAKGVLTQALGPWKRPVAYLSKRLDPVAAGWPRCLRAIAAAALLTREASKLTFGQDIEITSSHNLESLLRSPPDKWLTNARITQYQVLLLDPPRVRFKQTAALNPATLLPETDDTLPIHHCLDTLDSLTSTRPDLTDQPLAQAEATLFTDGSSYIRDGKRYAGAAVVTLDSVIWAEPLPIGTSAQKAELIALTKALEWSKDKSVNIYTDSRYAFATLHVHGMIYRERGWLTAGGKAIKNAPEILALLTAVWLPKRVAVMHCKGHQKDDAPTSTGNRRADEVAREVAIRPLSTQATISAGKRTADGSEFEKRTADGSEFESPKKKAKVE

SEQ ID NO: 1419 - protein, 2098 aa, synthetic construct
  source 1..2098: note = Description of Artificial Sequence: Synthetic polypeptide
MPAAKRVKLDGGDKKYSIGLDIGTNSVGWAVITDEYKVPSKKFKVLGNTDRHSIKKNLIGALLFDSGETAEATRLKRTARRRYTRRKNRICYLQEIFSNEMAKVDDSFFHRLEESFLVEEDKKHERHPIFGNIVDEVAYHEKYPTIYHLRKKLVDSTDKADLRLIYLALAHMIKFRGHFLIEGDLNPDNSDVDKLFIQLVQTYNQLFEENPINASGVDAKAILSARLSKSRRLENLIAQLPGEKKNGLFGNLIALSLGLTPNFKSNFDLAEDAKLQLSKDTYDDDLDNLLAQIGDQYADLFLAAKNLSDAILLSDILRVNTEITKAPLSASMIKRYDEHHQDLTLLKALVRQQLPEKYKEIFFDQSKNGYAGYIDGGASQEEFYKFIKPILEKMDGTEELLVKLNREDLLRKQRTFDNGSIPHQIHLGELHAILRRQEDFYPFLKDNREKIEKILTFRIPYYVGPLARGNSRFAWMTRKSEETITPWNFEEVVDKGASAQSFIERMTNFDKNLPNEKVLPKHSLLYEYFTVYNELTKVKYVTEGMRKPAFLSGEQKKAIVDLLFKTNRKVTVKQLKEDYFKKIECFDSVEISGVEDRFNASLGTYHDLLKIIKDKDFLDNEENEDILEDIVLTLTLFEDREMIEERLKTYAHLFDDKVMKQLKRRRYTGWGRLSRKLINGIRDKQSGKTILDFLKSDGFANRNFMQLIHDDSLTFKEDIQKAQVSGQGDSLHEHIANLAGSPAIKKGILQTVKVVDELVKVMGRHKPENIVIEMARENQTTQKGQKNSRERMKRIEEGIKELGSQILKEHPVENTQLQNEKLYLYYLQNGRDMYVDQELDINRLSDYDVDHIVPQSFLKDDSIDNKVLTRSDKARGKSDNVPSEEVVKKMKNYWRQLLNAKLITQRKFDNLTKAERGGLSELDKAGFIKRQLVETRQITKHVAQILDSRMNTKYDENDKLIREVKVITLKSKLVSDFRKDFQFYKVREINNYHHAHDAYLNAVVGTALIKKYPKLESEFVYGDYKVYDVRKMIAKSEQEIGKATAKYFFYSNIMNFFKTEITLANGEIRKRPLIETNGETGEIVWDKGRDFATVRKVLSMPQVNIVKKTEVQTGGFSKESILPKRNSDKLIARKKDWDPKKYGGFDSPTVAYSVLVVAKVEKGKSKKLKSVKELLGITIMERSSFEKNPIDFLEAKGYKEVKKDLIIKLPKYSLFELENGRKRMLASAGELQKGNELALPSKYVNFLYLASHYEKLKGSPEDNEQKQLFVEQHKHYLDEIIEQISEFSKRVILADANLDKVLSAYNKHRDKPIREQAENIIHLFTLTNLGAPAAFKYFDTTIDRKRYTSTKEVLDATLIHQSITGLYETRIDLSQLGGDGGEAAAKGSSGGGGGTAPLEEEYRLFLEAPIQNVTLLEQWKREIPKVWAEINPPGLASTQAPIHVQLLSTALPVRVRQYPITLEAKRSLRETIRKFRAAGILRPVHSPWNTPLLPVRKSGTSEYRMVQDLREVNKRVETIHPTVPNPYTLLSLLPPDRIWYSVLDLKDAFFCIPLAPESQLIFAFEWADAEEGESGQLTWTRLPQGFKNSPTLFNEALNRDLQGFRLDHPSVSLLQYVDDLLIAADTQAACLSATRDLLMTLAELGYRVSGKKAQLCQEEVTYLGFKIHKGSRSLSNSRTQAILQIPVPKTKRQVREFLGKIGYCRLFIPGFAELAQPLYAATRPGNDPLVWGEKEEEAFQSLKLALTQPPALALPSLDKPFQLFVEETSGAAKGVLTQALGPWKRPVAYLSKRLDPVAAGWPRCLRAIAAAALLTREASKLTFGQDIEITSSHNLESLLRSPPDKWLTNARITQYQVLLLDPPRVRFKQTAALNPATLLPETDDTLPIHHCLDTLDSLTSTRPDLTDQPLAQAEATLFTDGSSYIRDGKRYAGAAVVTLDSVIWAEPLPIGTSAQKAELIALTKALEWSKDKSVNIYTDSRYAFATLHVHGMIYRERGWLTAGGKAIKNAPEILALLTAVWLPKRVAVMHCKGHQKDDAPTSTGNRRADEVAREVAIRPLSTQATISAGKRTADGSEFEKRTADGSEFESPKKKAKVE

SEQ ID NO: 1420 - protein, 2096 aa, synthetic construct
  source 1..2096: note = Description of Artificial Sequence: Synthetic polypeptide
MPAAKRVKLDGGDKKYSIGLDIGTNSVGWAVITDEYKVPSKKFKVLGNTDRHSIKKNLIGALLFDSGETAEATRLKRTARRRYTRRKNRICYLQEIFSNEMAKVDDSFFHRLEESFLVEEDKKHERHPIFGNIVDEVAYHEKYPTIYHLRKKLVDSTDKADLRLIYLALAHMIKFRGHFLIEGDLNPDNSDVDKLFIQLVQTYNQLFEENPINASGVDAKAILSARLSKSRRLENLIAQLPGEKKNGLFGNLIALSLGLTPNFKSNFDLAEDAKLQLSKDTYDDDLDNLLAQIGDQYADLFLAAKNLSDAILLSDILRVNTEITKAPLSASMIKRYDEHHQDLTLLKALVRQQLPEKYKEIFFDQSKNGYAGYIDGGASQEEFYKFIKPILEKMDGTEELLVKLNREDLLRKQRTFDNGSIPHQIHLGELHAILRRQEDFYPFLKDNREKIEKILTFRIPYYVGPLARGNSRFAWMTRKSEETITPWNFEEVVDKGASAQSFIERMTNFDKNLPNEKVLPKHSLLYEYFTVYNELTKVKYVTEGMRKPAFLSGEQKKAIVDLLFKTNRKVTVKQLKEDYFKKIECFDSVEISGVEDRFNASLGTYHDLLKIIKDKDFLDNEENEDILEDIVLTLTLFEDREMIEERLKTYAHLFDDKVMKQLKRRRYTGWGRLSRKLINGIRDKQSGKTILDFLKSDGFANRNFMQLIHDDSLTFKEDIQKAQVSGQGDSLHEHIANLAGSPAIKKGILQTVKVVDELVKVMGRHKPENIVIEMARENQTTQKGQKNSRERMKRIEEGIKELGSQILKEHPVENTQLQNEKLYLYYLQNGRDMYVDQELDINRLSDYDVDHIVPQSFLKDDSIDNKVLTRSDKARGKSDNVPSEEVVKKMKNYWRQLLNAKLITQRKFDNLTKAERGGLSELDKAGFIKRQLVETRQITKHVAQILDSRMNTKYDENDKLIREVKVITLKSKLVSDFRKDFQFYKVREINNYHHAHDAYLNAVVGTALIKKYPKLESEFVYGDYKVYDVRKMIAKSEQEIGKATAKYFFYSNIMNFFKTEITLANGEIRKRPLIETNGETGEIVWDKGRDFATVRKVLSMPQVNIVKKTEVQTGGFSKESILPKRNSDKLIARKKDWDPKKYGGFDSPTVAYSVLVVAKVEKGKSKKLKSVKELLGITIMERSSFEKNPIDFLEAKGYKEVKKDLIIKLPKYSLFELENGRKRMLASAGELQKGNELALPSKYVNFLYLASHYEKLKGSPEDNEQKQLFVEQHKHYLDEIIEQISEFSKRVILADANLDKVLSAYNKHRDKPIREQAENIIHLFTLTNLGAPAAFKYFDTTIDRKRYTSTKEVLDATLIHQSITGLYETRIDLSQLGGDGGGGGGSSGGSGGTAPLEEEYRLFLEAPIQNVTLLEQWKREIPKVWAEINPPGLASTQAPIHVQLLSTALPVRVRQYPITLEAKRSLRETIRKFRAAGILRPVHSPWNTPLLPVRKSGTSEYRMVQDLREVNKRVETIHPTVPNPYTLLSLLPPDRIWYSVLDLKDAFFCIPLAPESQLIFAFEWADAEEGESGQLTWTRLPQGFKNSPTLFNEALNRDLQGFRLDHPSVSLLQYVDDLLIAADTQAACLSATRDLLMTLAELGYRVSGKKAQLCQEEVTYLGFKIHKGSRSLSNSRTQAILQIPVPKTKRQVREFLGKIGYCRLFIPGFAELAQPLYAATRPGNDPLVWGEKEEEAFQSLKLALTQPPALALPSLDKPFQLFVEETSGAAKGVLTQALGPWKRPVAYLSKRLDPVAAGWPRCLRAIAAAALLTREASKLTFGQDIEITSSHNLESLLRSPPDKWLTNARITQYQVLLLDPPRVRFKQTAALNPATLLPETDDTLPIHHCLDTLDSLTSTRPDLTDQPLAQAEATLFTDGSSYIRDGKRYAGAAVVTLDSVIWAEPLPIGTSAQKAELIALTKALEWSKDKSVNIYTDSRYAFATLHVHGMIYRERGWLTAGGKAIKNAPEILALLTAVWLPKRVAVMHCKGHQKDDAPTSTGNRRADEVAREVAIRPLSTQATISAGKRTADGSEFEKRTADGSEFESPKKKAKVE

SEQ ID NO: 1421 - protein, 2100 aa, synthetic construct
  source 1..2100: note = Description of Artificial Sequence: Synthetic polypeptide
MPAAKRVKLDGGDKKYSIGLDIGTNSVGWAVITDEYKVPSKKFKVLGNTDRHSIKKNLIGALLFDSGETAEATRLKRTARRRYTRRKNRICYLQEIFSNEMAKVDDSFFHRLEESFLVEEDKKHERHPIFGNIVDEVAYHEKYPTIYHLRKKLVDSTDKADLRLIYLALAHMIKFRGHFLIEGDLNPDNSDVDKLFIQLVQTYNQLFEENPINASGVDAKAILSARLSKSRRLENLIAQLPGEKKNGLFGNLIALSLGLTPNFKSNFDLAEDAKLQLSKDTYDDDLDNLLAQIGDQYADLFLAAKNLSDAILLSDILRVNTEITKAPLSASMIKRYDEHHQDLTLLKALVRQQLPEKYKEIFFDQSKNGYAGYIDGGASQEEFYKFIKPILEKMDGTEELLVKLNREDLLRKQRTFDNGSIPHQIHLGELHAILRRQEDFYPFLKDNREKIEKILTFRIPYYVGPLARGNSRFAWMTRKSEETITPWNFEEVVDKGASAQSFIERMTNFDKNLPNEKVLPKHSLLYEYFTVYNELTKVKYVTEGMRKPAFLSGEQKKAIVDLLFKTNRKVTVKQLKEDYFKKIECFDSVEISGVEDRFNASLGTYHDLLKIIKDKDFLDNEENEDILEDIVLTLTLFEDREMIEERLKTYAHLFDDKVMKQLKRRRYTGWGRLSRKLINGIRDKQSGKTILDFLKSDGFANRNFMQLIHDDSLTFKEDIQKAQVSGQGDSLHEHIANLAGSPAIKKGILQTVKVVDELVKVMGRHKPENIVIEMARENQTTQKGQKNSRERMKRIEEGIKELGSQILKEHPVENTQLQNEKLYLYYLQNGRDMYVDQELDINRLSDYDVDHIVPQSFLKDDSIDNKVLTRSDKARGKSDNVPSEEVVKKMKNYWRQLLNAKLITQRKFDNLTKAERGGLSELDKAGFIKRQLVETRQITKHVAQILDSRMNTKYDENDKLIREVKVITLKSKLVSDFRKDFQFYKVREINNYHHAHDAYLNAVVGTALIKKYPKLESEFVYGDYKVYDVRKMIAKSEQEIGKATAKYFFYSNIMNFFKTEITLANGEIRKRPLIETNGETGEIVWDKGRDFATVRKVLSMPQVNIVKKTEVQTGGFSKESILPKRNSDKLIARKKDWDPKKYGGFDSPTVAYSVLVVAKVEKGKSKKLKSVKELLGITIMERSSFEKNPIDFLEAKGYKEVKKDLIIKLPKYSLFELENGRKRMLASAGELQKGNELALPSKYVNFLYLASHYEKLKGSPEDNEQKQLFVEQHKHYLDEIIEQISEFSKRVILADANLDKVLSAYNKHRDKPIREQAENIIHLFTLTNLGAPAAFKYFDTTIDRKRYTSTKEVLDATLIHQSITGLYETRIDLSQLGGDGGPAPAPAPAPAPAPGGTAPLEEEYRLFLEAPIQNVTLLEQWKREIPKVWAEINPPGLASTQAPIHVQLLSTALPVRVRQYPITLEAKRSLRETIRKFRAAGILRPVHSPWNTPLLPVRKSGTSEYRMVQDLREVNKRVETIHPTVPNPYTLLSLLPPDRIWYSVLDLKDAFFCIPLAPESQLIFAFEWADAEEGESGQLTWTRLPQGFKNSPTLFNEALNRDLQGFRLDHPSVSLLQYVDDLLIAADTQAACLSATRDLLMTLAELGYRVSGKKAQLCQEEVTYLGFKIHKGSRSLSNSRTQAILQIPVPKTKRQVREFLGKIGYCRLFIPGFAELAQPLYAATRPGNDPLVWGEKEEEAFQSLKLALTQPPALALPSLDKPFQLFVEETSGAAKGVLTQALGPWKRPVAYLSKRLDPVAAGWPRCLRAIAAAALLTREASKLTFGQDIEITSSHNLESLLRSPPDKWLTNARITQYQVLLLDPPRVRFKQTAALNPATLLPETDDTLPIHHCLDTLDSLTSTRPDLTDQPLAQAEATLFTDGSSYIRDGKRYAGAAVVTLDSVIWAEPLPIGTSAQKAELIALTKALEWSKDKSVNIYTDSRYAFATLHVHGMIYRERGWLTAGGKAIKNAPEILALLTAVWLPKRVAVMHCKGHQKDDAPTSTGNRRADEVAREVAIRPLSTQATISAGKRTADGSEFEKRTADGSEFESPKKKAKVE

SEQ ID NO: 1422 - protein, 2095 aa, synthetic construct
  source 1..2095: note = Description of Artificial Sequence: Synthetic polypeptide
MPAAKRVKLDGGDKKYSIGLDIGTNSVGWAVITDEYKVPSKKFKVLGNTDRHSIKKNLIGALLFDSGETAEATRLKRTARRRYTRRKNRICYLQEIFSNEMAKVDDSFFHRLEESFLVEEDKKHERHPIFGNIVDEVAYHEKYPTIYHLRKKLVDSTDKADLRLIYLALAHMIKFRGHFLIEGDLNPDNSDVDKLFIQLVQTYNQLFEENPINASGVDAKAILSARLSKSRRLENLIAQLPGEKKNGLFGNLIALSLGLTPNFKSNFDLAEDAKLQLSKDTYDDDLDNLLAQIGDQYADLFLAAKNLSDAILLSDILRVNTEITKAPLSASMIKRYDEHHQDLTLLKALVRQQLPEKYKEIFFDQSKNGYAGYIDGGASQEEFYKFIKPILEKMDGTEELLVKLNREDLLRKQRTFDNGSIPHQIHLGELHAILRRQEDFYPFLKDNREKIEKILTFRIPYYVGPLARGNSRFAWMTRKSEETITPWNFEEVVDKGASAQSFIERMTNFDKNLPNEKVLPKHSLLYEYFTVYNELTKVKYVTEGMRKPAFLSGEQKKAIVDLLFKTNRKVTVKQLKEDYFKKIECFDSVEISGVEDRFNASLGTYHDLLKIIKDKDFLDNEENEDILEDIVLTLTLFEDREMIEERLKTYAHLFDDKVMKQLKRRRYTGWGRLSRKLINGIRDKQSGKTILDFLKSDGFANRNFMQLIHDDSLTFKEDIQKAQVSGQGDSLHEHIANLAGSPAIKKGILQTVKVVDELVKVMGRHKPENIVIEMARENQTTQKGQKNSRERMKRIEEGIKELGSQILKEHPVENTQLQNEKLYLYYLQNGRDMYVDQELDINRLSDYDVDHIVPQSFLKDDSIDNKVLTRSDKARGKSDNVPSEEVVKKMKNYWRQLLNAKLITQRKFDNLTKAERGGLSELDKAGFIKRQLVETRQITKHVAQILDSRMNTKYDENDKLIREVKVITLKSKLVSDFRKDFQFYKVREINNYHHAHDAYLNAVVGTALIKKYPKLESEFVYGDYKVYDVRKMIAKSEQEIGKATAKYFFYSNIMNFFKTEITLANGEIRKRPLIETNGETGEIVWDKGRDFATVRKVLSMPQVNIVKKTEVQTGGFSKESILPKRNSDKLIARKKDWDPKKYGGFDSPTVAYSVLVVAKVEKGKSKKLKSVKELLGITIMERSSFEKNPIDFLEAKGYKEVKKDLIIKLPKYSLFELENGRKRMLASAGELQKGNELALPSKYVNFLYLASHYEKLKGSPEDNEQKQLFVEQHKHYLDEIIEQISEFSKRVILADANLDKVLSAYNKHRDKPIREQAENIIHLFTLTNLGAPAAFKYFDTTIDRKRYTSTKEVLDATLIHQSITGLYETRIDLSQLGGDGGEAAAKGGGGGTAPLEEEYRLFLEAPIQNVTLLEQWKREIPKVWAEINPPGLASTQAPIHVQLLSTALPVRVRQYPITLEAKRSLRETIRKFRAAGILRPVHSPWNTPLLPVRKSGTSEYRMVQDLREVNKRVETIHPTVPNPYTLLSLLPPDRIWYSVLDLKDAFFCIPLAPESQLIFAFEWADAEEGESGQLTWTRLPQGFKNSPTLFNEALNRDLQGFRLDHPSVSLLQYVDDLLIAADTQAACLSATRDLLMTLAELGYRVSGKKAQLCQEEVTYLGFKIHKGSRSLSNSRTQAILQIPVPKTKRQVREFLGKIGYCRLFIPGFAELAQPLYAATRPGNDPLVWGEKEEEAFQSLKLALTQPPALALPSLDKPFQLFVEETSGAAKGVLTQALGPWKRPVAYLSKRLDPVAAGWPRCLRAIAAAALLTREASKLTFGQDIEITSSHNLESLLRSPPDKWLTNARITQYQVLLLDPPRVRFKQTAALNPATLLPETDDTLPIHHCLDTLDSLTSTRPDLTDQPLAQAEATLFTDGSSYIRDGKRYAGAAVVTLDSVIWAEPLPIGTSAQKAELIALTKALEWSKDKSVNIYTDSRYAFATLHVHGMIYRERGWLTAGGKAIKNAPEILALLTAVWLPKRVAVMHCKGHQKDDAPTSTGNRRADEVAREVAIRPLSTQATISAGKRTADGSEFEKRTADGSEFESPKKKAKVE

SEQ ID NO: 1423 - protein, 2097 aa, synthetic construct
  source 1..2097: note = Description of Artificial Sequence: Synthetic polypeptide
MPAAKRVKLDGGDKKYSIGLDIGTNSVGWAVITDEYKVPSKKFKVLGNTDRHSIKKNLIGALLFDSGETAEATRLKRTARRRYTRRKNRICYLQEIFSNEMAKVDDSFFHRLEESFLVEEDKKHERHPIFGNIVDEVAYHEKYPTIYHLRKKLVDSTDKADLRLIYLALAHMIKFRGHFLIEGDLNPDNSDVDKLFIQLVQTYNQLFEENPINASGVDAKAILSARLSKSRRLENLIAQLPGEKKNGLFGNLIALSLGLTPNFKSNFDLAEDAKLQLSKDTYDDDLDNLLAQIGDQYADLFLAAKNLSDAILLSDILRVNTEITKAPLSASMIKRYDEHHQDLTLLKALVRQQLPEKYKEIFFDQSKNGYAGYIDGGASQEEFYKFIKPILEKMDGTEELLVKLNREDLLRKQRTFDNGSIPHQIHLGELHAILRRQEDFYPFLKDNREKIEKILTFRIPYYVGPLARGNSRFAWMTRKSEETITPWNFEEVVDKGASAQSFIERMTNFDKNLPNEKVLPKHSLLYEYFTVYNELTKVKYVTEGMRKPAFLSGEQKKAIVDLLFKTNRKVTVKQLKEDYFKKIECFDSVEISGVEDRFNASLGTYHDLLKIIKDKDFLDNEENEDILEDIVLTLTLFEDREMIEERLKTYAHLFDDKVMKQLKRRRYTGWGRLSRKLINGIRDKQSGKTILDFLKSDGFANRNFMQLIHDDSLTFKEDIQKAQVSGQGDSLHEHIANLAGSPAIKKGILQTVKVVDELVKVMGRHKPENIVIEMARENQTTQKGQKNSRERMKRIEEGIKELGSQILKEHPVENTQLQNEKLYLYYLQNGRDMYVDQELDINRLSDYDVDHIVPQSFLKDDSIDNKVLTRSDKARGKSDNVPSEEVVKKMKNYWRQLLNAKLITQRKFDNLTKAERGGLSELDKAGFIKRQLVETRQITKHVAQILDSRMNTKYDENDKLIREVKVITLKSKLVSDFRKDFQFYKVREINNYHHAHDAYLNAVVGTALIKKYPKLESEFVYGDYKVYDVRKMIAKSEQEIGKATAKYFFYSNIMNFFKTEITLANGEIRKRPLIETNGETGEIVWDKGRDFATVRKVLSMPQVNIVKKTEVQTGGFSKESILPKRNSDKLIARKKDWDPKKYGGFDSPTVAYSVLVVAKVEKGKSKKLKSVKELLGITIMERSSFEKNPIDFLEAKGYKEVKKDLIIKLPKYSLFELENGRKRMLASAGELQKGNELALPSKYVNFLYLASHYEKLKGSPEDNEQKQLFVEQHKHYLDEIIEQISEFSKRVILADANLDKVLSAYNKHRDKPIREQAENIIHLFTLTNLGAPAAFKYFDTTIDRKRYTSTKEVLDATLIHQSITGLYETRIDLSQLGGDGGGGGGSGGGGSGGTAPLEEEYRLFLEAPIQNVTLLEQWKREIPKVWAEINPPGLASTQAPIHVQLLSTALPVRVRQYPITLEAKRSLRETIRKFRAAGILRPVHSPWNTPLLPVRKSGTSEYRMVQDLREVNKRVETIHPTVPNPYTLLSLLPPDRIWYSVLDLKDAFFCIPLAPESQLIFAFEWADAEEGESGQLTWTRLPQGFKNSPTLFNEALNRDLQGFRLDHPSVSLLQYVDDLLIAADTQAACLSATRDLLMTLAELGYRVSGKKAQLCQEEVTYLGFKIHKGSRSLSNSRTQAILQIPVPKTKRQVREFLGKIGYCRLFIPGFAELAQPLYAATRPGNDPLVWGEKEEEAFQSLKLALTQPPALALPSLDKPFQLFVEETSGAAKGVLTQALGPWKRPVAYLSKRLDPVAAGWPRCLRAIAAAALLTREASKLTFGQDIEITSSHNLESLLRSPPDKWLTNARITQYQVLLLDPPRVRFKQTAALNPATLLPETDDTLPIHHCLDTLDSLTSTRPDLTDQPLAQAEATLFTDGSSYIRDGKRYAGAAVVTLDSVIWAEPLPIGTSAQKAELIALTKALEWSKDKSVNIYTDSRYAFATLHVHGMIYRERGWLTAGGKAIKNAPEILALLTAVWLPKRVAVMHCKGHQKDDAPTSTGNRRADEVAREVAIRPLSTQATISAGKRTADGSEFEKRTADGSEFESPKKKAKVE

SEQ ID NO: 1424 - protein, 2098 aa, synthetic construct
  source 1..2098: note = Description of Artificial Sequence: Synthetic polypeptide
MPAAKRVKLDGGDKKYSIGLDIGTNSVGWAVITDEYKVPSKKFKVLGNTDRHSIKKNLIGALLFDSGETAEATRLKRTARRRYTRRKNRICYLQEIFSNEMAKVDDSFFHRLEESFLVEEDKKHERHPIFGNIVDEVAYHEKYPTIYHLRKKLVDSTDKADLRLIYLALAHMIKFRGHFLIEGDLNPDNSDVDKLFIQLVQTYNQLFEENPINASGVDAKAILSARLSKSRRLENLIAQLPGEKKNGLFGNLIALSLGLTPNFKSNFDLAEDAKLQLSKDTYDDDLDNLLAQIGDQYADLFLAAKNLSDAILLSDILRVNTEITKAPLSASMIKRYDEHHQDLTLLKALVRQQLPEKYKEIFFDQSKNGYAGYIDGGASQEEFYKFIKPILEKMDGTEELLVKLNREDLLRKQRTFDNGSIPHQIHLGELHAILRRQEDFYPFLKDNREKIEKILTFRIPYYVGPLARGNSRFAWMTRKSEETITPWNFEEVVDKGASAQSFIERMTNFDKNLPNEKVLPKHSLLYEYFTVYNELTKVKYVTEGMRKPAFLSGEQKKAIVDLLFKTNRKVTVKQLKEDYFKKIECFDSVEISGVEDRFNASLGTYHDLLKIIKDKDFLDNEENEDILEDIVLTLTLFEDREMIEERLKTYAHLFDDKVMKQLKRRRYTGWGRLSRKLINGIRDKQSGKTILDFLKSDGFANRNFMQLIHDDSLTFKEDIQKAQVSGQGDSLHEHIANLAGSPAIKKGILQTVKVVDELVKVMGRHKPENIVIEMARENQTTQKGQKNSRERMKRIEEGIKELGSQILKEHPVENTQLQNEKLYLYYLQNGRDMYVDQELDINRLSDYDVDHIVPQSFLKDDSIDNKVLTRSDKARGKSDNVPSEEVVKKMKNYWRQLLNAKLITQRKFDNLTKAERGGLSELDKAGFIKRQLVETRQITKHVAQILDSRMNTKYDENDKLIREVKVITLKSKLVSDFRKDFQFYKVREINNYHHAHDAYLNAVVGTALIKKYPKLESEFVYGDYKVYDVRKMIAKSEQEIGKATAKYFFYSNIMNFFKTEITLANGEIRKRPLIETNGETGEIVWDKGRDFATVRKVLSMPQVNIVKKTEVQTGGFSKESILPKRNSDKLIARKKDWDPKKYGGFDSPTVAYSVLVVAKVEKGKSKKLKSVKELLGITIMERSSFEKNPIDFLEAKGYKEVKKDLIIKLPKYSLFELENGRKRMLASAGELQKGNELALPSKYVNFLYLASHYEKLKGSPEDNEQKQLFVEQHKHYLDEIIEQISEFSKRVILADANLDKVLSAYNKHRDKPIREQAENIIHLFTLTNLGAPAAFKYFDTTIDRKRYTSTKEVLDATLIHQSITGLYETRIDLSQLGGDGGGSSGGGEAAAKGGTAPLEEEYRLFLEAPIQNVTLLEQWKREIPKVWAEINPPGLASTQAPIHVQLLSTALPVRVRQYPITLEAKRSLRETIRKFRAAGILRPVHSPWNTPLLPVRKSGTSEYRMVQDLREVNKRVETIHPTVPNPYTLLSLLPPDRIWYSVLDLKDAFFCIPLAPESQLIFAFEWADAEEGESGQLTWTRLPQGFKNSPTLFNEALNRDLQGFRLDHPSVSLLQYVDDLLIAADTQAACLSATRDLLMTLAELGYRVSGKKAQLCQEEVTYLGFKIHKGSRSLSNSRTQAILQIPVPKTKRQVREFLGKIGYCRLFIPGFAELAQPLYAATRPGNDPLVWGEKEEEAFQSLKLALTQPPALALPSLDKPFQLFVEETSGAAKGVLTQALGPWKRPVAYLSKRLDPVAAGWPRCLRAIAAAALLTREASKLTFGQDIEITSSHNLESLLRSPPDKWLTNARITQYQVLLLDPPRVRFKQTAALNPATLLPETDDTLPIHHCLDTLDSLTSTRPDLTDQPLAQAEATLFTDGSSYIRDGKRYAGAAVVTLDSVIWAEPLPIGTSAQKAELIALTKALEWSKDKSVNIYTDSRYAFATLHVHGMIYRERGWLTAGGKAIKNAPEILALLTAVWLPKRVAVMHCKGHQKDDAPTSTGNRRADEVAREVAIRPLSTQATISAGKRTADGSEFEKRTADGSEFESPKKKAKVE

SEQ ID NO: 1425 - protein, 2098 aa, synthetic construct
  source 1..2098: note = Description of Artificial Sequence: Synthetic polypeptide
MPAAKRVKLDGGDKKYSIGLDIGTNSVGWAVITDEYKVPSKKFKVLGNTDRHSIKKNLIGALLFDSGETAEATRLKRTARRRYTRRKNRICYLQEIFSNEMAKVDDSFFHRLEESFLVEEDKKHERHPIFGNIVDEVAYHEKYPTIYHLRKKLVDSTDKADLRLIYLALAHMIKFRGHFLIEGDLNPDNSDVDKLFIQLVQTYNQLFEENPINASGVDAKAILSARLSKSRRLENLIAQLPGEKKNGLFGNLIALSLGLTPNFKSNFDLAEDAKLQLSKDTYDDDLDNLLAQIGDQYADLFLAAKNLSDAILLSDILRVNTEITKAPLSASMIKRYDEHHQDLTLLKALVRQQLPEKYKEIFFDQSKNGYAGYIDGGASQEEFYKFIKPILEKMDGTEELLVKLNREDLLRKQRTFDNGSIPHQIHLGELHAILRRQEDFYPFLKDNREKIEKILTFRIPYYVGPLARGNSRFAWMTRKSEETITPWNFEEVVDKGASAQSFIERMTNFDKNLPNEKVLPKHSLLYEYFTVYNELTKVKYVTEGMRKPAFLSGEQKKAIVDLLFKTNRKVTVKQLKEDYFKKIECFDSVEISGVEDRFNASLGTYHDLLKIIKDKDFLDNEENEDILEDIVLTLTLFEDREMIEERLKTYAHLFDDKVMKQLKRRRYTGWGRLSRKLINGIRDKQSGKTILDFLKSDGFANRNFMQLIHDDSLTFKEDIQKAQVSGQGDSLHEHIANLAGSPAIKKGILQTVKVVDELVKVMGRHKPENIVIEMARENQTTQKGQKNSRERMKRIEEGIKELGSQILKEHPVENTQLQNEKLYLYYLQNGRDMYVDQELDINRLSDYDVDHIVPQSFLKDDSIDNKVLTRSDKARGKSDNVPSEEVVKKMKNYWRQLLNAKLITQRKFDNLTKAERGGLSELDKAGFIKRQLVETRQITKHVAQILDSRMNTKYDENDKLIREVKVITLKSKLVSDFRKDFQFYKVREINNYHHAHDAYLNAVVGTALIKKYPKLESEFVYGDYKVYDVRKMIAKSEQEIGKATAKYFFYSNIMNFFKTEITLANGEIRKRPLIETNGETGEIVWDKGRDFATVRKVLSMPQVNIVKKTEVQTGGFSKESILPKRNSDKLIARKKDWDPKKYGGFDSPTVAYSVLVVAKVEKGKSKKLKSVKELLGITIMERSSFEKNPIDFLEAKGYKEVKKDLIIKLPKYSLFELENGRKRMLASAGELQKGNELALPSKYVNFLYLASHYEKLKGSPEDNEQKQLFVEQHKHYLDEIIEQISEFSKRVILADANLDKVLSAYNKHRDKPIREQAENIIHLFTLTNLGAPAAFKYFDTTIDRKRYTSTKEVLDATLIHQSITGLYETRIDLSQLGGDGGGGSEAAAKGGGGGTAPLEEEYRLFLEAPIQNVTLLEQWKREIPKVWAEINPPGLASTQAPIHVQLLSTALPVRVRQYPITLEAKRSLRETIRKFRAAGILRPVHSPWNTPLLPVRKSGTSEYRMVQDLREVNKRVETIHPTVPNPYTLLSLLPPDRIWYSVLDLKDAFFCIPLAPESQLIFAFEWADAEEGESGQLTWTRLPQGFKNSPTLFNEALNRDLQGFRLDHPSVSLLQYVDDLLIAADTQAACLSATRDLLMTLAELGYRVSGKKAQLCQEEVTYLGFKIHKGSRSLSNSRTQAILQIPVPKTKRQVREFLGKIGYCRLFIPGFAELAQPLYAATRPGNDPLVWGEKEEEAFQSLKLALTQPPALALPSLDKPFQLFVEETSGAAKGVLTQALGPWKRPVAYLSKRLDPVAAGWPRCLRAIAAAALLTREASKLTFGQDIEITSSHNLESLLRSPPDKWLTNARITQYQVLLLDPPRVRFKQTAALNPATLLPETDDTLPIHHCLDTLDSLTSTRPDLTDQPLAQAEATLFTDGSSYIRDGKRYAGAAVVTLDSVIWAEPLPIGTSAQKAELIALTKALEWSKDKSVNIYTDSRYAFATLHVHGMIYRERGWLTAGGKAIKNAPEILALLTAVWLPKRVAVMHCKGHQKDDAPTSTGNRRADEVAREVAIRPLSTQATISAGKRTADGSEFEKRTADGSEFESPKKKAKVE

SEQ ID NO: 1426 - protein, 2117 aa, synthetic construct
  source 1..2117: note = Description of Artificial Sequence: Synthetic polypeptide
MPAAKRVKLDGGDKKYSIGLDIGTNSVGWAVITDEYKVPSKKFKVLGNTDRHSIKKNLIGALLFDSGETAEATRLKRTARRRYTRRKNRICYLQEIFSNEMAKVDDSFFHRLEESFLVEEDKKHERHPIFGNIVDEVAYHEKYPTIYHLRKKLVDSTDKADLRLIYLALAHMIKFRGHFLIEGDLNPDNSDVDKLFIQLVQTYNQLFEENPINASGVDAKAILSARLSKSRRLENLIAQLPGEKKNGLFGNLIALSLGLTPNFKSNFDLAEDAKLQLSKDTYDDDLDNLLAQIGDQYADLFLAAKNLSDAILLSDILRVNTEITKAPLSASMIKRYDEHHQDLTLLKALVRQQLPEKYKEIFFDQSKNGYAGYIDGGASQEEFYKFIKPILEKMDGTEELLVKLNREDLLRKQRTFDNGSIPHQIHLGELHAILRRQEDFYPFLKDNREKIEKILTFRIPYYVGPLARGNSRFAWMTRKSEETITPWNFEEVVDKGASAQSFIERMTNFDKNLPNEKVLPKHSLLYEYFTVYNELTKVKYVTEGMRKPAFLSGEQKKAIVDLLFKTNRKVTVKQLKEDYFKKIECFDSVEISGVEDRFNASLGTYHDLLKIIKDKDFLDNEENEDILEDIVLTLTLFEDREMIEERLKTYAHLFDDKVMKQLKRRRYTGWGRLSRKLINGIRDKQSGKTILDFLKSDGFANRNFMQLIHDDSLTFKEDIQKAQVSGQGDSLHEHIANLAGSPAIKKGILQTVKVVDELVKVMGRHKPENIVIEMARENQTTQKGQKNSRERMKRIEEGIKELGSQILKEHPVENTQLQNEKLYLYYLQNGRDMYVDQELDINRLSDYDVDHIVPQSFLKDDSIDNKVLTRSDKARGKSDNVPSEEVVKKMKNYWRQLLNAKLITQRKFDNLTKAERGGLSELDKAGFIKRQLVETRQITKHVAQILDSRMNTKYDENDKLIREVKVITLKSKLVSDFRKDFQFYKVREINNYHHAHDAYLNAVVGTALIKKYPKLESEFVYGDYKVYDVRKMIAKSEQEIGKATAKYFFYSNIMNFFKTEITLANGEIRKRPLIETNGETGEIVWDKGRDFATVRKVLSMPQVNIVKKTEVQTGGFSKESILPKRNSDKLIARKKDWDPKKYGGFDSPTVAYSVLVVAKVEKGKSKKLKSVKELLGITIMERSSFEKNPIDFLEAKGYKEVKKDLIIKLPKYSLFELENGRKRMLASAGELQKGNELALPSKYVNFLYLASHYEKLKGSPEDNEQKQLFVEQHKHYLDEIIEQISEFSKRVILADANLDKVLSAYNKHRDKPIREQAENIIHLFTLTNLGAPAAFKYFDTTIDRKRYTSTKEVLDATLIHQSITGLYETRIDLSQLGGDGGEAAAKEAAAKEAAAKEAAAKEAAAKEAAAKGGTAPLEEEYRLFLEAPIQNVTLLEQWKREIPKVWAEINPPGLASTQAPIHVQLLSTALPVRVRQYPITLEAKRSLRETIRKFRAAGILRPVHSPWNTPLLPVRKSGTSEYRMVQDLREVNKRVETIHPTVPNPYTLLSLLPPDRIWYSVLDLKDAFFCIPLAPESQLIFAFEWADAEEGESGQLTWTRLPQGFKNSPTLFNEALNRDLQGFRLDHPSVSLLQYVDDLLIAADTQAACLSATRDLLMTLAELGYRVSGKKAQLCQEEVTYLGFKIHKGSRSLSNSRTQAILQIPVPKTKRQVREFLGKIGYCRLFIPGFAELAQPLYAATRPGNDPLVWGEKEEEAFQSLKLALTQPPALALPSLDKPFQLFVEETSGAAKGVLTQALGPWKRPVAYLSKRLDPVAAGWPRCLRAIAAAALLTREASKLTFGQDIEITSSHNLESLLRSPPDKWLTNARITQYQVLLLDPPRVRFKQTAALNPATLLPETDDTLPIHHCLDTLDSLTSTRPDLTDQPLAQAEATLFTDGSSYIRDGKRYAGAAVVTLDSVIWAEPLPIGTSAQKAELIALTKALEWSKDKSVNIYTDSRYAFATLHVHGMIYRERGWLTAGGKAIKNAPEILALLTAVWLPKRVAVMHCKGHQKDDAPTSTGNRRADEVAREVAIRPLSTQATISAGKRTADGSEFEKRTADGSEFESPKKKAKVE

SEQ ID NO: 1427 - protein, 2098 aa, synthetic construct
  source 1..2098: note = Description of Artificial Sequence: Synthetic polypeptide
MPAAKRVKLDGGDKKYSIGLDIGTNSVGWAVITDEYKVPSKKFKVLGNTDRHSIKKNLIGALLFDSGETAEATRLKRTARRRYTRRKNRICYLQEIFSNEMAKVDDSFFHRLEESFLVEEDKKHERHPIFGNIVDEVAYHEKYPTIYHLRKKLVDSTDKADLRLIYLALAHMIKFRGHFLIEGDLNPDNSDVDKLFIQLVQTYNQLFEENPINASGVDAKAILSARLSKSRRLENLIAQLPGEKKNGLFGNLIALSLGLTPNFKSNFDLAEDAKLQLSKDTYDDDLDNLLAQIGDQYADLFLAAKNLSDAILLSDILRVNTEITKAPLSASMIKRYDEHHQDLTLLKALVRQQLPEKYKEIFFDQSKNGYAGYIDGGASQEEFYKFIKPILEKMDGTEELLVKLNREDLLRKQRTFDNGSIPHQIHLGELHAILRRQEDFYPFLKDNREKIEKILTFRIPYYVGPLARGNSRFAWMTRKSEETITPWNFEEVVDKGASAQSFIERMTNFDKNLPNEKVLPKHSLLYEYFTVYNELTKVKYVTEGMRKPAFLSGEQKKAIVDLLFKTNRKVTVKQLKEDYFKKIECFDSVEISGVEDRFNASLGTYHDLLKIIKDKDFLDNEENEDILEDIVLTLTLFEDREMIEERLKTYAHLFDDKVMKQLKRRRYTGWGRLSRKLINGIRDKQSGKTILDFLKSDGFANRNFMQLIHDDSLTFKEDIQKAQVSGQGDSLHEHIANLAGSPAIKKGILQTVKVVDELVKVMGRHKPENIVIEMARENQTTQKGQKNSRERMKRIEEGIKELGSQILKEHPVENTQLQNEKLYLYYLQNGRDMYVDQELDINRLSDYDVDHIVPQSFLKDDSIDNKVLTRSDKARGKSDNVPSEEVVKKMKNYWRQLLNAKLITQRKFDNLTKAERGGLSELDKAGFIKRQLVETRQITKHVAQILDSRMNTKYDENDKLIREVKVITLKSKLVSDFRKDFQFYKVREINNYHHAHDAYLNAVVGTALIKKYPKLESEFVYGDYKVYDVRKMIAKSEQEIGKATAKYFFYSNIMNFFKTEITLANGEIRKRPLIETNGETGEIVWDKGRDFATVRKVLSMPQVNIVKKTEVQTGGFSKESILPKRNSDKLIARKKDWDPKKYGGFDSPTVAYSVLVVAKVEKGKSKKLKSVKELLGITIMERSSFEKNPIDFLEAKGYKEVKKDLIIKLPKYSLFELENGRKRMLASAGELQKGNELALPSKYVNFLYLASHYEKLKGSPEDNEQKQLFVEQHKHYLDEIIEQISEFSKRVILADANLDKVLSAYNKHRDKPIREQAENIIHLFTLTNLGAPAAFKYFDTTIDRKRYTSTKEVLDATLIHQSITGLYETRIDLSQLGGDGGGGGGGSEAAAKGGTAPLEEEYRLFLEAPIQNVTLLEQWKREIPKVWAEINPPGLASTQAPIHVQLLSTALPVRVRQYPITLEAKRSLRETIRKFRAAGILRPVHSPWNTPLLPVRKSGTSEYRMVQDLREVNKRVETIHPTVPNPYTLLSLLPPDRIWYSVLDLKDAFFCIPLAPESQLIFAFEWADAEEGESGQLTWTRLPQGFKNSPTLFNEALNRDLQGFRLDHPSVSLLQYVDDLLIAADTQAACLSATRDLLMTLAELGYRVSGKKAQLCQEEVTYLGFKIHKGSRSLSNSRTQAILQIPVPKTKRQVREFLGKIGYCRLFIPGFAELAQPLYAATRPGNDPLVWGEKEEEAFQSLKLALTQPPALALPSLDKPFQLFVEETSGAAKGVLTQALGPWKRPVAYLSKRLDPVAAGWPRCLRAIAAAALLTREASKLTFGQDIEITSSHNLESLLRSPPDKWLTNARITQYQVLLLDPPRVRFKQTAALNPATLLPETDDTLPIHHCLDTLDSLTSTRPDLTDQPLAQAEATLFTDGSSYIRDGKRYAGAAVVTLDSVIWAEPLPIGTSAQKAELIALTKALEWSKDKSVNIYTDSRYAFATLHVHGMIYRERGWLTAGGKAIKNAPEILALLTAVWLPKRVAVMHCKGHQKDDAPTSTGNRRADEVAREVAIRPLSTQATISAGKRTADGSEFEKRTADGSEFESPKKKAKVE

SEQ ID NO: 1428 - protein, 2095 aa, synthetic construct
  source 1..2095: note = Description of Artificial Sequence: Synthetic polypeptide
MPAAKRVKLDGGDKKYSIGLDIGTNSVGWAVITDEYKVPSKKFKVLGNTDRHSIKKNLIGALLFDSGETAEATRLKRTARRRYTRRKNRICYLQEIFSNEMAKVDDSFFHRLEESFLVEEDKKHERHPIFGNIVDEVAYHEKYPTIYHLRKKLVDSTDKADLRLIYLALAHMIKFRGHFLIEGDLNPDNSDVDKLFIQLVQTYNQLFEENPINASGVDAKAILSARLSKSRRLENLIAQLPGEKKNGLFGNLIALSLGLTPNFKSNFDLAEDAKLQLSKDTYDDDLDNLLAQIGDQYADLFLAAKNLSDAILLSDILRVNTEITKAPLSASMIKRYDEHHQDLTLLKALVRQQLPEKYKEIFFDQSKNGYAGYIDGGASQEEFYKFIKPILEKMDGTEELLVKLNREDLLRKQRTFDNGSIPHQIHLGELHAILRRQEDFYPFLKDNREKIEKILTFRIPYYVGPLARGNSRFAWMTRKSEETITPWNFEEVVDKGASAQSFIERMTNFDKNLPNEKVLPKHSLLYEYFTVYNELTKVKYVTEGMRKPAFLSGEQKKAIVDLLFKTNRKVTVKQLKEDYFKKIECFDSVEISGVEDRFNASLGTYHDLLKIIKDKDFLDNEENEDILEDIVLTLTLFEDREMIEERLKTYAHLFDDKVMKQLKRRRYTGWGRLSRKLINGIRDKQSGKTILDFLKSDGFANRNFMQLIHDDSLTFKEDIQKAQVSGQGDSLHEHIANLAGSPAIKKGILQTVKVVDELVKVMGRHKPENIVIEMARENQTTQKGQKNSRERMKRIEEGIKELGSQILKEHPVENTQLQNEKLYLYYLQNGRDMYVDQELDINRLSDYDVDHIVPQSFLKDDSIDNKVLTRSDKARGKSDNVPSEEVVKKMKNYWRQLLNAKLITQRKFDNLTKAERGGLSELDKAGFIKRQLVETRQITKHVAQILDSRMNTKYDENDKLIREVKVITLKSKLVSDFRKDFQFYKVREINNYHHAHDAYLNAVVGTALIKKYPKLESEFVYGDYKVYDVRKMIAKSEQEIGKATAKYFFYSNIMNFFKTEITLANGEIRKRPLIETNGETGEIVWDKGRDFATVRKVLSMPQVNIVKKTEVQTGGFSKESILPKRNSDKLIARKKDWDPKKYGGFDSPTVAYSVLVVAKVEKGKSKKLKSVKELLGITIMERSSFEKNPIDFLEAKGYKEVKKDLIIKLPKYSLFELENGRKRMLASAGELQKGNELALPSKYVNFLYLASHYEKLKGSPEDNEQKQLFVEQHKHYLDEIIEQISEFSKRVILADANLDKVLSAYNKHRDKPIREQAENIIHLFTLTNLGAPAAFKYFDTTIDRKRYTSTKEVLDATLIHQSITGLYETRIDLSQLGGDGGEAAAKGGSGGTAPLEEEYRLFLEAPIQNVTLLEQWKREIPKVWAEINPPGLASTQAPIHVQLLSTALPVRVRQYPITLEAKRSLRETIRKFRAAGILRPVHSPWNTPLLPVRKSGTSEYRMVQDLREVNKRVETIHPTVPNPYTLLSLLPPDRIWYSVLDLKDAFFCIPLAPESQLIFAFEWADAEEGESGQLTWTRLPQGFKNSPTLFNEALNRDLQGFRLDHPSVSLLQYVDDLLIAADTQAACLSATRDLLMTLAELGYRVSGKKAQLCQEEVTYLGFKIHKGSRSLSNSRTQAILQIPVPKTKRQVREFLGKIGYCRLFIPGFAELAQPLYAATRPGNDPLVWGEKEEEAFQSLKLALTQPPALALPSLDKPFQLFVEETSGAAKGVLTQALGPWKRPVAYLSKRLDPVAAGWPRCLRAIAAAALLTREASKLTFGQDIEITSSHNLESLLRSPPDKWLTNARITQYQVLLLDPPRVRFKQTAALNPATLLPETDDTLPIHHCLDTLDSLTSTRPDLTDQPLAQAEATLFTDGSSYIRDGKRYAGAAVVTLDSVIWAEPLPIGTSAQKAELIALTKALEWSKDKSVNIYTDSRYAFATLHVHGMIYRERGWLTAGGKAIKNAPEILALLTAVWLPKRVAVMHCKGHQKDDAPTSTGNRRADEVAREVAIRPLSTQATISAGKRTADGSEFEKRTADGSEFESPKKKAKVE

SEQ ID NO: 1429 - protein, 2096 aa, synthetic construct
  source 1..2096: note = Description of Artificial Sequence: Synthetic polypeptide
MPAAKRVKLDGGDKKYSIGLDIGTNSVGWAVITDEYKVPSKKFKVLGNTDRHSIKKNLIGALLFDSGETAEATRLKRTARRRYTRRKNRICYLQEIFSNEMAKVDDSFFHRLEESFLVEEDKKHERHPIFGNIVDEVAYHEKYPTIYHLRKKLVDSTDKADLRLIYLALAHMIKFRGHFLIEGDLNPDNSDVDKLFIQLVQTYNQLFEENPINASGVDAKAILSARLSKSRRLENLIAQLPGEKKNGLFGNLIALSLGLTPNFKSNFDLAEDAKLQLSKDTYDDDLDNLLAQIGDQYADLFLAAKNLSDAILLSDILRVNTEITKAPLSASMIKRYDEHHQDLTLLKALVRQQLPEKYKEIFFDQSKNGYAGYIDGGASQEEFYKFIKPILEKMDGTEELLVKLNREDLLRKQRTFDNGSIPHQIHLGELHAILRRQEDFYPFLKDNREKIEKILTFRIPYYVGPLARGNSRFAWMTRKSEETITPWNFEEVVDKGASAQSFIERMTNFDKNLPNEKVLPKHSLLYEYFTVYNELTKVKYVTEGMRKPAFLSGEQKKAIVDLLFKTNRKVTVKQLKEDYFKKIECFDSVEISGVEDRFNASLGTYHDLLKIIKDKDFLDNEENEDILEDIVLTLTLFEDREMIEERLKTYAHLFDDKVMKQLKRRRYTGWGRLSRKLINGIRDKQSGKTILDFLKSDGFANRNFMQLIHDDSLTFKEDIQKAQVSGQGDSLHEHIANLAGSPAIKKGILQTVKVVDELVKVMGRHKPENIVIEMARENQTTQKGQKNSRERMKRIEEGIKELGSQILKEHPVENTQLQNEKLYLYYLQNGRDMYVDQELDINRLSDYDVDHIVPQSFLKDDSIDNKVLTRSDKARGKSDNVPSEEVVKKMKNYWRQLLNAKLITQRKFDNLTKAERGGLSELDKAGFIKRQLVETRQITKHVAQILDSRMNTKYDENDKLIREVKVITLKSKLVSDFRKDFQFYKVREINNYHHAHDAYLNAVVGTALIKKYPKLESEFVYGDYKVYDVRKMIAKSEQEIGKATAKYFFYSNIMNFFKTEITLANGEIRKRPLIETNGETGEIVWDKGRDFATVRKVLSMPQVNIVKKTEVQTGGFSKESILPKRNSDKLIARKKDWDPKKYGGFDSPTVAYSVLVVAKVEKGKSKKLKSVKELLGITIMERSSFEKNPIDFLEAKGYKEVKKDLIIKLPKYSLFELENGRKRMLASAGELQKGNELALPSKYVNFLYLASHYEKLKGSPEDNEQKQLFVEQHKHYLDEIIEQISEFSKRVILADANLDKVLSAYNKHRDKPIREQAENIIHLFTLTNLGAPAAFKYFDTTIDRKRYTSTKEVLDATLIHQSITGLYETRIDLSQLGGDGGPAPAPAPAPGGTAPLEEEYRLFLEAPIQNVTLLEQWKREIPKVWAEINPPGLASTQAPIHVQLLSTALPVRVRQYPITLEAKRSLRETIRKFRAAGILRPVHSPWNTPLLPVRKSGTSEYRMVQDLREVNKRVETIHPTVPNPYTLLSLLPPDRIWYSVLDLKDAFFCIPLAPESQLIFAFEWADAEEGESGQLTWTRLPQGFKNSPTLFNEALNRDLQGFRLDHPSVSLLQYVDDLLIAADTQAACLSATRDLLMTLAELGYRVSGKKAQLCQEEVTYLGFKIHKGSRSLSNSRTQAILQIPVPKTKRQVREFLGKIGYCRLFIPGFAELAQPLYAATRPGNDPLVWGEKEEEAFQSLKLALTQPPALALPSLDKPFQLFVEETSGAAKGVLTQALGPWKRPVAYLSKRLDPVAAGWPRCLRAIAAAALLTREASKLTFGQDIEITSSHNLESLLRSPPDKWLTNARITQYQVLLLDPPRVRFKQTAALNPATLLPETDDTLPIHHCLDTLDSLTSTRPDLTDQPLAQAEATLFTDGSSYIRDGKRYAGAAVVTLDSVIWAEPLPIGTSAQKAELIALTKALEWSKDKSVNIYTDSRYAFATLHVHGMIYRERGWLTAGGKAIKNAPEILALLTAVWLPKRVAVMHCKGHQKDDAPTSTGNRRADEVAREVAIRPLSTQATISAGKRTADGSEFEKRTADGSEFESPKKKAKVE

SEQ ID NO: 1430 - protein, 2093 aa, synthetic construct
  source 1..2093: note = Description of Artificial Sequence: Synthetic polypeptide
MPAAKRVKLDGGDKKYSIGLDIGTNSVGWAVITDEYKVPSKKFKVLGNTDRHSIKKNLIGALLFDSGETAEATRLKRTARRRYTRRKNRICYLQEIFSNEMAKVDDSFFHRLEESFLVEEDKKHERHPIFGNIVDEVAYHEKYPTIYHLRKKLVDSTDKADLRLIYLALAHMIKFRGHFLIEGDLNPDNSDVDKLFIQLVQTYNQLFEENPINASGVDAKAILSARLSKSRRLENLIAQLPGEKKNGLFGNLIALSLGLTPNFKSNFDLAEDAKLQLSKDTYDDDLDNLLAQIGDQYADLFLAAKNLSDAILLSDILRVNTEITKAPLSASMIKRYDEHHQDLTLLKALVRQQLPEKYKEIFFDQSKNGYAGYIDGGASQEEFYKFIKPILEKMDGTEELLVKLNREDLLRKQRTFDNGSIPHQIHLGELHAILRRQEDFYPFLKDNREKIEKILTFRIPYYVGPLARGNSRFAWMTRKSEETITPWNFEEVVDKGASAQSFIERMTNFDKNLPNEKVLPKHSLLYEYFTVYNELTKVKYVTEGMRKPAFLSGEQKKAIVDLLFKTNRKVTVKQLKEDYFKKIECFDSVEISGVEDRFNASLGTYHDLLKIIKDKDFLDNEENEDILEDIVLTLTLFEDREMIEERLKTYAHLFDDKVMKQLKRRRYTGWGRLSRKLINGIRDKQSGKTILDFLKSDGFANRNFMQLIHDDSLTFKEDIQKAQVSGQGDSLHEHIANLAGSPAIKKGILQTVKVVDELVKVMGRHKPENIVIEMARENQTTQKGQKNSRERMKRIEEGIKELGSQILKEHPVENTQLQNEKLYLYYLQNGRDMYVDQELDINRLSDYDVDHIVPQSFLKDDSIDNKVLTRSDKARGKSDNVPSEEVVKKMKNYWRQLLNAKLITQRKFDNLTKAERGGLSELDKAGFIKRQLVETRQITKHVAQILDSRMNTKYDENDKLIREVKVITLKSKLVSDFRKDFQFYKVREINNYHHAHDAYLNAVVGTALIKKYPKLESEFVYGDYKVYDVRKMIAKSEQEIGKATAKYFFYSNIMNFFKTEITLANGEIRKRPLIETNGETGEIVWDKGRDFATVRKVLSMPQVNIVKKTEVQTGGFSKESILPKRNSDKLIARKKDWDPKKYGGFDSPTVAYSVLVVAKVEKGKSKKLKSVKELLGITIMERSSFEKNPIDFLEAKGYKEVKKDLIIKLPKYSLFELENGRKRMLASAGELQKGNELALPSKYVNFLYLASHYEKLKGSPEDNEQKQLFVEQHKHYLDEIIEQISEFSKRVILADANLDKVLSAYNKHRDKPIREQAENIIHLFTLTNLGAPAAFKYFDTTIDRKRYTSTKEVLDATLIHQSITGLYETRIDLSQLGGDGGGSSGGGGGTAPLEEEYRLFLEAPIQNVTLLEQWKREIPKVWAEINPPGLASTQAPIHVQLLSTALPVRVRQYPITLEAKRSLRETIRKFRAAGILRPVHSPWNTPLLPVRKSGTSEYRMVQDLREVNKRVETIHPTVPNPYTLLSLLPPDRIWYSVLDLKDAFFCIPLAPESQLIFAFEWADAEEGESGQLTWTRLPQGFKNSPTLFNEALNRDLQGFRLDHPSVSLLQYVDDLLIAADTQAACLSATRDLLMTLAELGYRVSGKKAQLCQEEVTYLGFKIHKGSRSLSNSRTQAILQIPVPKTKRQVREFLGKIGYCRLFIPGFAELAQPLYAATRPGNDPLVWGEKEEEAFQSLKLALTQPPALALPSLDKPFQLFVEETSGAAKGVLTQALGPWKRPVAYLSKRLDPVAAGWPRCLRAIAAAALLTREASKLTFGQDIEITSSHNLESLLRSPPDKWLTNARITQYQVLLLDPPRVRFKQTAALNPATLLPETDDTLPIHHCLDTLDSLTSTRPDLTDQPLAQAEATLFTDGSSYIRDGKRYAGAAVVTLDSVIWAEPLPIGTSAQKAELIALTKALEWSKDKSVNIYTDSRYAFATLHVHGMIYRERGWLTAGGKAIKNAPEILALLTAVWLPKRVAVMHCKGHQKDDAPTSTGNRRADEVAREVAIRPLSTQATISAGKRTADGSEFEKRTADGSEFESPKKKAKVE

SEQ ID NO: 1431 - protein, 2098 aa, synthetic construct
  source 1..2098: note = Description of Artificial Sequence: Synthetic polypeptide
MPAAKRVKLDGGDKKYSIGLDIGTNSVGWAVITDEYKVPSKKFKVLGNTDRHSIKKNLIGALLFDSGETAEATRLKRTARRRYTRRKNRICYLQEIFSNEMAKVDDSFFHRLEESFLVEEDKKHERHPIFGNIVDEVAYHEKYPTIYHLRKKLVDSTDKADLRLIYLALAHMIKFRGHFLIEGDLNPDNSDVDKLFIQLVQTYNQLFEENPINASGVDAKAILSARLSKSRRLENLIAQLPGEKKNGLFGNLIALSLGLTPNFKSNFDLAEDAKLQLSKDTYDDDLDNLLAQIGDQYADLFLAAKNLSDAILLSDILRVNTEITKAPLSASMIKRYDEHHQDLTLLKALVRQQLPEKYKEIFFDQSKNGYAGYIDGGASQEEFYKFIKPILEKMDGTEELLVKLNREDLLRKQRTFDNGSIPHQIHLGELHAILRRQEDFYPFLKDNREKIEKILTFRIPYYVGPLARGNSRFAWMTRKSEETITPWNFEEVVDKGASAQSFIERMTNFDKNLPNEKVLPKHSLLYEYFTVYNELTKVKYVTEGMRKPAFLSGEQKKAIVDLLFKTNRKVTVKQLKEDYFKKIECFDSVEISGVEDRFNASLGTYHDLLKIIKDKDFLDNEENEDILEDIVLTLTLFEDREMIEERLKTYAHLFDDKVMKQLKRRRYTGWGRLSRKLINGIRDKQSGKTILDFLKSDGFANRNFMQLIHDDSLTFKEDIQKAQVSGQGDSLHEHIANLAGSPAIKKGILQTVKVVDELVKVMGRHKPENIVIEMARENQTTQKGQKNSRERMKRIEEGIKELGSQILKEHPVENTQLQNEKLYLYYLQNGRDMYVDQELDINRLSDYDVDHIVPQSFLKDDSIDNKVLTRSDKARGKSDNVPSEEVVKKMKNYWRQLLNAKLITQRKFDNLTKAERGGLSELDKAGFIKRQLVETRQITKHVAQILDSRMNTKYDENDKLIREVKVITLKSKLVSDFRKDFQFYKVREINNYHHAHDAYLNAVVGTALIKKYPKLESEFVYGDYKVYDVRKMIAKSEQEIGKATAKYFFYSNIMNFFKTEITLANGEIRKRPLIETNGETGEIVWDKGRDFATVRKVLSMPQVNIVKKTEVQTGGFSKESILPKRNSDKLIARKKDWDPKKYGGFDSPTVAYSVLVVAKVEKGKSKKLKSVKELLGITIMERSSFEKNPIDFLEAKGYKEVKKDLIIKLPKYSLFELENGRKRMLASAGELQKGNELALPSKYVNFLYLASHYEKLKGSPEDNEQKQLFVEQHKHYLDEIIEQISEFSKRVILADANLDKVLSAYNKHRDKPIREQAENIIHLFTLTNLGAPAAFKYFDTTIDRKRYTSTKEVLDATLIHQSITGLYETRIDLSQLGGDGGEAAAKGGSPAPGGTAPLEEEYRLFLEAPIQNVTLLEQWKREIPKVWAEINPPGLASTQAPIHVQLLSTALPVRVRQYPITLEAKRSLRETIRKFRAAGILRPVHSPWNTPLLPVRKSGTSEYRMVQDLREVNKRVETIHPTVPNPYTLLSLLPPDRIWYSVLDLKDAFFCIPLAPESQLIFAFEWADAEEGESGQLTWTRLPQGFKNSPTLFNEALNRDLQGFRLDHPSVSLLQYVDDLLIAADTQAACLSATRDLLMTLAELGYRVSGKKAQLCQEEVTYLGFKIHKGSRSLSNSRTQAILQIPVPKTKRQVREFLGKIGYCRLFIPGFAELAQPLYAATRPGNDPLVWGEKEEEAFQSLKLALTQPPALALPSLDKPFQLFVEETSGAAKGVLTQALGPWKRPVAYLSKRLDPVAAGWPRCLRAIAAAALLTREASKLTFGQDIEITSSHNLESLLRSPPDKWLTNARITQYQVLLLDPPRVRFKQTAALNPATLLPETDDTLPIHHCLDTLDSLTSTRPDLTDQPLAQAEATLFTDGSSYIRDGKRYAGAAVVTLDSVIWAEPLPIGTSAQKAELIALTKALEWSKDKSVNIYTDSRYAFATLHVHGMIYRERGWLTAGGKAIKNAPEILALLTAVWLPKRVAVMHCKGHQKDDAPTSTGNRRADEVAREVAIRPLSTQATISAGKRTADGSEFEKRTADGSEFESPKKKAKVE

SEQ ID NO: 1432 - protein, 2096 aa, synthetic construct
  source 1..2096: note = Description of Artificial Sequence: Synthetic polypeptide
MPAAKRVKLDGGDKKYSIGLDIGTNSVGWAVITDEYKVPSKKFKVLGNTDRHSIKKNLIGALLFDSGETAEATRLKRTARRRYTRRKNRICYLQEIFSNEMAKVDDSFFHRLEESFLVEEDKKHERHPIFGNIVDEVAYHEKYPTIYHLRKKLVDSTDKADLRLIYLALAHMIKFRGHFLIEGDLNPDNSDVDKLFIQLVQTYNQLFEENPINASGVDAKAILSARLSKSRRLENLIAQLPGEKKNGLFGNLIALSLGLTPNFKSNFDLAEDAKLQLSKDTYDDDLDNLLAQIGDQYADLFLAAKNLSDAILLSDILRVNTEITKAPLSASMIKRYDEHHQDLTLLKALVRQQLPEKYKEIFFDQSKNGYAGYIDGGASQEEFYKFIKPILEKMDGTEELLVKLNREDLLRKQRTFDNGSIPHQIHLGELHAILRRQEDFYPFLKDNREKIEKILTFRIPYYVGPLARGNSRFAWMTRKSEETITPWNFEEVVDKGASAQSFIERMTNFDKNLPNEKVLPKHSLLYEYFTVYNELTKVKYVTEGMRKPAFLSGEQKKAIVDLLFKTNRKVTVKQLKEDYFKKIECFDSVEISGVEDRFNASLGTYHDLLKIIKDKDFLDNEENEDILEDIVLTLTLFEDREMIEERLKTYAHLFDDKVMKQLKRRRYTGWGRLSRKLINGIRDKQSGKTILDFLKSDGFANRNFMQLIHDDSLTFKEDIQKAQVSGQGDSLHEHIANLAGSPAIKKGILQTVKVVDELVKVMGRHKPENIVIEMARENQTTQKGQKNSRERMKRIEEGIKELGSQILKEHPVENTQLQNEKLYLYYLQNGRDMYVDQELDINRLSDYDVDHIVPQSFLKDDSIDNKVLTRSDKARGKSDNVPSEEVVKKMKNYWRQLLNAKLITQRKFDNLTKAERGGLSELDKAGFIKRQLVETRQITKHVAQILDSRMNTKYDENDKLIREVKVITLKSKLVSDFRKDFQFYKVREINNYHHAHDAYLNAVVGTALIKKYPKLESEFVYGDYKVYDVRKMIAKSEQEIGKATAKYFFYSNIMNFFKTEITLANGEIRKRPLIETNGETGEIVWDKGRDFATVRKVLSMPQVNIVKKTEVQTGGFSKESILPKRNSDKLIARKKDWDPKKYGGFDSPTVAYSVLVVAKVEKGKSKKLKSVKELLGITIMERSSFEKNPIDFLEAKGYKEVKKDLIIKLPKYSLFELENGRKRMLASAGELQKGNELALPSKYVNFLYLASHYEKLKGSPEDNEQKQLFVEQHKHYLDEIIEQISEFSKRVILADANLDKVLSAYNKHRDKPIREQAENIIHLFTLTNLGAPAAFKYFDTTIDRKRYTSTKEVLDATLIHQSITGLYETRIDLSQLGGDGGGGGGGSPAPGGTAPLEEEYRLFLEAPIQNVTLLEQWKREIPKVWAEINPPGLASTQAPIHVQLLSTALPVRVRQYPITLEAKRSLRETIRKFRAAGILRPVHSPWNTPLLPVRKSGTSEYRMVQDLREVNKRVETIHPTVPNPYTLLSLLPPDRIWYSVLDLKDAFFCIPLAPESQLIFAFEWADAEEGESGQLTWTRLPQGFKNSPTLFNEALNRDLQGFRLDHPSVSLLQYVDDLLIAADTQAACLSATRDLLMTLAELGYRVSGKKAQLCQEEVTYLGFKIHKGSRSLSNSRTQAILQIPVPKTKRQVREFLGKIGYCRLFIPGFAELAQPLYAATRPGNDPLVWGEKEEEAFQSLKLALTQPPALALPSLDKPFQLFVEETSGAAKGVLTQALGPWKRPVAYLSKRLDPVAAGWPRCLRAIAAAALLTREASKLTFGQDIEITSSHNLESLLRSPPDKWLTNARITQYQVLLLDPPRVRFKQTAALNPATLLPETDDTLPIHHCLDTLDSLTSTRPDLTDQPLAQAEATLFTDGSSYIRDGKRYAGAAVVTLDSVIWAEPLPIGTSAQKAELIALTKALEWSKDKSVNIYTDSRYAFATLHVHGMIYRERGWLTAGGKAIKNAPEILALLTAVWLPKRVAVMHCKGHQKDDAPTSTGNRRADEVAREVAIRPLSTQATISAGKRTADGSEFEKRTADGSEFESPKKKAKVE

SEQ ID NO: 1433 - protein, 2098 aa, synthetic construct
  source 1..2098: note = Description of Artificial Sequence: Synthetic polypeptide
MPAAKRVKLDGGDKKYSIGLDIGTNSVGWAVITDEYKVPSKKFKVLGNTDRHSIKKNLIGALLFDSGETAEATRLKRTARRRYTRRKNRICYLQEIFSNEMAKVDDSFFHRLEESFLVEEDKKHERHPIFGNIVDEVAYHEKYPTIYHLRKKLVDSTDKADLRLIYLALAHMIKFRGHFLIEGDLNPDNSDVDKLFIQLVQTYNQLFEENPINASGVDAKAILSARLSKSRRLENLIAQLPGEKKNGLFGNLIALSLGLTPNFKSNFDLAEDAKLQLSKDTYDDDLDNLLAQIGDQYADLFLAAKNLSDAILLSDILRVNTEITKAPLSASMIKRYDEHHQDLTLLKALVRQQLPEKYKEIFFDQSKNGYAGYIDGGASQEEFYKFIKPILEKMDGTEELLVKLNREDLLRKQRTFDNGSIPHQIHLGELHAILRRQEDFYPFLKDNREKIEKILTFRIPYYVGPLARGNSRFAWMTRKSEETITPWNFEEVVDKGASAQSFIERMTNFDKNLPNEKVLPKHSLLYEYFTVYNELTKVKYVTEGMRKPAFLSGEQKKAIVDLLFKTNRKVTVKQLKEDYFKKIECFDSVEISGVEDRFNASLGTYHDLLKIIKDKDFLDNEENEDILEDIVLTLTLFEDREMIEERLKTYAHLFDDKVMKQLKRRRYTGWGRLSRKLINGIRDKQSGKTILDFLKSDGFANRNFMQLIHDDSLTFKEDIQKAQVSGQGDSLHEHIANLAGSPAIKKGILQTVKVVDELVKVMGRHKPENIVIEMARENQTTQKGQKNSRERMKRIEEGIKELGSQILKEHPVENTQLQNEKLYLYYLQNGRDMYVDQELDINRLSDYDVDHIVPQSFLKDDSIDNKVLTRSDKARGKSDNVPSEEVVKKMKNYWRQLLNAKLITQRKFDNLTKAERGGLSELDKAGFIKRQLVETRQITKHVAQILDSRMNTKYDENDKLIREVKVITLKSKLVSDFRKDFQFYKVREINNYHHAHDAYLNAVVGTALIKKYPKLESEFVYGDYKVYDVRKMIAKSEQEIGKATAKYFFYSNIMNFFKTEITLANGEIRKRPLIETNGETGEIVWDKGRDFATVRKVLSMPQVNIVKKTEVQTGGFSKESILPKRNSDKLIARKKDWDPKKYGGFDSPTVAYSVLVVAKVEKGKSKKLKSVKELLGITIMERSSFEKNPIDFLEAKGYKEVKKDLIIKLPKYSLFELENGRKRMLASAGELQKGNELALPSKYVNFLYLASHYEKLKGSPEDNEQKQLFVEQHKHYLDEIIEQISEFSKRVILADANLDKVLSAYNKHRDKPIREQAENIIHLFTLTNLGAPAAFKYFDTTIDRKRYTSTKEVLDATLIHQSITGLYETRIDLSQLGGDGGGGSEAAAKPAPGGTAPLEEEYRLFLEAPIQNVTLLEQWKREIPKVWAEINPPGLASTQAPIHVQLLSTALPVRVRQYPITLEAKRSLRETIRKFRAAGILRPVHSPWNTPLLPVRKSGTSEYRMVQDLREVNKRVETIHPTVPNPYTLLSLLPPDRIWYSVLDLKDAFFCIPLAPESQLIFAFEWADAEEGESGQLTWTRLPQGFKNSPTLFNEALNRDLQGFRLDHPSVSLLQYVDDLLIAADTQAACLSATRDLLMTLAELGYRVSGKKAQLCQEEVTYLGFKIHKGSRSLSNSRTQAILQIPVPKTKRQVREFLGKIGYCRLFIPGFAELAQPLYAATRPGNDPLVWGEKEEEAFQSLKLALTQPPALALPSLDKPFQLFVEETSGAAKGVLTQALGPWKRPVAYLSKRLDPVAAGWPRCLRAIAAAALLTREASKLTFGQDIEITSSHNLESLLRSPPDKWLTNARITQYQVLLLDPPRVRFKQTAALNPATLLPETDDTLPIHHCLDTLDSLTSTRPDLTDQPLAQAEATLFTDGSSYIRDGKRYAGAAVVTLDSVIWAEPLPIGTSAQKAELIALTKALEWSKDKSVNIYTDSRYAFATLHVHGMIYRERGWLTAGGKAIKNAPEILALLTAVWLPKRVAVMHCKGHQKDDAPTSTGNRRADEVAREVAIRPLSTQATISAGKRTADGSEFEKRTADGSEFESPKKKAKVE

SEQ ID NO: 1434 - protein, 2093 aa, synthetic construct
  source 1..2093: note = Description of Artificial Sequence: Synthetic polypeptide
MPAAKRVKLDGGDKKYSIGLDIGTNSVGWAVITDEYKVPSKKFKVLGNTDRHSIKKNLIGALLFDSGETAEATRLKRTARRRYTRRKNRICYLQEIFSNEMAKVDDSFFHRLEESFLVEEDKKHERHPIFGNIVDEVAYHEKYPTIYHLRKKLVDSTDKADLRLIYLALAHMIKFRGHFLIEGDLNPDNSDVDKLFIQLVQTYNQLFEENPINASGVDAKAILSARLSKSRRLENLIAQLPGEKKNGLFGNLIALSLGLTPNFKSNFDLAEDAKLQLSKDTYDDDLDNLLAQIGDQYADLFLAAKNLSDAILLSDILRVNTEITKAPLSASMIKRYDEHHQDLTLLKALVRQQLPEKYKEIFFDQSKNGYAGYIDGGASQEEFYKFIKPILEKMDGTEELLVKLNREDLLRKQRTFDNGSIPHQIHLGELHAILRRQEDFYPFLKDNREKIEKILTFRIPYYVGPLARGNSRFAWMTRKSEETITPWNFEEVVDKGASAQSFIERMTNFDKNLPNEKVLPKHSLLYEYFTVYNELTKVKYVTEGMRKPAFLSGEQKKAIVDLLFKTNRKVTVKQLKEDYFKKIECFDSVEISGVEDRFNASLGTYHDLLKIIKDKDFLDNEENEDILEDIVLTLTLFEDREMIEERLKTYAHLFDDKVMKQLKRRRYTGWGRLSRKLINGIRDKQSGKTILDFLKSDGFANRNFMQLIHDDSLTFKEDIQKAQVSGQGDSLHEHIANLAGSPAIKKGILQTVKVVDELVKVMGRHKPENIVIEMARENQTTQKGQKNSRERMKRIEEGIKELGSQILKEHPVENTQLQNEKLYLYYLQNGRDMYVDQELDINRLSDYDVDHIVPQSFLKDDSIDNKVLTRSDKARGKSDNVPSEEVVKKMKNYWRQLLNAKLITQRKFDNLTKAERGGLSELDKAGFIKRQLVETRQITKHVAQILDSRMNTKYDENDKLIREVKVITLKSKLVSDFRKDFQFYKVREINNYHHAHDAYLNAVVGTALIKKYPKLESEFVYGDYKVYDVRKMIAKSEQEIGKATAKYFFYSNIMNFFKTEITLANGEIRKRPLIETNGETGEIVWDKGRDFATVRKVLSMPQVNIVKKTEVQTGGFSKESILPKRNSDKLIARKKDWDPKKYGGFDSPTVAYSVLVVAKVEKGKSKKLKSVKELLGITIMERSSFEKNPIDFLEAKGYKEVKKDLIIKLPKYSLFELENGRKRMLASAGELQKGNELALPSKYVNFLYLASHYEKLKGSPEDNEQKQLFVEQHKHYLDEIIEQISEFSKRVILADANLDKVLSAYNKHRDKPIREQAENIIHLFTLTNLGAPAAFKYFDTTIDRKRYTSTKEVLDATLIHQSITGLYETRIDLSQLGGDGGGGSGGSGGTAPLEEEYRLFLEAPIQNVTLLEQWKREIPKVWAEINPPGLASTQAPIHVQLLSTALPVRVRQYPITLEAKRSLRETIRKFRAAGILRPVHSPWNTPLLPVRKSGTSEYRMVQDLREVNKRVETIHPTVPNPYTLLSLLPPDRIWYSVLDLKDAFFCIPLAPESQLIFAFEWADAEEGESGQLTWTRLPQGFKNSPTLFNEALNRDLQGFRLDHPSVSLLQYVDDLLIAADTQAACLSATRDLLMTLAELGYRVSGKKAQLCQEEVTYLGFKIHKGSRSLSNSRTQAILQIPVPKTKRQVREFLGKIGYCRLFIPGFAELAQPLYAATRPGNDPLVWGEKEEEAFQSLKLALTQPPALALPSLDKPFQLFVEETSGAAKGVLTQALGPWKRPVAYLSKRLDPVAAGWPRCLRAIAAAALLTREASKLTFGQDIEITSSHNLESLLRSPPDKWLTNARITQYQVLLLDPPRVRFKQTAALNPATLLPETDDTLPIHHCLDTLDSLTSTRPDLTDQPLAQAEATLFTDGSSYIRDGKRYAGAAVVTLDSVIWAEPLPIGTSAQKAELIALTKALEWSKDKSVNIYTDSRYAFATLHVHGMIYRERGWLTAGGKAIKNAPEILALLTAVWLPKRVAVMHCKGHQKDDAPTSTGNRRADEVAREVAIRPLSTQATISAGKRTADGSEFEKRTADGSEFESPKKKAKVE

SEQ ID NO: 1435 - protein, 2091 aa, synthetic construct
  source 1..2091: note = Description of Artificial Sequence: Synthetic polypeptide
MPAAKRVKLDGGDKKYSIGLDIGTNSVGWAVITDEYKVPSKKFKVLGNTDRHSIKKNLIGALLFDSGETAEATRLKRTARRRYTRRKNRICYLQEIFSNEMAKVDDSFFHRLEESFLVEEDKKHERHPIFGNIVDEVAYHEKYPTIYHLRKKLVDSTDKADLRLIYLALAHMIKFRGHFLIEGDLNPDNSDVDKLFIQLVQTYNQLFEENPINASGVDAKAILSARLSKSRRLENLIAQLPGEKKNGLFGNLIALSLGLTPNFKSNFDLAEDAKLQLSKDTYDDDLDNLLAQIGDQYADLFLAAKNLSDAILLSDILRVNTEITKAPLSASMIKRYDEHHQDLTLLKALVRQQLPEKYKEIFFDQSKNGYAGYIDGGASQEEFYKFIKPILEKMDGTEELLVKLNREDLLRKQRTFDNGSIPHQIHLGELHAILRRQEDFYPFLKDNREKIEKILTFRIPYYVGPLARGNSRFAWMTRKSEETITPWNFEEVVDKGASAQSFIERMTNFDKNLPNEKVLPKHSLLYEYFTVYNELTKVKYVTEGMRKPAFLSGEQKKAIVDLLFKTNRKVTVKQLKEDYFKKIECFDSVEISGVEDRFNASLGTYHDLLKIIKDKDFLDNEENEDILEDIVLTLTLFEDREMIEERLKTYAHLFDDKVMKQLKRRRYTGWGRLSRKLINGIRDKQSGKTILDFLKSDGFANRNFMQLIHDDSLTFKEDIQKAQVSGQGDSLHEHIANLAGSPAIKKGILQTVKVVDELVKVMGRHKPENIVIEMARENQTTQKGQKNSRERMKRIEEGIKELGSQILKEHPVENTQLQNEKLYLYYLQNGRDMYVDQELDINRLSDYDVDHIVPQSFLKDDSIDNKVLTRSDKARGKSDNVPSEEVVKKMKNYWRQLLNAKLITQRKFDNLTKAERGGLSELDKAGFIKRQLVETRQITKHVAQILDSRMNTKYDENDKLIREVKVITLKSKLVSDFRKDFQFYKVREINNYHHAHDAYLNAVVGTALIKKYPKLESEFVYGDYKVYDVRKMIAKSEQEIGKATAKYFFYSNIMNFFKTEITLANGEIRKRPLIETNGETGEIVWDKGRDFATVRKVLSMPQVNIVKKTEVQTGGFSKESILPKRNSDKLIARKKDWDPKKYGGFDSPTVAYSVLVVAKVEKGKSKKLKSVKELLGITIMERSSFEKNPIDFLEAKGYKEVKKDLIIKLPKYSLFELENGRKRMLASAGELQKGNELALPSKYVNFLYLASHYEKLKGSPEDNEQKQLFVEQHKHYLDEIIEQISEFSKRVILADANLDKVLSAYNKHRDKPIREQAENIIHLFTLTNLGAPAAFKYFDTTIDRKRYTSTKEVLDATLIHQSITGLYETRIDLSQLGGDGGGGGGGGTAPLEEEYRLFLEAPIQNVTLLEQWKREIPKVWAEINPPGLASTQAPIHVQLLSTALPVRVRQYPITLEAKRSLRETIRKFRAAGILRPVHSPWNTPLLPVRKSGTSEYRMVQDLREVNKRVETIHPTVPNPYTLLSLLPPDRIWYSVLDLKDAFFCIPLAPESQLIFAFEWADAEEGESGQLTWTRLPQGFKNSPTLFNEALNRDLQGFRLDHPSVSLLQYVDDLLIAADTQAACLSATRDLLMTLAELGYRVSGKKAQLCQEEVTYLGFKIHKGSRSLSNSRTQAILQIPVPKTKRQVREFLGKIGYCRLFIPGFAELAQPLYAATRPGNDPLVWGEKEEEAFQSLKLALTQPPALALPSLDKPFQLFVEETSGAAKGVLTQALGPWKRPVAYLSKRLDPVAAGWPRCLRAIAAAALLTREASKLTFGQDIEITSSHNLESLLRSPPDKWLTNARITQYQVLLLDPPRVRFKQTAALNPATLLPETDDTLPIHHCLDTLDSLTSTRPDLTDQPLAQAEATLFTDGSSYIRDGKRYAGAAVVTLDSVIWAEPLPIGTSAQKAELIALTKALEWSKDKSVNIYTDSRYAFATLHVHGMIYRERGWLTAGGKAIKNAPEILALLTAVWLPKRVAVMHCKGHQKDDAPTSTGNRRADEVAREVAIRPLSTQATISAGKRTADGSEFEKRTADGSEFESPKKKAKVE

SEQ ID NO: 1436 - protein, 2096 aa, synthetic construct
  source 1..2096: note = Description of Artificial Sequence: Synthetic polypeptide
MPAAKRVKLDGGDKKYSIGLDIGTNSVGWAVITDEYKVPSKKFKVLGNTDRHSIKKNLIGALLFDSGETAEATRLKRTARRRYTRRKNRICYLQEIFSNEMAKVDDSFFHRLEESFLVEEDKKHERHPIFGNIVDEVAYHEKYPTIYHLRKKLVDSTDKADLRLIYLALAHMIKFRGHFLIEGDLNPDNSDVDKLFIQLVQTYNQLFEENPINASGVDAKAILSARLSKSRRLENLIAQLPGEKKNGLFGNLIALSLGLTPNFKSNFDLAEDAKLQLSKDTYDDDLDNLLAQIGDQYADLFLAAKNLSDAILLSDILRVNTEITKAPLSASMIKRYDEHHQDLTLLKALVRQQLPEKYKEIFFDQSKNGYAGYIDGGASQEEFYKFIKPILEKMDGTEELLVKLNREDLLRKQRTFDNGSIPHQIHLGELHAILRRQEDFYPFLKDNREKIEKILTFRIPYYVGPLARGNSRFAWMTRKSEETITPWNFEEVVDKGASAQSFIERMTNFDKNLPNEKVLPKHSLLYEYFTVYNELTKVKYVTEGMRKPAFLSGEQKKAIVDLLFKTNRKVTVKQLKEDYFKKIECFDSVEISGVEDRFNASLGTYHDLLKIIKDKDFLDNEENEDILEDIVLTLTLFEDREMIEERLKTYAHLFDDKVMKQLKRRRYTGWGRLSRKLINGIRDKQSGKTILDFLKSDGFANRNFMQLIHDDSLTFKEDIQKAQVSGQGDSLHEHIANLAGSPAIKKGILQTVKVVDELVKVMGRHKPENIVIEMARENQTTQKGQKNSRERMKRIEEGIKELGSQILKEHPVENTQLQNEKLYLYYLQNGRDMYVDQELDINRLSDYDVDHIVPQSFLKDDSIDNKVLTRSDKARGKSDNVPSEEVVKKMKNYWRQLLNAKLITQRKFDNLTKAERGGLSELDKAGFIKRQLVETRQITKHVAQILDSRMNTKYDENDKLIREVKVITLKSKLVSDFRKDFQFYKVREINNYHHAHDAYLNAVVGTALIKKYPKLESEFVYGDYKVYDVRKMIAKSEQEIGKATAKYFFYSNIMNFFKTEITLANGEIRKRPLIETNGETGEIVWDKGRDFATVRKVLSMPQVNIVKKTEVQTGGFSKESILPKRNSDKLIARKKDWDPKKYGGFDSPTVAYSVLVVAKVEKGKSKKLKSVKELLGITIMERSSFEKNPIDFLEAKGYKEVKKDLIIKLPKYSLFELENGRKRMLASAGELQKGNELALPSKYVNFLYLASHYEKLKGSPEDNEQKQLFVEQHKHYLDEIIEQISEFSKRVILADANLDKVLSAYNKHRDKPIREQAENIIHLFTLTNLGAPAAFKYFDTTIDRKRYTSTKEVLDATLIHQSITGLYETRIDLSQLGGDGGPAPGGGGGSGGTAPLEEEYRLFLEAPIQNVTLLEQWKREIPKVWAEINPPGLASTQAPIHVQLLSTALPVRVRQYPITLEAKRSLRETIRKFRAAGILRPVHSPWNTPLLPVRKSGTSEYRMVQDLREVNKRVETIHPTVPNPYTLLSLLPPDRIWYSVLDLKDAFFCIPLAPESQLIFAFEWADAEEGESGQLTWTRLPQGFKNSPTLFNEALNRDLQGFRLDHPSVSLLQYVDDLLIAADTQAACLSATRDLLMTLAELGYRVSGKKAQLCQEEVTYLGFKIHKGSRSLSNSRTQAILQIPVPKTKRQVREFLGKIGYCRLFIPGFAELAQPLYAATRPGNDPLVWGEKEEEAFQSLKLALTQPPALALPSLDKPFQLFVEETSGAAKGVLTQALGPWKRPVAYLSKRLDPVAAGWPRCLRAIAAAALLTREASKLTFGQDIEITSSHNLESLLRSPPDKWLTNARITQYQVLLLDPPRVRFKQTAALNPATLLPETDDTLPIHHCLDTLDSLTSTRPDLTDQPLAQAEATLFTDGSSYIRDGKRYAGAAVVTLDSVIWAEPLPIGTSAQKAELIALTKALEWSKDKSVNIYTDSRYAFATLHVHGMIYRERGWLTAGGKAIKNAPEILALLTAVWLPKRVAVMHCKGHQKDDAPTSTGNRRADEVAREVAIRPLSTQATISAGKRTADGSEFEKRTADGSEFESPKKKAKVE

SEQ ID NO: 1437 - protein, 2096 aa, synthetic construct
  source 1..2096: note = Description of Artificial Sequence: Synthetic polypeptide
MPAAKRVKLDGGDKKYSIGLDIGTNSVGWAVITDEYKVPSKKFKVLGNTDRHSIKKNLIGALLFDSGETAEATRLKRTARRRYTRRKNRICYLQEIFSNEMAKVDDSFFHRLEESFLVEEDKKHERHPIFGNIVDEVAYHEKYPTIYHLRKKLVDSTDKADLRLIYLALAHMIKFRGHFLIEGDLNPDNSDVDKLFIQLVQTYNQLFEENPINASGVDAKAILSARLSKSRRLENLIAQLPGEKKNGLFGNLIALSLGLTPNFKSNFDLAEDAKLQLSKDTYDDDLDNLLAQIGDQYADLFLAAKNLSDAILLSDILRVNTEITKAPLSASMIKRYDEHHQDLTLLKALVRQQLPEKYKEIFFDQSKNGYAGYIDGGASQEEFYKFIKPILEKMDGTEELLVKLNREDLLRKQRTFDNGSIPHQIHLGELHAILRRQEDFYPFLKDNREKIEKILTFRIPYYVGPLARGNSRFAWMTRKSEETITPWNFEEVVDKGASAQSFIERMTNFDKNLPNEKVLPKHSLLYEYFTVYNELTKVKYVTEGMRKPAFLSGEQKKAIVDLLFKTNRKVTVKQLKEDYFKKIECFDSVEISGVEDRFNASLGTYHDLLKIIKDKDFLDNEENEDILEDIVLTLTLFEDREMIEERLKTYAHLFDDKVMKQLKRRRYTGWGRLSRKLINGIRDKQSGKTILDFLKSDGFANRNFMQLIHDDSLTFKEDIQKAQVSGQGDSLHEHIANLAGSPAIKKGILQTVKVVDELVKVMGRHKPENIVIEMARENQTTQKGQKNSRERMKRIEEGIKELGSQILKEHPVENTQLQNEKLYLYYLQNGRDMYVDQELDINRLSDYDVDHIVPQSFLKDDSIDNKVLTRSDKARGKSDNVPSEEVVKKMKNYWRQLLNAKLITQRKFDNLTKAERGGLSELDKAGFIKRQLVETRQITKHVAQILDSRMNTKYDENDKLIREVKVITLKSKLVSDFRKDFQFYKVREINNYHHAHDAYLNAVVGTALIKKYPKLESEFVYGDYKVYDVRKMIAKSEQEIGKATAKYFFYSNIMNFFKTEITLANGEIRKRPLIETNGETGEIVWDKGRDFATVRKVLSMPQVNIVKKTEVQTGGFSKESILPKRNSDKLIARKKDWDPKKYGGFDSPTVAYSVLVVAKVEKGKSKKLKSVKELLGITIMERSSFEKNPIDFLEAKGYKEVKKDLIIKLPKYSLFELENGRKRMLASAGELQKGNELALPSKYVNFLYLASHYEKLKGSPEDNEQKQLFVEQHKHYLDEIIEQISEFSKRVILADANLDKVLSAYNKHRDKPIREQAENIIHLFTLTNLGAPAAFKYFDTTIDRKRYTSTKEVLDATLIHQSITGLYETRIDLSQLGGDGGGSSGGSGGGGGTAPLEEEYRLFLEAPIQNVTLLEQWKREIPKVWAEINPPGLASTQAPIHVQLLSTALPVRVRQYPITLEAKRSLRETIRKFRAAGILRPVHSPWNTPLLPVRKSGTSEYRMVQDLREVNKRVETIHPTVPNPYTLLSLLPPDRIWYSVLDLKDAFFCIPLAPESQLIFAFEWADAEEGESGQLTWTRLPQGFKNSPTLFNEALNRDLQGFRLDHPSVSLLQYVDDLLIAADTQAACLSATRDLLMTLAELGYRVSGKKAQLCQEEVTYLGFKIHKGSRSLSNSRTQAILQIPVPKTKRQVREFLGKIGYCRLFIPGFAELAQPLYAATRPGNDPLVWGEKEEEAFQSLKLALTQPPALALPSLDKPFQLFVEETSGAAKGVLTQALGPWKRPVAYLSKRLDPVAAGWPRCLRAIAAAALLTREASKLTFGQDIEITSSHNLESLLRSPPDKWLTNARITQYQVLLLDPPRVRFKQTAALNPATLLPETDDTLPIHHCLDTLDSLTSTRPDLTDQPLAQAEATLFTDGSSYIRDGKRYAGAAVVTLDSVIWAEPLPIGTSAQKAELIALTKALEWSKDKSVNIYTDSRYAFATLHVHGMIYRERGWLTAGGKAIKNAPEILALLTAVWLPKRVAVMHCKGHQKDDAPTSTGNRRADEVAREVAIRPLSTQATISAGKRTADGSEFEKRTADGSEFESPKKKAKVE

SEQ ID NO: 1438 - protein, 2092 aa, synthetic construct
  source 1..2092: note = Description of Artificial Sequence: Synthetic polypeptide
MPAAKRVKLDGGDKKYSIGLDIGTNSVGWAVITDEYKVPSKKFKVLGNTDRHSIKKNLIGALLFDSGETAEATRLKRTARRRYTRRKNRICYLQEIFSNEMAKVDDSFFHRLEESFLVEEDKKHERHPIFGNIVDEVAYHEKYPTIYHLRKKLVDSTDKADLRLIYLALAHMIKFRGHFLIEGDLNPDNSDVDKLFIQLVQTYNQLFEENPINASGVDAKAILSARLSKSRRLENLIAQLPGEKKNGLFGNLIALSLGLTPNFKSNFDLAEDAKLQLSKDTYDDDLDNLLAQIGDQYADLFLAAKNLSDAILLSDILRVNTEITKAPLSASMIKRYDEHHQDLTLLKALVRQQLPEKYKEIFFDQSKNGYAGYIDGGASQEEFYKFIKPILEKMDGTEELLVKLNREDLLRKQRTFDNGSIPHQIHLGELHAILRRQEDFYPFLKDNREKIEKILTFRIPYYVGPLARGNSRFAWMTRKSEETITPWNFEEVVDKGASAQSFIERMTNFDKNLPNEKVLPKHSLLYEYFTVYNELTKVKYVTEGMRKPAFLSGEQKKAIVDLLFKTNRKVTVKQLKEDYFKKIECFDSVEISGVEDRFNASLGTYHDLLKIIKDKDFLDNEENEDILEDIVLTLTLFEDREMIEERLKTYAHLFDDKVMKQLKRRRYTGWGRLSRKLINGIRDKQSGKTILDFLKSDGFANRNFMQLIHDDSLTFKEDIQKAQVSGQGDSLHEHIANLAGSPAIKKGILQTVKVVDELVKVMGRHKPENIVIEMARENQTTQKGQKNSRERMKRIEEGIKELGSQILKEHPVENTQLQNEKLYLYYLQNGRDMYVDQELDINRLSDYDVDHIVPQSFLKDDSIDNKVLTRSDKARGKSDNVPSEEVVKKMKNYWRQLLNAKLITQRKFDNLTKAERGGLSELDKAGFIKRQLVETRQITKHVAQILDSRMNTKYDENDKLIREVKVITLKSKLVSDFRKDFQFYKVREINNYHHAHDAYLNAVVGTALIKKYPKLESEFVYGDYKVYDVRKMIAKSEQEIGKATAKYFFYSNIMNFFKTEITLANGEIRKRPLIETNGETGEIVWDKGRDFATVRKVLSMPQVNIVKKTEVQTGGFSKESILPKRNSDKLIARKKDWDPKKYGGFDSPTVAYSVLVVAKVEKGKSKKLKSVKELLGITIMERSSFEKNPIDFLEAKGYKEVKKDLIIKLPKYSLFELENGRKRMLASAGELQKGNELALPSKYVNFLYLASHYEKLKGSPEDNEQKQLFVEQHKHYLDEIIEQISEFSKRVILADANLDKVLSAYNKHRDKPIREQAENIIHLFTLTNLGAPAAFKYFDTTIDRKRYTSTKEVLDATLIHQSITGLYETRIDLSQLGGDGGGGGGGGGTAPLEEEYRLFLEAPIQNVTLLEQWKREIPKVWAEINPPGLASTQAPIHVQLLSTALPVRVRQYPITLEAKRSLRETIRKFRAAGILRPVHSPWNTPLLPVRKSGTSEYRMVQDLREVNKRVETIHPTVPNPYTLLSLLPPDRIWYSVLDLKDAFFCIPLAPESQLIFAFEWADAEEGESGQLTWTRLPQGFKNSPTLFNEALNRDLQGFRLDHPSVSLLQYVDDLLIAADTQAACLSATRDLLMTLAELGYRVSGKKAQLCQEEVTYLGFKIHKGSRSLSNSRTQAILQIPVPKTKRQVREFLGKIGYCRLFIPGFAELAQPLYAATRPGNDPLVWGEKEEEAFQSLKLALTQPPALALPSLDKPFQLFVEETSGAAKGVLTQALGPWKRPVAYLSKRLDPVAAGWPRCLRAIAAAALLTREASKLTFGQDIEITSSHNLESLLRSPPDKWLTNARITQYQVLLLDPPRVRFKQTAALNPATLLPETDDTLPIHHCLDTLDSLTSTRPDLTDQPLAQAEATLFTDGSSYIRDGKRYAGAAVVTLDSVIWAEPLPIGTSAQKAELIALTKALEWSKDKSVNIYTDSRYAFATLHVHGMIYRERGWLTAGGKAIKNAPEILALLTAVWLPKRVAVMHCKGHQKDDAPTSTGNRRADEVAREVAIRPLSTQATISAGKRTADGSEFEKRTADGSEFESPKKKAKVE

SEQ ID NO: 1439 - protein, 2098 aa, synthetic construct
  source 1..2098: note = Description of Artificial Sequence: Synthetic polypeptide
MPAAKRVKLDGGDKKYSIGLDIGTNSVGWAVITDEYKVPSKKFKVLGNTDRHSIKKNLIGALLFDSGETAEATRLKRTARRRYTRRKNRICYLQEIFSNEMAKVDDSFFHRLEESFLVEEDKKHERHPIFGNIVDEVAYHEKYPTIYHLRKKLVDSTDKADLRLIYLALAHMIKFRGHFLIEGDLNPDNSDVDKLFIQLVQTYNQLFEENPINASGVDAKAILSARLSKSRRLENLIAQLPGEKKNGLFGNLIALSLGLTPNFKSNFDLAEDAKLQLSKDTYDDDLDNLLAQIGDQYADLFLAAKNLSDAILLSDILRVNTEITKAPLSASMIKRYDEHHQDLTLLKALVRQQLPEKYKEIFFDQSKNGYAGYIDGGASQEEFYKFIKPILEKMDGTEELLVKLNREDLLRKQRTFDNGSIPHQIHLGELHAILRRQEDFYPFLKDNREKIEKILTFRIPYYVGPLARGNSRFAWMTRKSEETITPWNFEEVVDKGASAQSFIERMTNFDKNLPNEKVLPKHSLLYEYFTVYNELTKVKYVTEGMRKPAFLSGEQKKAIVDLLFKTNRKVTVKQLKEDYFKKIECFDSVEISGVEDRFNASLGTYHDLLKIIKDKDFLDNEENEDILEDIVLTLTLFEDREMIEERLKTYAHLFDDKVMKQLKRRRYTGWGRLSRKLINGIRDKQSGKTILDFLKSDGFANRNFMQLIHDDSLTFKEDIQKAQVSGQGDSLHEHIANLAGSPAIKKGILQTVKVVDELVKVMGRHKPENIVIEMARENQTTQKGQKNSRERMKRIEEGIKELGSQILKEHPVENTQLQNEKLYLYYLQNGRDMYVDQELDINRLSDYDVDHIVPQSFLKDDSIDNKVLTRSDKARGKSDNVPSEEVVKKMKNYWRQLLNAKLITQRKFDNLTKAERGGLSELDKAGFIKRQLVETRQITKHVAQILDSRMNTKYDENDKLIREVKVITLKSKLVSDFRKDFQFYKVREINNYHHAHDAYLNAVVGTALIKKYPKLESEFVYGDYKVYDVRKMIAKSEQEIGKATAKYFFYSNIMNFFKTEITLANGEIRKRPLIETNGETGEIVWDKGRDFATVRKVLSMPQVNIVKKTEVQTGGFSKESILPKRNSDKLIARKKDWDPKKYGGFDSPTVAYSVLVVAKVEKGKSKKLKSVKELLGITIMERSSFEKNPIDFLEAKGYKEVKKDLIIKLPKYSLFELENGRKRMLASAGELQKGNELALPSKYVNFLYLASHYEKLKGSPEDNEQKQLFVEQHKHYLDEIIEQISEFSKRVILADANLDKVLSAYNKHRDKPIREQAENIIHLFTLTNLGAPAAFKYFDTTIDRKRYTSTKEVLDATLIHQSITGLYETRIDLSQLGGDGGEAAAKPAPGGSGGTAPLEEEYRLFLEAPIQNVTLLEQWKREIPKVWAEINPPGLASTQAPIHVQLLSTALPVRVRQYPITLEAKRSLRETIRKFRAAGILRPVHSPWNTPLLPVRKSGTSEYRMVQDLREVNKRVETIHPTVPNPYTLLSLLPPDRIWYSVLDLKDAFFCIPLAPESQLIFAFEWADAEEGESGQLTWTRLPQGFKNSPTLFNEALNRDLQGFRLDHPSVSLLQYVDDLLIAADTQAACLSATRDLLMTLAELGYRVSGKKAQLCQEEVTYLGFKIHKGSRSLSNSRTQAILQIPVPKTKRQVREFLGKIGYCRLFIPGFAELAQPLYAATRPGNDPLVWGEKEEEAFQSLKLALTQPPALALPSLDKPFQLFVEETSGAAKGVLTQALGPWKRPVAYLSKRLDPVAAGWPRCLRAIAAAALLTREASKLTFGQDIEITSSHNLESLLRSPPDKWLTNARITQYQVLLLDPPRVRFKQTAALNPATLLPETDDTLPIHHCLDTLDSLTSTRPDLTDQPLAQAEATLFTDGSSYIRDGKRYAGAAVVTLDSVIWAEPLPIGTSAQKAELIALTKALEWSKDKSVNIYTDSRYAFATLHVHGMIYRERGWLTAGGKAIKNAPEILALLTAVWLPKRVAVMHCKGHQKDDAPTSTGNRRADEVAREVAIRPLSTQATISAGKRTADGSEFEKRTADGSEFESPKKKAKVE

SEQ ID NO: 1440 - protein, 2094 aa, synthetic construct
  source 1..2094: note = Description of Artificial Sequence: Synthetic polypeptide
MPAAKRVKLDGGDKKYSIGLDIGTNSVGWAVITDEYKVPSKKFKVLGNTDRHSIKKNLIGALLFDSGETAEATRLKRTARRRYTRRKNRICYLQEIFSNEMAKVDDSFFHRLEESFLVEEDKKHERHPIFGNIVDEVAYHEKYPTIYHLRKKLVDSTDKADLRLIYLALAHMIKFRGHFLIEGDLNPDNSDVDKLFIQLVQTYNQLFEENPINASGVDAKAILSARLSKSRRLENLIAQLPGEKKNGLFGNLIALSLGLTPNFKSNFDLAEDAKLQLSKDTYDDDLDNLLAQIGDQYADLFLAAKNLSDAILLSDILRVNTEITKAPLSASMIKRYDEHHQDLTLLKALVRQQLPEKYKEIFFDQSKNGYAGYIDGGASQEEFYKFIKPILEKMDGTEELLVKLNREDLLRKQRTFDNGSIPHQIHLGELHAILRRQEDFYPFLKDNREKIEKILTFRIPYYVGPLARGNSRFAWMTRKSEETITPWNFEEVVDKGASAQSFIERMTNFDKNLPNEKVLPKHSLLYEYFTVYNELTKVKYVTEGMRKPAFLSGEQKKAIVDLLFKTNRKVTVKQLKEDYFKKIECFDSVEISGVEDRFNASLGTYHDLLKIIKDKDFLDNEENEDILEDIVLTLTLFEDREMIEERLKTYAHLFDDKVMKQLKRRRYTGWGRLSRKLINGIRDKQSGKTILDFLKSDGFANRNFMQLIHDDSLTFKEDIQKAQVSGQGDSLHEHIANLAGSPAIKKGILQTVKVVDELVKVMGRHKPENIVIEMARENQTTQKGQKNSRERMKRIEEGIKELGSQILKEHPVENTQLQNEKLYLYYLQNGRDMYVDQELDINRLSDYDVDHIVPQSFLKDDSIDNKVLTRSDKARGKSDNVPSEEVVKKMKNYWRQLLNAKLITQRKFDNLTKAERGGLSELDKAGFIKRQLVETRQITKHVAQILDSRMNTKYDENDKLIREVKVITLKSKLVSDFRKDFQFYKVREINNYHHAHDAYLNAVVGTALIKKYPKLESEFVYGDYKVYDVRKMIAKSEQEIGKATAKYFFYSNIMNFFKTEITLANGEIRKRPLIETNGETGEIVWDKGRDFATVRKVLSMPQVNIVKKTEVQTGGFSKESILPKRNSDKLIARKKDWDPKKYGGFDSPTVAYSVLVVAKVEKGKSKKLKSVKELLGITIMERSSFEKNPIDFLEAKGYKEVKKDLIIKLPKYSLFELENGRKRMLASAGELQKGNELALPSKYVNFLYLASHYEKLKGSPEDNEQKQLFVEQHKHYLDEIIEQISEFSKRVILADANLDKVLSAYNKHRDKPIREQAENIIHLFTLTNLGAPAAFKYFDTTIDRKRYTSTKEVLDATLIHQSITGLYETRIDLSQLGGDGGPAPAPAPGGTAPLEEEYRLFLEAPIQNVTLLEQWKREIPKVWAEINPPGLASTQAPIHVQLLSTALPVRVRQYPITLEAKRSLRETIRKFRAAGILRPVHSPWNTPLLPVRKSGTSEYRMVQDLREVNKRVETIHPTVPNPYTLLSLLPPDRIWYSVLDLKDAFFCIPLAPESQLIFAFEWADAEEGESGQLTWTRLPQGFKNSPTLFNEALNRDLQGFRLDHPSVSLLQYVDDLLIAADTQAACLSATRDLLMTLAELGYRVSGKKAQLCQEEVTYLGFKIHKGSRSLSNSRTQAILQIPVPKTKRQVREFLGKIGYCRLFIPGFAELAQPLYAATRPGNDPLVWGEKEEEAFQSLKLALTQPPALALPSLDKPFQLFVEETSGAAKGVLTQALGPWKRPVAYLSKRLDPVAAGWPRCLRAIAAAALLTREASKLTFGQDIEITSSHNLESLLRSPPDKWLTNARITQYQVLLLDPPRVRFKQTAALNPATLLPETDDTLPIHHCLDTLDSLTSTRPDLTDQPLAQAEATLFTDGSSYIRDGKRYAGAAVVTLDSVIWAEPLPIGTSAQKAELIALTKALEWSKDKSVNIYTDSRYAFATLHVHGMIYRERGWLTAGGKAIKNAPEILALLTAVWLPKRVAVMHCKGHQKDDAPTSTGNRRADEVAREVAIRPLSTQATISAGKRTADGSEFEKRTADGSEFESPKKKAKVE

SEQ ID NO: 1441 - protein, 2098 aa, synthetic construct
  source 1..2098: note = Description of Artificial Sequence: Synthetic polypeptide
MPAAKRVKLDGGDKKYSIGLDIGTNSVGWAVITDEYKVPSKKFKVLGNTDRHSIKKNLIGALLFDSGETAEATRLKRTARRRYTRRKNRICYLQEIFSNEMAKVDDSFFHRLEESFLVEEDKKHERHPIFGNIVDEVAYHEKYPTIYHLRKKLVDSTDKADLRLIYLALAHMIKFRGHFLIEGDLNPDNSDVDKLFIQLVQTYNQLFEENPINASGVDAKAILSARLSKSRRLENLIAQLPGEKKNGLFGNLIALSLGLTPNFKSNFDLAEDAKLQLSKDTYDDDLDNLLAQIGDQYADLFLAAKNLSDAILLSDILRVNTEITKAPLSASMIKRYDEHHQDLTLLKALVRQQLPEKYKEIFFDQSKNGYAGYIDGGASQEEFYKFIKPILEKMDGTEELLVKLNREDLLRKQRTFDNGSIPHQIHLGELHAILRRQEDFYPFLKDNREKIEKILTFRIPYYVGPLARGNSRFAWMTRKSEETITPWNFEEVVDKGASAQSFIERMTNFDKNLPNEKVLPKHSLLYEYFTVYNELTKVKYVTEGMRKPAFLSGEQKKAIVDLLFKTNRKVTVKQLKEDYFKKIECFDSVEISGVEDRFNASLGTYHDLLKIIKDKDFLDNEENEDILEDIVLTLTLFEDREMIEERLKTYAHLFDDKVMKQLKRRRYTGWGRLSRKLINGIRDKQSGKTILDFLKSDGFANRNFMQLIHDDSLTFKEDIQKAQVSGQGDSLHEHIANLAGSPAIKKGILQTVKVVDELVKVMGRHKPENIVIEMARENQTTQKGQKNSRERMKRIEEGIKELGSQILKEHPVENTQLQNEKLYLYYLQNGRDMYVDQELDINRLSDYDVDHIVPQSFLKDDSIDNKVLTRSDKARGKSDNVPSEEVVKKMKNYWRQLLNAKLITQRKFDNLTKAERGGLSELDKAGFIKRQLVETRQITKHVAQILDSRMNTKYDENDKLIREVKVITLKSKLVSDFRKDFQFYKVREINNYHHAHDAYLNAVVGTALIKKYPKLESEFVYGDYKVYDVRKMIAKSEQEIGKATAKYFFYSNIMNFFKTEITLANGEIRKRPLIETNGETGEIVWDKGRDFATVRKVLSMPQVNIVKKTEVQTGGFSKESILPKRNSDKLIARKKDWDPKKYGGFDSPTVAYSVLVVAKVEKGKSKKLKSVKELLGITIMERSSFEKNPIDFLEAKGYKEVKKDLIIKLPKYSLFELENGRKRMLASAGELQKGNELALPSKYVNFLYLASHYEKLKGSPEDNEQKQLFVEQHKHYLDEIIEQISEFSKRVILADANLDKVLSAYNKHRDKPIREQAENIIHLFTLTNLGAPAAFKYFDTTIDRKRYTSTKEVLDATLIHQSITGLYETRIDLSQLGGDGGEAAAKGGSGGGGGTAPLEEEYRLFLEAPIQNVTLLEQWKREIPKVWAEINPPGLASTQAPIHVQLLSTALPVRVRQYPITLEAKRSLRETIRKFRAAGILRPVHSPWNTPLLPVRKSGTSEYRMVQDLREVNKRVETIHPTVPNPYTLLSLLPPDRIWYSVLDLKDAFFCIPLAPESQLIFAFEWADAEEGESGQLTWTRLPQGFKNSPTLFNEALNRDLQGFRLDHPSVSLLQYVDDLLIAADTQAACLSATRDLLMTLAELGYRVSGKKAQLCQEEVTYLGFKIHKGSRSLSNSRTQAILQIPVPKTKRQVREFLGKIGYCRLFIPGFAELAQPLYAATRPGNDPLVWGEKEEEAFQSLKLALTQPPALALPSLDKPFQLFVEETSGAAKGVLTQALGPWKRPVAYLSKRLDPVAAGWPRCLRAIAAAALLTREASKLTFGQDIEITSSHNLESLLRSPPDKWLTNARITQYQVLLLDPPRVRFKQTAALNPATLLPETDDTLPIHHCLDTLDSLTSTRPDLTDQPLAQAEATLFTDGSSYIRDGKRYAGAAVVTLDSVIWAEPLPIGTSAQKAELIALTKALEWSKDKSVNIYTDSRYAFATLHVHGMIYRERGWLTAGGKAIKNAPEILALLTAVWLPKRVAVMHCKGHQKDDAPTSTGNRRADEVAREVAIRPLSTQATISAGKRTADGSEFEKRTADGSEFESPKKKAKVE

SEQ ID NO: 1442 - protein, 2098 aa, synthetic construct
  source 1..2098: note = Description of Artificial Sequence: Synthetic polypeptide
MPAAKRVKLDGGDKKYSIGLDIGTNSVGWAVITDEYKVPSKKFKVLGNTDRHSIKKNLIGALLFDSGETAEATRLKRTARRRYTRRKNRICYLQEIFSNEMAKVDDSFFHRLEESFLVEEDKKHERHPIFGNIVDEVAYHEKYPTIYHLRKKLVDSTDKADLRLIYLALAHMIKFRGHFLIEGDLNPDNSDVDKLFIQLVQTYNQLFEENPINASGVDAKAILSARLSKSRRLENLIAQLPGEKKNGLFGNLIALSLGLTPNFKSNFDLAEDAKLQLSKDTYDDDLDNLLAQIGDQYADLFLAAKNLSDAILLSDILRVNTEITKAPLSASMIKRYDEHHQDLTLLKALVRQQLPEKYKEIFFDQSKNGYAGYIDGGASQEEFYKFIKPILEKMDGTEELLVKLNREDLLRKQRTFDNGSIPHQIHLGELHAILRRQEDFYPFLKDNREKIEKILTFRIPYYVGPLARGNSRFAWMTRKSEETITPWNFEEVVDKGASAQSFIERMTNFDKNLPNEKVLPKHSLLYEYFTVYNELTKVKYVTEGMRKPAFLSGEQKKAIVDLLFKTNRKVTVKQLKEDYFKKIECFDSVEISGVEDRFNASLGTYHDLLKIIKDKDFLDNEENEDILEDIVLTLTLFEDREMIEERLKTYAHLFDDKVMKQLKRRRYTGWGRLSRKLINGIRDKQSGKTILDFLKSDGFANRNFMQLIHDDSLTFKEDIQKAQVSGQGDSLHEHIANLAGSPAIKKGILQTVKVVDELVKVMGRHKPENIVIEMARENQTTQKGQKNSRERMKRIEEGIKELGSQILKEHPVENTQLQNEKLYLYYLQNGRDMYVDQELDINRLSDYDVDHIVPQSFLKDDSIDNKVLTRSDKARGKSDNVPSEEVVKKMKNYWRQLLNAKLITQRKFDNLTKAERGGLSELDKAGFIKRQLVETRQITKHVAQILDSRMNTKYDENDKLIREVKVITLKSKLVSDFRKDFQFYKVREINNYHHAHDAYLNAVVGTALIKKYPKLESEFVYGDYKVYDVRKMIAKSEQEIGKATAKYFFYSNIMNFFKTEITLANGEIRKRPLIETNGETGEIVWDKGRDFATVRKVLSMPQVNIVKKTEVQTGGFSKESILPKRNSDKLIARKKDWDPKKYGGFDSPTVAYSVLVVAKVEKGKSKKLKSVKELLGITIMERSSFEKNPIDFLEAKGYKEVKKDLIIKLPKYSLFELENGRKRMLASAGELQKGNELALPSKYVNFLYLASHYEKLKGSPEDNEQKQLFVEQHKHYLDEIIEQISEFSKRVILADANLDKVLSAYNKHRDKPIREQAENIIHLFTLTNLGAPAAFKYFDTTIDRKRYTSTKEVLDATLIHQSITGLYETRIDLSQLGGDGGGGSGGGEAAAKGGTAPLEEEYRLFLEAPIQNVTLLEQWKREIPKVWAEINPPGLASTQAPIHVQLLSTALPVRVRQYPITLEAKRSLRETIRKFRAAGILRPVHSPWNTPLLPVRKSGTSEYRMVQDLREVNKRVETIHPTVPNPYTLLSLLPPDRIWYSVLDLKDAFFCIPLAPESQLIFAFEWADAEEGESGQLTWTRLPQGFKNSPTLFNEALNRDLQGFRLDHPSVSLLQYVDDLLIAADTQAACLSATRDLLMTLAELGYRVSGKKAQLCQEEVTYLGFKIHKGSRSLSNSRTQAILQIPVPKTKRQVREFLGKIGYCRLFIPGFAELAQPLYAATRPGNDPLVWGEKEEEAFQSLKLALTQPPALALPSLDKPFQLFVEETSGAAKGVLTQALGPWKRPVAYLSKRLDPVAAGWPRCLRAIAAAALLTREASKLTFGQDIEITSSHNLESLLRSPPDKWLTNARITQYQVLLLDPPRVRFKQTAALNPATLLPETDDTLPIHHCLDTLDSLTSTRPDLTDQPLAQAEATLFTDGSSYIRDGKRYAGAAVVTLDSVIWAEPLPIGTSAQKAELIALTKALEWSKDKSVNIYTDSRYAFATLHVHGMIYRERGWLTAGGKAIKNAPEILALLTAVWLPKRVAVMHCKGHQKDDAPTSTGNRRADEVAREVAIRPLSTQATISAGKRTADGSEFEKRTADGSEFESPKKKAKVE

SEQ ID NO: 1443 - protein, 2093 aa, synthetic construct
  source 1..2093: note = Description of Artificial Sequence: Synthetic polypeptide
MPAAKRVKLDGGDKKYSIGLDIGTNSVGWAVITDEYKVPSKKFKVLGNTDRHSIKKNLIGALLFDSGETAEATRLKRTARRRYTRRKNRICYLQEIFSNEMAKVDDSFFHRLEESFLVEEDKKHERHPIFGNIVDEVAYHEKYPTIYHLRKKLVDSTDKADLRLIYLALAHMIKFRGHFLIEGDLNPDNSDVDKLFIQLVQTYNQLFEENPINASGVDAKAILSARLSKSRRLENLIAQLPGEKKNGLFGNLIALSLGLTPNFKSNFDLAEDAKLQLSKDTYDDDLDNLLAQIGDQYADLFLAAKNLSDAILLSDILRVNTEITKAPLSASMIKRYDEHHQDLTLLKALVRQQLPEKYKEIFFDQSKNGYAGYIDGGASQEEFYKFIKPILEKMDGTEELLVKLNREDLLRKQRTFDNGSIPHQIHLGELHAILRRQEDFYPFLKDNREKIEKILTFRIPYYVGPLARGNSRFAWMTRKSEETITPWNFEEVVDKGASAQSFIERMTNFDKNLPNEKVLPKHSLLYEYFTVYNELTKVKYVTEGMRKPAFLSGEQKKAIVDLLFKTNRKVTVKQLKEDYFKKIECFDSVEISGVEDRFNASLGTYHDLLKIIKDKDFLDNEENEDILEDIVLTLTLFEDREMIEERLKTYAHLFDDKVMKQLKRRRYTGWGRLSRKLINGIRDKQSGKTILDFLKSDGFANRNFMQLIHDDSLTFKEDIQKAQVSGQGDSLHEHIANLAGSPAIKKGILQTVKVVDELVKVMGRHKPENIVIEMARENQTTQKGQKNSRERMKRIEEGIKELGSQILKEHPVENTQLQNEKLYLYYLQNGRDMYVDQELDINRLSDYDVDHIVPQSFLKDDSIDNKVLTRSDKARGKSDNVPSEEVVKKMKNYWRQLLNAKLITQRKFDNLTKAERGGLSELDKAGFIKRQLVETRQITKHVAQILDSRMNTKYDENDKLIREVKVITLKSKLVSDFRKDFQFYKVREINNYHHAHDAYLNAVVGTALIKKYPKLESEFVYGDYKVYDVRKMIAKSEQEIGKATAKYFFYSNIMNFFKTEITLANGEIRKRPLIETNGETGEIVWDKGRDFATVRKVLSMPQVNIVKKTEVQTGGFSKESILPKRNSDKLIARKKDWDPKKYGGFDSPTVAYSVLVVAKVEKGKSKKLKSVKELLGITIMERSSFEKNPIDFLEAKGYKEVKKDLIIKLPKYSLFELENGRKRMLASAGELQKGNELALPSKYVNFLYLASHYEKLKGSPEDNEQKQLFVEQHKHYLDEIIEQISEFSKRVILADANLDKVLSAYNKHRDKPIREQAENIIHLFTLTNLGAPAAFKYFDTTIDRKRYTSTKEVLDATLIHQSITGLYETRIDLSQLGGDGGGSSGSSGGTAPLEEEYRLFLEAPIQNVTLLEQWKREIPKVWAEINPPGLASTQAPIHVQLLSTALPVRVRQYPITLEAKRSLRETIRKFRAAGILRPVHSPWNTPLLPVRKSGTSEYRMVQDLREVNKRVETIHPTVPNPYTLLSLLPPDRIWYSVLDLKDAFFCIPLAPESQLIFAFEWADAEEGESGQLTWTRLPQGFKNSPTLFNEALNRDLQGFRLDHPSVSLLQYVDDLLIAADTQAACLSATRDLLMTLAELGYRVSGKKAQLCQEEVTYLGFKIHKGSRSLSNSRTQAILQIPVPKTKRQVREFLGKIGYCRLFIPGFAELAQPLYAATRPGNDPLVWGEKEEEAFQSLKLALTQPPALALPSLDKPFQLFVEETSGAAKGVLTQALGPWKRPVAYLSKRLDPVAAGWPRCLRAIAAAALLTREASKLTFGQDIEITSSHNLESLLRSPPDKWLTNARITQYQVLLLDPPRVRFKQTAALNPATLLPETDDTLPIHHCLDTLDSLTSTRPDLTDQPLAQAEATLFTDGSSYIRDGKRYAGAAVVTLDSVIWAEPLPIGTSAQKAELIALTKALEWSKDKSVNIYTDSRYAFATLHVHGMIYRERGWLTAGGKAIKNAPEILALLTAVWLPKRVAVMHCKGHQKDDAPTSTGNRRADEVAREVAIRPLSTQATISAGKRTADGSEFEKRTADGSEFESPKKKAKVE

SEQ ID NO: 1444 - protein, 2093 aa, synthetic construct
  source 1..2093: note = Description of Artificial Sequence: Synthetic polypeptide
MPAAKRVKLDGGDKKYSIGLDIGTNSVGWAVITDEYKVPSKKFKVLGNTDRHSIKKNLIGALLFDSGETAEATRLKRTARRRYTRRKNRICYLQEIFSNEMAKVDDSFFHRLEESFLVEEDKKHERHPIFGNIVDEVAYHEKYPTIYHLRKKLVDSTDKADLRLIYLALAHMIKFRGHFLIEGDLNPDNSDVDKLFIQLVQTYNQLFEENPINASGVDAKAILSARLSKSRRLENLIAQLPGEKKNGLFGNLIALSLGLTPNFKSNFDLAEDAKLQLSKDTYDDDLDNLLAQIGDQYADLFLAAKNLSDAILLSDILRVNTEITKAPLSASMIKRYDEHHQDLTLLKALVRQQLPEKYKEIFFDQSKNGYAGYIDGGASQEEFYKFIKPILEKMDGTEELLVKLNREDLLRKQRTFDNGSIPHQIHLGELHAILRRQEDFYPFLKDNREKIEKILTFRIPYYVGPLARGNSRFAWMTRKSEETITPWNFEEVVDKGASAQSFIERMTNFDKNLPNEKVLPKHSLLYEYFTVYNELTKVKYVTEGMRKPAFLSGEQKKAIVDLLFKTNRKVTVKQLKEDYFKKIECFDSVEISGVEDRFNASLGTYHDLLKIIKDKDFLDNEENEDILEDIVLTLTLFEDREMIEERLKTYAHLFDDKVMKQLKRRRYTGWGRLSRKLINGIRDKQSGKTILDFLKSDGFANRNFMQLIHDDSLTFKEDIQKAQVSGQGDSLHEHIANLAGSPAIKKGILQTVKVVDELVKVMGRHKPENIVIEMARENQTTQKGQKNSRERMKRIEEGIKELGSQILKEHPVENTQLQNEKLYLYYLQNGRDMYVDQELDINRLSDYDVDHIVPQSFLKDDSIDNKVLTRSDKARGKSDNVPSEEVVKKMKNYWRQLLNAKLITQRKFDNLTKAERGGLSELDKAGFIKRQLVETRQITKHVAQILDSRMNTKYDENDKLIREVKVITLKSKLVSDFRKDFQFYKVREINNYHHAHDAYLNAVVGTALIKKYPKLESEFVYGDYKVYDVRKMIAKSEQEIGKATAKYFFYSNIMNFFKTEITLANGEIRKRPLIETNGETGEIVWDKGRDFATVRKVLSMPQVNIVKKTEVQTGGFSKESILPKRNSDKLIARKKDWDPKKYGGFDSPTVAYSVLVVAKVEKGKSKKLKSVKELLGITIMERSSFEKNPIDFLEAKGYKEVKKDLIIKLPKYSLFELENGRKRMLASAGELQKGNELALPSKYVNFLYLASHYEKLKGSPEDNEQKQLFVEQHKHYLDEIIEQISEFSKRVILADANLDKVLSAYNKHRDKPIREQAENIIHLFTLTNLGAPAAFKYFDTTIDRKRYTSTKEVLDATLIHQSITGLYETRIDLSQLGGDGGGGGGSSGGTAPLEEEYRLFLEAPIQNVTLLEQWKREIPKVWAEINPPGLASTQAPIHVQLLSTALPVRVRQYPITLEAKRSLRETIRKFRAAGILRPVHSPWNTPLLPVRKSGTSEYRMVQDLREVNKRVETIHPTVPNPYTLLSLLPPDRIWYSVLDLKDAFFCIPLAPESQLIFAFEWADAEEGESGQLTWTRLPQGFKNSPTLFNEALNRDLQGFRLDHPSVSLLQYVDDLLIAADTQAACLSATRDLLMTLAELGYRVSGKKAQLCQEEVTYLGFKIHKGSRSLSNSRTQAILQIPVPKTKRQVREFLGKIGYCRLFIPGFAELAQPLYAATRPGNDPLVWGEKEEEAFQSLKLALTQPPALALPSLDKPFQLFVEETSGAAKGVLTQALGPWKRPVAYLSKRLDPVAAGWPRCLRAIAAAALLTREASKLTFGQDIEITSSHNLESLLRSPPDKWLTNARITQYQVLLLDPPRVRFKQTAALNPATLLPETDDTLPIHHCLDTLDSLTSTRPDLTDQPLAQAEATLFTDGSSYIRDGKRYAGAAVVTLDSVIWAEPLPIGTSAQKAELIALTKALEWSKDKSVNIYTDSRYAFATLHVHGMIYRERGWLTAGGKAIKNAPEILALLTAVWLPKRVAVMHCKGHQKDDAPTSTGNRRADEVAREVAIRPLSTQATISAGKRTADGSEFEKRTADGSEFESPKKKAKVE

SEQ ID NO: 1445 - protein, 2093 aa, synthetic construct
  source 1..2093: note = Description of Artificial Sequence: Synthetic polypeptide
MPAAKRVKLDGGDKKYSIGLDIGTNSVGWAVITDEYKVPSKKFKVLGNTDRHSIKKNLIGALLFDSGETAEATRLKRTARRRYTRRKNRICYLQEIFSNEMAKVDDSFFHRLEESFLVEEDKKHERHPIFGNIVDEVAYHEKYPTIYHLRKKLVDSTDKADLRLIYLALAHMIKFRGHFLIEGDLNPDNSDVDKLFIQLVQTYNQLFEENPINASGVDAKAILSARLSKSRRLENLIAQLPGEKKNGLFGNLIALSLGLTPNFKSNFDLAEDAKLQLSKDTYDDDLDNLLAQIGDQYADLFLAAKNLSDAILLSDILRVNTEITKAPLSASMIKRYDEHHQDLTLLKALVRQQLPEKYKEIFFDQSKNGYAGYIDGGASQEEFYKFIKPILEKMDGTEELLVKLNREDLLRKQRTFDNGSIPHQIHLGELHAILRRQEDFYPFLKDNREKIEKILTFRIPYYVGPLARGNSRFAWMTRKSEETITPWNFEEVVDKGASAQSFIERMTNFDKNLPNEKVLPKHSLLYEYFTVYNELTKVKYVTEGMRKPAFLSGEQKKAIVDLLFKTNRKVTVKQLKEDYFKKIECFDSVEISGVEDRFNASLGTYHDLLKIIKDKDFLDNEENEDILEDIVLTLTLFEDREMIEERLKTYAHLFDDKVMKQLKRRRYTGWGRLSRKLINGIRDKQSGKTILDFLKSDGFANRNFMQLIHDDSLTFKEDIQKAQVSGQGDSLHEHIANLAGSPAIKKGILQTVKVVDELVKVMGRHKPENIVIEMARENQTTQKGQKNSRERMKRIEEGIKELGSQILKEHPVENTQLQNEKLYLYYLQNGRDMYVDQELDINRLSDYDVDHIVPQSFLKDDSIDNKVLTRSDKARGKSDNVPSEEVVKKMKNYWRQLLNAKLITQRKFDNLTKAERGGLSELDKAGFIKRQLVETRQITKHVAQILDSRMNTKYDENDKLIREVKVITLKSKLVSDFRKDFQFYKVREINNYHHAHDAYLNAVVGTALIKKYPKLESEFVYGDYKVYDVRKMIAKSEQEIGKATAKYFFYSNIMNFFKTEITLANGEIRKRPLIETNGETGEIVWDKGRDFATVRKVLSMPQVNIVKKTEVQTGGFSKESILPKRNSDKLIARKKDWDPKKYGGFDSPTVAYSVLVVAKVEKGKSKKLKSVKELLGITIMERSSFEKNPIDFLEAKGYKEVKKDLIIKLPKYSLFELENGRKRMLASAGELQKGNELALPSKYVNFLYLASHYEKLKGSPEDNEQKQLFVEQHKHYLDEIIEQISEFSKRVILADANLDKVLSAYNKHRDKPIREQAENIIHLFTLTNLGAPAAFKYFDTTIDRKRYTSTKEVLDATLIHQSITGLYETRIDLSQLGGDGGGSSGGSGGTAPLEEEYRLFLEAPIQNVTLLEQWKREIPKVWAEINPPGLASTQAPIHVQLLSTALPVRVRQYPITLEAKRSLRETIRKFRAAGILRPVHSPWNTPLLPVRKSGTSEYRMVQDLREVNKRVETIHPTVPNPYTLLSLLPPDRIWYSVLDLKDAFFCIPLAPESQLIFAFEWADAEEGESGQLTWTRLPQGFKNSPTLFNEALNRDLQGFRLDHPSVSLLQYVDDLLIAADTQAACLSATRDLLMTLAELGYRVSGKKAQLCQEEVTYLGFKIHKGSRSLSNSRTQAILQIPVPKTKRQVREFLGKIGYCRLFIPGFAELAQPLYAATRPGNDPLVWGEKEEEAFQSLKLALTQPPALALPSLDKPFQLFVEETSGAAKGVLTQALGPWKRPVAYLSKRLDPVAAGWPRCLRAIAAAALLTREASKLTFGQDIEITSSHNLESLLRSPPDKWLTNARITQYQVLLLDPPRVRFKQTAALNPATLLPETDDTLPIHHCLDTLDSLTSTRPDLTDQPLAQAEATLFTDGSSYIRDGKRYAGAAVVTLDSVIWAEPLPIGTSAQKAELIALTKALEWSKDKSVNIYTDSRYAFATLHVHGMIYRERGWLTAGGKAIKNAPEILALLTAVWLPKRVAVMHCKGHQKDDAPTSTGNRRADEVAREVAIRPLSTQATISAGKRTADGSEFEKRTADGSEFESPKKKAKVE

SEQ ID NO: 1446 - protein, 2095 aa, synthetic construct
  source 1..2095: note = Description of Artificial Sequence: Synthetic polypeptide
MPAAKRVKLDGGDKKYSIGLDIGTNSVGWAVITDEYKVPSKKFKVLGNTDRHSIKKNLIGALLFDSGETAEATRLKRTARRRYTRRKNRICYLQEIFSNEMAKVDDSFFHRLEESFLVEEDKKHERHPIFGNIVDEVAYHEKYPTIYHLRKKLVDSTDKADLRLIYLALAHMIKFRGHFLIEGDLNPDNSDVDKLFIQLVQTYNQLFEENPINASGVDAKAILSARLSKSRRLENLIAQLPGEKKNGLFGNLIALSLGLTPNFKSNFDLAEDAKLQLSKDTYDDDLDNLLAQIGDQYADLFLAAKNLSDAILLSDILRVNTEITKAPLSASMIKRYDEHHQDLTLLKALVRQQLPEKYKEIFFDQSKNGYAGYIDGGASQEEFYKFIKPILEKMDGTEELLVKLNREDLLRKQRTFDNGSIPHQIHLGELHAILRRQEDFYPFLKDNREKIEKILTFRIPYYVGPLARGNSRFAWMTRKSEETITPWNFEEVVDKGASAQSFIERMTNFDKNLPNEKVLPKHSLLYEYFTVYNELTKVKYVTEGMRKPAFLSGEQKKAIVDLLFKTNRKVTVKQLKEDYFKKIECFDSVEISGVEDRFNASLGTYHDLLKIIKDKDFLDNEENEDILEDIVLTLTLFEDREMIEERLKTYAHLFDDKVMKQLKRRRYTGWGRLSRKLINGIRDKQSGKTILDFLKSDGFANRNFMQLIHDDSLTFKEDIQKAQVSGQGDSLHEHIANLAGSPAIKKGILQTVKVVDELVKVMGRHKPENIVIEMARENQTTQKGQKNSRERMKRIEEGIKELGSQILKEHPVENTQLQNEKLYLYYLQNGRDMYVDQELDINRLSDYDVDHIVPQSFLKDDSIDNKVLTRSDKARGKSDNVPSEEVVKKMKNYWRQLLNAKLITQRKFDNLTKAERGGLSELDKAGFIKRQLVETRQITKHVAQILDSRMNTKYDENDKLIREVKVITLKSKLVSDFRKDFQFYKVREINNYHHAHDAYLNAVVGTALIKKYPKLESEFVYGDYKVYDVRKMIAKSEQEIGKATAKYFFYSNIMNFFKTEITLANGEIRKRPLIETNGETGEIVWDKGRDFATVRKVLSMPQVNIVKKTEVQTGGFSKESILPKRNSDKLIARKKDWDPKKYGGFDSPTVAYSVLVVAKVEKGKSKKLKSVKELLGITIMERSSFEKNPIDFLEAKGYKEVKKDLIIKLPKYSLFELENGRKRMLASAGELQKGNELALPSKYVNFLYLASHYEKLKGSPEDNEQKQLFVEQHKHYLDEIIEQISEFSKRVILADANLDKVLSAYNKHRDKPIREQAENIIHLFTLTNLGAPAAFKYFDTTIDRKRYTSTKEVLDATLIHQSITGLYETRIDLSQLGGDGGGGGEAAAKGGTAPLEEEYRLFLEAPIQNVTLLEQWKREIPKVWAEINPPGLASTQAPIHVQLLSTALPVRVRQYPITLEAKRSLRETIRKFRAAGILRPVHSPWNTPLLPVRKSGTSEYRMVQDLREVNKRVETIHPTVPNPYTLLSLLPPDRIWYSVLDLKDAFFCIPLAPESQLIFAFEWADAEEGESGQLTWTRLPQGFKNSPTLFNEALNRDLQGFRLDHPSVSLLQYVDDLLIAADTQAACLSATRDLLMTLAELGYRVSGKKAQLCQEEVTYLGFKIHKGSRSLSNSRTQAILQIPVPKTKRQVREFLGKIGYCRLFIPGFAELAQPLYAATRPGNDPLVWGEKEEEAFQSLKLALTQPPALALPSLDKPFQLFVEETSGAAKGVLTQALGPWKRPVAYLSKRLDPVAAGWPRCLRAIAAAALLTREASKLTFGQDIEITSSHNLESLLRSPPDKWLTNARITQYQVLLLDPPRVRFKQTAALNPATLLPETDDTLPIHHCLDTLDSLTSTRPDLTDQPLAQAEATLFTDGSSYIRDGKRYAGAAVVTLDSVIWAEPLPIGTSAQKAELIALTKALEWSKDKSVNIYTDSRYAFATLHVHGMIYRERGWLTAGGKAIKNAPEILALLTAVWLPKRVAVMHCKGHQKDDAPTSTGNRRADEVAREVAIRPLSTQATISAGKRTADGSEFEKRTADGSEFESPKKKAKVE

SEQ ID NO: 1447 - protein, 2096 aa, synthetic construct
  source 1..2096: note = Description of Artificial Sequence: Synthetic polypeptide
MPAAKRVKLDGGDKKYSIGLDIGTNSVGWAVITDEYKVPSKKFKVLGNTDRHSIKKNLIGALLFDSGETAEATRLKRTARRRYTRRKNRICYLQEIFSNEMAKVDDSFFHRLEESFLVEEDKKHERHPIFGNIVDEVAYHEKYPTIYHLRKKLVDSTDKADLRLIYLALAHMIKFRGHFLIEGDLNPDNSDVDKLFIQLVQTYNQLFEENPINASGVDAKAILSARLSKSRRLENLIAQLPGEKKNGLFGNLIALSLGLTPNFKSNFDLAEDAKLQLSKDTYDDDLDNLLAQIGDQYADLFLAAKNLSDAILLSDILRVNTEITKAPLSASMIKRYDEHHQDLTLLKALVRQQLPEKYKEIFFDQSKNGYAGYIDGGASQEEFYKFIKPILEKMDGTEELLVKLNREDLLRKQRTFDNGSIPHQIHLGELHAILRRQEDFYPFLKDNREKIEKILTFRIPYYVGPLARGNSRFAWMTRKSEETITPWNFEEVVDKGASAQSFIERMTNFDKNLPNEKVLPKHSLLYEYFTVYNELTKVKYVTEGMRKPAFLSGEQKKAIVDLLFKTNRKVTVKQLKEDYFKKIECFDSVEISGVEDRFNASLGTYHDLLKIIKDKDFLDNEENEDILEDIVLTLTLFEDREMIEERLKTYAHLFDDKVMKQLKRRRYTGWGRLSRKLINGIRDKQSGKTILDFLKSDGFANRNFMQLIHDDSLTFKEDIQKAQVSGQGDSLHEHIANLAGSPAIKKGILQTVKVVDELVKVMGRHKPENIVIEMARENQTTQKGQKNSRERMKRIEEGIKELGSQILKEHPVENTQLQNEKLYLYYLQNGRDMYVDQELDINRLSDYDVDHIVPQSFLKDDSIDNKVLTRSDKARGKSDNVPSEEVVKKMKNYWRQLLNAKLITQRKFDNLTKAERGGLSELDKAGFIKRQLVETRQITKHVAQILDSRMNTKYDENDKLIREVKVITLKSKLVSDFRKDFQFYKVREINNYHHAHDAYLNAVVGTALIKKYPKLESEFVYGDYKVYDVRKMIAKSEQEIGKATAKYFFYSNIMNFFKTEITLANGEIRKRPLIETNGETGEIVWDKGRDFATVRKVLSMPQVNIVKKTEVQTGGFSKESILPKRNSDKLIARKKDWDPKKYGGFDSPTVAYSVLVVAKVEKGKSKKLKSVKELLGITIMERSSFEKNPIDFLEAKGYKEVKKDLIIKLPKYSLFELENGRKRMLASAGELQKGNELALPSKYVNFLYLASHYEKLKGSPEDNEQKQLFVEQHKHYLDEIIEQISEFSKRVILADANLDKVLSAYNKHRDKPIREQAENIIHLFTLTNLGAPAAFKYFDTTIDRKRYTSTKEVLDATLIHQSITGLYETRIDLSQLGGDGGPAPGGGGSSGGTAPLEEEYRLFLEAPIQNVTLLEQWKREIPKVWAEINPPGLASTQAPIHVQLLSTALPVRVRQYPITLEAKRSLRETIRKFRAAGILRPVHSPWNTPLLPVRKSGTSEYRMVQDLREVNKRVETIHPTVPNPYTLLSLLPPDRIWYSVLDLKDAFFCIPLAPESQLIFAFEWADAEEGESGQLTWTRLPQGFKNSPTLFNEALNRDLQGFRLDHPSVSLLQYVDDLLIAADTQAACLSATRDLLMTLAELGYRVSGKKAQLCQEEVTYLGFKIHKGSRSLSNSRTQAILQIPVPKTKRQVREFLGKIGYCRLFIPGFAELAQPLYAATRPGNDPLVWGEKEEEAFQSLKLALTQPPALALPSLDKPFQLFVEETSGAAKGVLTQALGPWKRPVAYLSKRLDPVAAGWPRCLRAIAAAALLTREASKLTFGQDIEITSSHNLESLLRSPPDKWLTNARITQYQVLLLDPPRVRFKQTAALNPATLLPETDDTLPIHHCLDTLDSLTSTRPDLTDQPLAQAEATLFTDGSSYIRDGKRYAGAAVVTLDSVIWAEPLPIGTSAQKAELIALTKALEWSKDKSVNIYTDSRYAFATLHVHGMIYRERGWLTAGGKAIKNAPEILALLTAVWLPKRVAVMHCKGHQKDDAPTSTGNRRADEVAREVAIRPLSTQATISAGKRTADGSEFEKRTADGSEFESPKKKAKVE

SEQ ID NO: 1448 - protein, 2129 aa, synthetic construct
  source 1..2129: note = Description of Artificial Sequence: Synthetic polypeptide
MPAAKRVKLDGGDKKYSIGLDIGTNSVGWAVITDEYKVPSKKFKVLGNTDRHSIKKNLIGALLFDSGETAEATRLKRTARRRYTRRKNRICYLQEIFSNEMAKVDDSFFHRLEESFLVEEDKKHERHPIFGNIVDEVAYHEKYPTIYHLRKKLVDSTDKADLRLIYLALAHMIKFRGHFLIEGDLNPDNSDVDKLFIQLVQTYNQLFEENPINASGVDAKAILSARLSKSRRLENLIAQLPGEKKNGLFGNLIALSLGLTPNFKSNFDLAEDAKLQLSKDTYDDDLDNLLAQIGDQYADLFLAAKNLSDAILLSDILRVNTEITKAPLSASMIKRYDEHHQDLTLLKALVRQQLPEKYKEIFFDQSKNGYAGYIDGGASQEEFYKFIKPILEKMDGTEELLVKLNREDLLRKQRTFDNGSIPHQIHLGELHAILRRQEDFYPFLKDNREKIEKILTFRIPYYVGPLARGNSRFAWMTRKSEETITPWNFEEVVDKGASAQSFIERMTNFDKNLPNEKVLPKHSLLYEYFTVYNELTKVKYVTEGMRKPAFLSGEQKKAIVDLLFKTNRKVTVKQLKEDYFKKIECFDSVEISGVEDRFNASLGTYHDLLKIIKDKDFLDNEENEDILEDIVLTLTLFEDREMIEERLKTYAHLFDDKVMKQLKRRRYTGWGRLSRKLINGIRDKQSGKTILDFLKSDGFANRNFMQLIHDDSLTFKEDIQKAQVSGQGDSLHEHIANLAGSPAIKKGILQTVKVVDELVKVMGRHKPENIVIEMARENQTTQKGQKNSRERMKRIEEGIKELGSQILKEHPVENTQLQNEKLYLYYLQNGRDMYVDQELDINRLSDYDVDHIVPQSFLKDDSIDNKVLTRSDKARGKSDNVPSEEVVKKMKNYWRQLLNAKLITQRKFDNLTKAERGGLSELDKAGFIKRQLVETRQITKHVAQILDSRMNTKYDENDKLIREVKVITLKSKLVSDFRKDFQFYKVREINNYHHAHDAYLNAVVGTALIKKYPKLESEFVYGDYKVYDVRKMIAKSEQEIGKATAKYFFYSNIMNFFKTEITLANGEIRKRPLIETNGETGEIVWDKGRDFATVRKVLSMPQVNIVKKTEVQTGGFSKESILPKRNSDKLIARKKDWDPKKYGGFDSPTVAYSVLVVAKVEKGKSKKLKSVKELLGITIMERSSFEKNPIDFLEAKGYKEVKKDLIIKLPKYSLFELENGRKRMLASAGELQKGNELALPSKYVNFLYLASHYEKLKGSPEDNEQKQLFVEQHKHYLDEIIEQISEFSKRVILADANLDKVLSAYNKHRDKPIREQAENIIHLFTLTNLGAPAAFKYFDTTIDRKRYTSTKEVLDATLIHQSITGLYETRIDLSQLGGDGGAEAAAKEAAAKEAAAKEAAAKALEAEAAAKEAAAKEAAAKEAAAKAGGVLNLEEEYRLHEKPVPSSIDPSWLQLFPTVWAERAGMGLANQVPPVVVELRSGASPVAVRQYPMSKEAREGIRPHIQKFLDLGVLVPCRSPWNTPLLPVKKPGTNDYRPVQDLREINKRVQDIHPTVPNPYNLLSSLPPSYTWYSVLDLKDAFFCLRLHPNSQPLFAFEWKDPEKGNTGQLTWTRLPQGFKNSPTLFNEALHRDLAPFRALNPQVVLLQYVDDLLVAAPTYEDCKKGTQKLLQELSKLGYRVSAKKAQLCQREVTYLGYLLKEGKRWLTPARKATVMKIPVPTTPRQVREFLGKAGFCRLFIPGFASLAAPLYPLTKPSIPFIWTEEHQQAFDHIKKALLSAPALALPDLTKPFTLYIDERAGVARGVLTQTLGPWRRPVAYLSKKLDPVASGWPTCLKAVAAVALLLKDADKLTLGQNVTVIASHSLESIVRQPPDRWMTNARMTHYQSLLLNERVSFAPPAVLNPATLLPVESEATPVHRCSEILAEETGTRRDLEDQPLPGVPTWYTDGSSFITEGKRRAGAPIVDGKRTVWASSLPEGTSAQKAELVALTQALRLAEGKNINIYTDSRYAFATAHIHGAIYKQRGWLTSAGKDIKNKEEILALLEAIHLPRRVAIIHCPGHQRGSNPVATGNRRADEAAKQAALSTRVLAGTTKPAGKRTADGSEFEKRTADGSEFESPKKKAKVE

SEQ ID NO: 1449 - protein, 2092 aa, synthetic construct
  source 1..2092: note = Description of Artificial Sequence: Synthetic polypeptide
MPAAKRVKLDGGDKKYSIGLDIGTNSVGWAVITDEYKVPSKKFKVLGNTDRHSIKKNLIGALLFDSGETAEATRLKRTARRRYTRRKNRICYLQEIFSNEMAKVDDSFFHRLEESFLVEEDKKHERHPIFGNIVDEVAYHEKYPTIYHLRKKLVDSTDKADLRLIYLALAHMIKFRGHFLIEGDLNPDNSDVDKLFIQLVQTYNQLFEENPINASGVDAKAILSARLSKSRRLENLIAQLPGEKKNGLFGNLIALSLGLTPNFKSNFDLAEDAKLQLSKDTYDDDLDNLLAQIGDQYADLFLAAKNLSDAILLSDILRVNTEITKAPLSASMIKRYDEHHQDLTLLKALVRQQLPEKYKEIFFDQSKNGYAGYIDGGASQEEFYKFIKPILEKMDGTEELLVKLNREDLLRKQRTFDNGSIPHQIHLGELHAILRRQEDFYPFLKDNREKIEKILTFRIPYYVGPLARGNSRFAWMTRKSEETITPWNFEEVVDKGASAQSFIERMTNFDKNLPNEKVLPKHSLLYEYFTVYNELTKVKYVTEGMRKPAFLSGEQKKAIVDLLFKTNRKVTVKQLKEDYFKKIECFDSVEISGVEDRFNASLGTYHDLLKIIKDKDFLDNEENEDILEDIVLTLTLFEDREMIEERLKTYAHLFDDKVMKQLKRRRYTGWGRLSRKLINGIRDKQSGKTILDFLKSDGFANRNFMQLIHDDSLTFKEDIQKAQVSGQGDSLHEHIANLAGSPAIKKGILQTVKVVDELVKVMGRHKPENIVIEMARENQTTQKGQKNSRERMKRIEEGIKELGSQILKEHPVENTQLQNEKLYLYYLQNGRDMYVDQELDINRLSDYDVDHIVPQSFLKDDSIDNKVLTRSDKARGKSDNVPSEEVVKKMKNYWRQLLNAKLITQRKFDNLTKAERGGLSELDKAGFIKRQLVETRQITKHVAQILDSRMNTKYDENDKLIREVKVITLKSKLVSDFRKDFQFYKVREINNYHHAHDAYLNAVVGTALIKKYPKLESEFVYGDYKVYDVRKMIAKSEQEIGKATAKYFFYSNIMNFFKTEITLANGEIRKRPLIETNGETGEIVWDKGRDFATVRKVLSMPQVNIVKKTEVQTGGFSKESILPKRNSDKLIARKKDWDPKKYGGFDSPTVAYSVLVVAKVEKGKSKKLKSVKELLGITIMERSSFEKNPIDFLEAKGYKEVKKDLIIKLPKYSLFELENGRKRMLASAGELQKGNELALPSKYVNFLYLASHYEKLKGSPEDNEQKQLFVEQHKHYLDEIIEQISEFSKRVILADANLDKVLSAYNKHRDKPIREQAENIIHLFTLTNLGAPAAFKYFDTTIDRKRYTSTKEVLDATLIHQSITGLYETRIDLSQLGGDGGGGSGGSGGSGGVLNLEEEYRLHEKPVPSSIDPSWLQLFPTVWAERAGMGLANQVPPVVVELRSGASPVAVRQYPMSKEAREGIRPHIQKFLDLGVLVPCRSPWNTPLLPVKKPGTNDYRPVQDLREINKRVQDIHPTVPNPYNLLSSLPPSYTWYSVLDLKDAFFCLRLHPNSQPLFAFEWKDPEKGNTGQLTWTRLPQGFKNSPTLFNEALHRDLAPFRALNPQVVLLQYVDDLLVAAPTYEDCKKGTQKLLQELSKLGYRVSAKKAQLCQREVTYLGYLLKEGKRWLTPARKATVMKIPVPTTPRQVREFLGKAGFCRLFIPGFASLAAPLYPLTKPSIPFIWTEEHQQAFDHIKKALLSAPALALPDLTKPFTLYIDERAGVARGVLTQTLGPWRRPVAYLSKKLDPVASGWPTCLKAVAAVALLLKDADKLTLGQNVTVIASHSLESIVRQPPDRWMTNARMTHYQSLLLNERVSFAPPAVLNPATLLPVESEATPVHRCSEILAEETGTRRDLEDQPLPGVPTWYTDGSSFITEGKRRAGAPIVDGKRTVWASSLPEGTSAQKAELVALTQALRLAEGKNINIYTDSRYAFATAHIHGAIYKQRGWLTSAGKDIKNKEEILALLEAIHLPRRVAIIHCPGHQRGSNPVATGNRRADEAAKQAALSTRVLAGTTKPAGKRTADGSEFEKRTADGSEFESPKKKAKVE

SEQ ID NO: 1450 - protein, 2089 aa, synthetic construct
  source 1..2089: note = Description of Artificial Sequence: Synthetic polypeptide
MPAAKRVKLDGGDKKYSIGLDIGTNSVGWAVITDEYKVPSKKFKVLGNTDRHSIKKNLIGALLFDSGETAEATRLKRTARRRYTRRKNRICYLQEIFSNEMAKVDDSFFHRLEESFLVEEDKKHERHPIFGNIVDEVAYHEKYPTIYHLRKKLVDSTDKADLRLIYLALAHMIKFRGHFLIEGDLNPDNSDVDKLFIQLVQTYNQLFEENPINASGVDAKAILSARLSKSRRLENLIAQLPGEKKNGLFGNLIALSLGLTPNFKSNFDLAEDAKLQLSKDTYDDDLDNLLAQIGDQYADLFLAAKNLSDAILLSDILRVNTEITKAPLSASMIKRYDEHHQDLTLLKALVRQQLPEKYKEIFFDQSKNGYAGYIDGGASQEEFYKFIKPILEKMDGTEELLVKLNREDLLRKQRTFDNGSIPHQIHLGELHAILRRQEDFYPFLKDNREKIEKILTFRIPYYVGPLARGNSRFAWMTRKSEETITPWNFEEVVDKGASAQSFIERMTNFDKNLPNEKVLPKHSLLYEYFTVYNELTKVKYVTEGMRKPAFLSGEQKKAIVDLLFKTNRKVTVKQLKEDYFKKIECFDSVEISGVEDRFNASLGTYHDLLKIIKDKDFLDNEENEDILEDIVLTLTLFEDREMIEERLKTYAHLFDDKVMKQLKRRRYTGWGRLSRKLINGIRDKQSGKTILDFLKSDGFANRNFMQLIHDDSLTFKEDIQKAQVSGQGDSLHEHIANLAGSPAIKKGILQTVKVVDELVKVMGRHKPENIVIEMARENQTTQKGQKNSRERMKRIEEGIKELGSQILKEHPVENTQLQNEKLYLYYLQNGRDMYVDQELDINRLSDYDVDHIVPQSFLKDDSIDNKVLTRSDKARGKSDNVPSEEVVKKMKNYWRQLLNAKLITQRKFDNLTKAERGGLSELDKAGFIKRQLVETRQITKHVAQILDSRMNTKYDENDKLIREVKVITLKSKLVSDFRKDFQFYKVREINNYHHAHDAYLNAVVGTALIKKYPKLESEFVYGDYKVYDVRKMIAKSEQEIGKATAKYFFYSNIMNFFKTEITLANGEIRKRPLIETNGETGEIVWDKGRDFATVRKVLSMPQVNIVKKTEVQTGGFSKESILPKRNSDKLIARKKDWDPKKYGGFDSPTVAYSVLVVAKVEKGKSKKLKSVKELLGITIMERSSFEKNPIDFLEAKGYKEVKKDLIIKLPKYSLFELENGRKRMLASAGELQKGNELALPSKYVNFLYLASHYEKLKGSPEDNEQKQLFVEQHKHYLDEIIEQISEFSKRVILADANLDKVLSAYNKHRDKPIREQAENIIHLFTLTNLGAPAAFKYFDTTIDRKRYTSTKEVLDATLIHQSITGLYETRIDLSQLGGDGGGGSGSSGGVLNLEEEYRLHEKPVPSSIDPSWLQLFPTVWAERAGMGLANQVPPVVVELRSGASPVAVRQYPMSKEAREGIRPHIQKFLDLGVLVPCRSPWNTPLLPVKKPGTNDYRPVQDLREINKRVQDIHPTVPNPYNLLSSLPPSYTWYSVLDLKDAFFCLRLHPNSQPLFAFEWKDPEKGNTGQLTWTRLPQGFKNSPTLFNEALHRDLAPFRALNPQVVLLQYVDDLLVAAPTYEDCKKGTQKLLQELSKLGYRVSAKKAQLCQREVTYLGYLLKEGKRWLTPARKATVMKIPVPTTPRQVREFLGKAGFCRLFIPGFASLAAPLYPLTKPSIPFIWTEEHQQAFDHIKKALLSAPALALPDLTKPFTLYIDERAGVARGVLTQTLGPWRRPVAYLSKKLDPVASGWPTCLKAVAAVALLLKDADKLTLGQNVTVIASHSLESIVRQPPDRWMTNARMTHYQSLLLNERVSFAPPAVLNPATLLPVESEATPVHRCSEILAEETGTRRDLEDQPLPGVPTWYTDGSSFITEGKRRAGAPIVDGKRTVWASSLPEGTSAQKAELVALTQALRLAEGKNINIYTDSRYAFATAHIHGAIYKQRGWLTSAGKDIKNKEEILALLEAIHLPRRVAIIHCPGHQRGSNPVATGNRRADEAAKQAALSTRVLAGTTKPAGKRTADGSEFEKRTADGSEFESPKKKAKVE

SEQ ID NO: 1451 - protein, 2094 aa, synthetic construct
  source 1..2094: note = Description of Artificial Sequence: Synthetic polypeptide
MPAAKRVKLDGGDKKYSIGLDIGTNSVGWAVITDEYKVPSKKFKVLGNTDRHSIKKNLIGALLFDSGETAEATRLKRTARRRYTRRKNRICYLQEIFSNEMAKVDDSFFHRLEESFLVEEDKKHERHPIFGNIVDEVAYHEKYPTIYHLRKKLVDSTDKADLRLIYLALAHMIKFRGHFLIEGDLNPDNSDVDKLFIQLVQTYNQLFEENPINASGVDAKAILSARLSKSRRLENLIAQLPGEKKNGLFGNLIALSLGLTPNFKSNFDLAEDAKLQLSKDTYDDDLDNLLAQIGDQYADLFLAAKNLSDAILLSDILRVNTEITKAPLSASMIKRYDEHHQDLTLLKALVRQQLPEKYKEIFFDQSKNGYAGYIDGGASQEEFYKFIKPILEKMDGTEELLVKLNREDLLRKQRTFDNGSIPHQIHLGELHAILRRQEDFYPFLKDNREKIEKILTFRIPYYVGPLARGNSRFAWMTRKSEETITPWNFEEVVDKGASAQSFIERMTNFDKNLPNEKVLPKHSLLYEYFTVYNELTKVKYVTEGMRKPAFLSGEQKKAIVDLLFKTNRKVTVKQLKEDYFKKIECFDSVEISGVEDRFNASLGTYHDLLKIIKDKDFLDNEENEDILEDIVLTLTLFEDREMIEERLKTYAHLFDDKVMKQLKRRRYTGWGRLSRKLINGIRDKQSGKTILDFLKSDGFANRNFMQLIHDDSLTFKEDIQKAQVSGQGDSLHEHIANLAGSPAIKKGILQTVKVVDELVKVMGRHKPENIVIEMARENQTTQKGQKNSRERMKRIEEGIKELGSQILKEHPVENTQLQNEKLYLYYLQNGRDMYVDQELDINRLSDYDVDHIVPQSFLKDDSIDNKVLTRSDKARGKSDNVPSEEVVKKMKNYWRQLLNAKLITQRKFDNLTKAERGGLSELDKAGFIKRQLVETRQITKHVAQILDSRMNTKYDENDKLIREVKVITLKSKLVSDFRKDFQFYKVREINNYHHAHDAYLNAVVGTALIKKYPKLESEFVYGDYKVYDVRKMIAKSEQEIGKATAKYFFYSNIMNFFKTEITLANGEIRKRPLIETNGETGEIVWDKGRDFATVRKVLSMPQVNIVKKTEVQTGGFSKESILPKRNSDKLIARKKDWDPKKYGGFDSPTVAYSVLVVAKVEKGKSKKLKSVKELLGITIMERSSFEKNPIDFLEAKGYKEVKKDLIIKLPKYSLFELENGRKRMLASAGELQKGNELALPSKYVNFLYLASHYEKLKGSPEDNEQKQLFVEQHKHYLDEIIEQISEFSKRVILADANLDKVLSAYNKHRDKPIREQAENIIHLFTLTNLGAPAAFKYFDTTIDRKRYTSTKEVLDATLIHQSITGLYETRIDLSQLGGDGGEAAAKGGGGGSGGVLNLEEEYRLHEKPVPSSIDPSWLQLFPTVWAERAGMGLANQVPPVVVELRSGASPVAVRQYPMSKEAREGIRPHIQKFLDLGVLVPCRSPWNTPLLPVKKPGTNDYRPVQDLREINKRVQDIHPTVPNPYNLLSSLPPSYTWYSVLDLKDAFFCLRLHPNSQPLFAFEWKDPEKGNTGQLTWTRLPQGFKNSPTLFNEALHRDLAPFRALNPQVVLLQYVDDLLVAAPTYEDCKKGTQKLLQELSKLGYRVSAKKAQLCQREVTYLGYLLKEGKRWLTPARKATVMKIPVPTTPRQVREFLGKAGFCRLFIPGFASLAAPLYPLTKPSIPFIWTEEHQQAFDHIKKALLSAPALALPDLTKPFTLYIDERAGVARGVLTQTLGPWRRPVAYLSKKLDPVASGWPTCLKAVAAVALLLKDADKLTLGQNVTVIASHSLESIVRQPPDRWMTNARMTHYQSLLLNERVSFAPPAVLNPATLLPVESEATPVHRCSEILAEETGTRRDLEDQPLPGVPTWYTDGSSFITEGKRRAGAPIVDGKRTVWASSLPEGTSAQKAELVALTQALRLAEGKNINIYTDSRYAFATAHIHGAIYKQRGWLTSAGKDIKNKEEILALLEAIHLPRRVAIIHCPGHQRGSNPVATGNRRADEAAKQAALSTRVLAGTTKPAGKRTADGSEFEKRTADGSEFESPKKKAKVE

SEQ ID NO: 1452 - protein, 2098 aa, synthetic construct
  source 1..2098: note = Description of Artificial Sequence: Synthetic polypeptide
MPAAKRVKLDGGDKKYSIGLDIGTNSVGWAVITDEYKVPSKKFKVLGNTDRHSIKKNLIGALLFDSGETAEATRLKRTARRRYTRRKNRICYLQEIFSNEMAKVDDSFFHRLEESFLVEEDKKHERHPIFGNIVDEVAYHEKYPTIYHLRKKLVDSTDKADLRLIYLALAHMIKFRGHFLIEGDLNPDNSDVDKLFIQLVQTYNQLFEENPINASGVDAKAILSARLSKSRRLENLIAQLPGEKKNGLFGNLIALSLGLTPNFKSNFDLAEDAKLQLSKDTYDDDLDNLLAQIGDQYADLFLAAKNLSDAILLSDILRVNTEITKAPLSASMIKRYDEHHQDLTLLKALVRQQLPEKYKEIFFDQSKNGYAGYIDGGASQEEFYKFIKPILEKMDGTEELLVKLNREDLLRKQRTFDNGSIPHQIHLGELHAILRRQEDFYPFLKDNREKIEKILTFRIPYYVGPLARGNSRFAWMTRKSEETITPWNFEEVVDKGASAQSFIERMTNFDKNLPNEKVLPKHSLLYEYFTVYNELTKVKYVTEGMRKPAFLSGEQKKAIVDLLFKTNRKVTVKQLKEDYFKKIECFDSVEISGVEDRFNASLGTYHDLLKIIKDKDFLDNEENEDILEDIVLTLTLFEDREMIEERLKTYAHLFDDKVMKQLKRRRYTGWGRLSRKLINGIRDKQSGKTILDFLKSDGFANRNFMQLIHDDSLTFKEDIQKAQVSGQGDSLHEHIANLAGSPAIKKGILQTVKVVDELVKVMGRHKPENIVIEMARENQTTQKGQKNSRERMKRIEEGIKELGSQILKEHPVENTQLQNEKLYLYYLQNGRDMYVDQELDINRLSDYDVDHIVPQSFLKDDSIDNKVLTRSDKARGKSDNVPSEEVVKKMKNYWRQLLNAKLITQRKFDNLTKAERGGLSELDKAGFIKRQLVETRQITKHVAQILDSRMNTKYDENDKLIREVKVITLKSKLVSDFRKDFQFYKVREINNYHHAHDAYLNAVVGTALIKKYPKLESEFVYGDYKVYDVRKMIAKSEQEIGKATAKYFFYSNIMNFFKTEITLANGEIRKRPLIETNGETGEIVWDKGRDFATVRKVLSMPQVNIVKKTEVQTGGFSKESILPKRNSDKLIARKKDWDPKKYGGFDSPTVAYSVLVVAKVEKGKSKKLKSVKELLGITIMERSSFEKNPIDFLEAKGYKEVKKDLIIKLPKYSLFELENGRKRMLASAGELQKGNELALPSKYVNFLYLASHYEKLKGSPEDNEQKQLFVEQHKHYLDEIIEQISEFSKRVILADANLDKVLSAYNKHRDKPIREQAENIIHLFTLTNLGAPAAFKYFDTTIDRKRYTSTKEVLDATLIHQSITGLYETRIDLSQLGGDGGEAAAKEAAAKEAAAKGGVLNLEEEYRLHEKPVPSSIDPSWLQLFPTVWAERAGMGLANQVPPVVVELRSGASPVAVRQYPMSKEAREGIRPHIQKFLDLGVLVPCRSPWNTPLLPVKKPGTNDYRPVQDLREINKRVQDIHPTVPNPYNLLSSLPPSYTWYSVLDLKDAFFCLRLHPNSQPLFAFEWKDPEKGNTGQLTWTRLPQGFKNSPTLFNEALHRDLAPFRALNPQVVLLQYVDDLLVAAPTYEDCKKGTQKLLQELSKLGYRVSAKKAQLCQREVTYLGYLLKEGKRWLTPARKATVMKIPVPTTPRQVREFLGKAGFCRLFIPGFASLAAPLYPLTKPSIPFIWTEEHQQAFDHIKKALLSAPALALPDLTKPFTLYIDERAGVARGVLTQTLGPWRRPVAYLSKKLDPVASGWPTCLKAVAAVALLLKDADKLTLGQNVTVIASHSLESIVRQPPDRWMTNARMTHYQSLLLNERVSFAPPAVLNPATLLPVESEATPVHRCSEILAEETGTRRDLEDQPLPGVPTWYTDGSSFITEGKRRAGAPIVDGKRTVWASSLPEGTSAQKAELVALTQALRLAEGKNINIYTDSRYAFATAHIHGAIYKQRGWLTSAGKDIKNKEEILALLEAIHLPRRVAIIHCPGHQRGSNPVATGNRRADEAAKQAALSTRVLAGTTKPAGKRTADGSEFEKRTADGSEFESPKKKAKVE

SEQ ID NO: 1453 - protein, 2094 aa, synthetic construct
  source 1..2094: note = Description of Artificial Sequence: Synthetic polypeptide
MPAAKRVKLDGGDKKYSIGLDIGTNSVGWAVITDEYKVPSKKFKVLGNTDRHSIKKNLIGALLFDSGETAEATRLKRTARRRYTRRKNRICYLQEIFSNEMAKVDDSFFHRLEESFLVEEDKKHERHPIFGNIVDEVAYHEKYPTIYHLRKKLVDSTDKADLRLIYLALAHMIKFRGHFLIEGDLNPDNSDVDKLFIQLVQTYNQLFEENPINASGVDAKAILSARLSKSRRLENLIAQLPGEKKNGLFGNLIALSLGLTPNFKSNFDLAEDAKLQLSKDTYDDDLDNLLAQIGDQYADLFLAAKNLSDAILLSDILRVNTEITKAPLSASMIKRYDEHHQDLTLLKALVRQQLPEKYKEIFFDQSKNGYAGYIDGGASQEEFYKFIKPILEKMDGTEELLVKLNREDLLRKQRTFDNGSIPHQIHLGELHAILRRQEDFYPFLKDNREKIEKILTFRIPYYVGPLARGNSRFAWMTRKSEETITPWNFEEVVDKGASAQSFIERMTNFDKNLPNEKVLPKHSLLYEYFTVYNELTKVKYVTEGMRKPAFLSGEQKKAIVDLLFKTNRKVTVKQLKEDYFKKIECFDSVEISGVEDRFNASLGTYHDLLKIIKDKDFLDNEENEDILEDIVLTLTLFEDREMIEERLKTYAHLFDDKVMKQLKRRRYTGWGRLSRKLINGIRDKQSGKTILDFLKSDGFANRNFMQLIHDDSLTFKEDIQKAQVSGQGDSLHEHIANLAGSPAIKKGILQTVKVVDELVKVMGRHKPENIVIEMARENQTTQKGQKNSRERMKRIEEGIKELGSQILKEHPVENTQLQNEKLYLYYLQNGRDMYVDQELDINRLSDYDVDHIVPQSFLKDDSIDNKVLTRSDKARGKSDNVPSEEVVKKMKNYWRQLLNAKLITQRKFDNLTKAERGGLSELDKAGFIKRQLVETRQITKHVAQILDSRMNTKYDENDKLIREVKVITLKSKLVSDFRKDFQFYKVREINNYHHAHDAYLNAVVGTALIKKYPKLESEFVYGDYKVYDVRKMIAKSEQEIGKATAKYFFYSNIMNFFKTEITLANGEIRKRPLIETNGETGEIVWDKGRDFATVRKVLSMPQVNIVKKTEVQTGGFSKESILPKRNSDKLIARKKDWDPKKYGGFDSPTVAYSVLVVAKVEKGKSKKLKSVKELLGITIMERSSFEKNPIDFLEAKGYKEVKKDLIIKLPKYSLFELENGRKRMLASAGELQKGNELALPSKYVNFLYLASHYEKLKGSPEDNEQKQLFVEQHKHYLDEIIEQISEFSKRVILADANLDKVLSAYNKHRDKPIREQAENIIHLFTLTNLGAPAAFKYFDTTIDRKRYTSTKEVLDATLIHQSITGLYETRIDLSQLGGDGGPAPAPAPAPAPGGVLNLEEEYRLHEKPVPSSIDPSWLQLFPTVWAERAGMGLANQVPPVVVELRSGASPVAVRQYPMSKEAREGIRPHIQKFLDLGVLVPCRSPWNTPLLPVKKPGTNDYRPVQDLREINKRVQDIHPTVPNPYNLLSSLPPSYTWYSVLDLKDAFFCLRLHPNSQPLFAFEWKDPEKGNTGQLTWTRLPQGFKNSPTLFNEALHRDLAPFRALNPQVVLLQYVDDLLVAAPTYEDCKKGTQKLLQELSKLGYRVSAKKAQLCQREVTYLGYLLKEGKRWLTPARKATVMKIPVPTTPRQVREFLGKAGFCRLFIPGFASLAAPLYPLTKPSIPFIWTEEHQQAFDHIKKALLSAPALALPDLTKPFTLYIDERAGVARGVLTQTLGPWRRPVAYLSKKLDPVASGWPTCLKAVAAVALLLKDADKLTLGQNVTVIASHSLESIVRQPPDRWMTNARMTHYQSLLLNERVSFAPPAVLNPATLLPVESEATPVHRCSEILAEETGTRRDLEDQPLPGVPTWYTDGSSFITEGKRRAGAPIVDGKRTVWASSLPEGTSAQKAELVALTQALRLAEGKNINIYTDSRYAFATAHIHGAIYKQRGWLTSAGKDIKNKEEILALLEAIHLPRRVAIIHCPGHQRGSNPVATGNRRADEAAKQAALSTRVLAGTTKPAGKRTADGSEFEKRTADGSEFESPKKKAKVE

SEQ ID NO: 1454 - protein, 2113 aa, synthetic construct
  source 1..2113: note = Description of Artificial Sequence: Synthetic polypeptide
MPAAKRVKLDGGDKKYSIGLDIGTNSVGWAVITDEYKVPSKKFKVLGNTDRHSIKKNLIGALLFDSGETAEATRLKRTARRRYTRRKNRICYLQEIFSNEMAKVDDSFFHRLEESFLVEEDKKHERHPIFGNIVDEVAYHEKYPTIYHLRKKLVDSTDKADLRLIYLALAHMIKFRGHFLIEGDLNPDNSDVDKLFIQLVQTYNQLFEENPINASGVDAKAILSARLSKSRRLENLIAQLPGEKKNGLFGNLIALSLGLTPNFKSNFDLAEDAKLQLSKDTYDDDLDNLLAQIGDQYADLFLAAKNLSDAILLSDILRVNTEITKAPLSASMIKRYDEHHQDLTLLKALVRQQLPEKYKEIFFDQSKNGYAGYIDGGASQEEFYKFIKPILEKMDGTEELLVKLNREDLLRKQRTFDNGSIPHQIHLGELHAILRRQEDFYPFLKDNREKIEKILTFRIPYYVGPLARGNSRFAWMTRKSEETITPWNFEEVVDKGASAQSFIERMTNFDKNLPNEKVLPKHSLLYEYFTVYNELTKVKYVTEGMRKPAFLSGEQKKAIVDLLFKTNRKVTVKQLKEDYFKKIECFDSVEISGVEDRFNASLGTYHDLLKIIKDKDFLDNEENEDILEDIVLTLTLFEDREMIEERLKTYAHLFDDKVMKQLKRRRYTGWGRLSRKLINGIRDKQSGKTILDFLKSDGFANRNFMQLIHDDSLTFKEDIQKAQVSGQGDSLHEHIANLAGSPAIKKGILQTVKVVDELVKVMGRHKPENIVIEMARENQTTQKGQKNSRERMKRIEEGIKELGSQILKEHPVENTQLQNEKLYLYYLQNGRDMYVDQELDINRLSDYDVDHIVPQSFLKDDSIDNKVLTRSDKARGKSDNVPSEEVVKKMKNYWRQLLNAKLITQRKFDNLTKAERGGLSELDKAGFIKRQLVETRQITKHVAQILDSRMNTKYDENDKLIREVKVITLKSKLVSDFRKDFQFYKVREINNYHHAHDAYLNAVVGTALIKKYPKLESEFVYGDYKVYDVRKMIAKSEQEIGKATAKYFFYSNIMNFFKTEITLANGEIRKRPLIETNGETGEIVWDKGRDFATVRKVLSMPQVNIVKKTEVQTGGFSKESILPKRNSDKLIARKKDWDPKKYGGFDSPTVAYSVLVVAKVEKGKSKKLKSVKELLGITIMERSSFEKNPIDFLEAKGYKEVKKDLIIKLPKYSLFELENGRKRMLASAGELQKGNELALPSKYVNFLYLASHYEKLKGSPEDNEQKQLFVEQHKHYLDEIIEQISEFSKRVILADANLDKVLSAYNKHRDKPIREQAENIIHLFTLTNLGAPAAFKYFDTTIDRKRYTSTKEVLDATLIHQSITGLYETRIDLSQLGGDGGEAAAKEAAAKEAAAKEAAAKEAAAKEAAAKGGVLNLEEEYRLHEKPVPSSIDPSWLQLFPTVWAERAGMGLANQVPPVVVELRSGASPVAVRQYPMSKEAREGIRPHIQKFLDLGVLVPCRSPWNTPLLPVKKPGTNDYRPVQDLREINKRVQDIHPTVPNPYNLLSSLPPSYTWYSVLDLKDAFFCLRLHPNSQPLFAFEWKDPEKGNTGQLTWTRLPQGFKNSPTLFNEALHRDLAPFRALNPQVVLLQYVDDLLVAAPTYEDCKKGTQKLLQELSKLGYRVSAKKAQLCQREVTYLGYLLKEGKRWLTPARKATVMKIPVPTTPRQVREFLGKAGFCRLFIPGFASLAAPLYPLTKPSIPFIWTEEHQQAFDHIKKALLSAPALALPDLTKPFTLYIDERAGVARGVLTQTLGPWRRPVAYLSKKLDPVASGWPTCLKAVAAVALLLKDADKLTLGQNVTVIASHSLESIVRQPPDRWMTNARMTHYQSLLLNERVSFAPPAVLNPATLLPVESEATPVHRCSEILAEETGTRRDLEDQPLPGVPTWYTDGSSFITEGKRRAGAPIVDGKRTVWASSLPEGTSAQKAELVALTQALRLAEGKNINIYTDSRYAFATAHIHGAIYKQRGWLTSAGKDIKNKEEILALLEAIHLPRRVAIIHCPGHQRGSNPVATGNRRADEAAKQAALSTRVLAGTTKPAGKRTADGSEFEKRTADGSEFESPKKKAKVE

SEQ ID NO: 1455 - protein, 2094 aa, synthetic construct
  source 1..2094: note = Description of Artificial Sequence: Synthetic polypeptide
MPAAKRVKLDGGDKKYSIGLDIGTNSVGWAVITDEYKVPSKKFKVLGNTDRHSIKKNLIGALLFDSGETAEATRLKRTARRRYTRRKNRICYLQEIFSNEMAKVDDSFFHRLEESFLVEEDKKHERHPIFGNIVDEVAYHEKYPTIYHLRKKLVDSTDKADLRLIYLALAHMIKFRGHFLIEGDLNPDNSDVDKLFIQLVQTYNQLFEENPINASGVDAKAILSARLSKSRRLENLIAQLPGEKKNGLFGNLIALSLGLTPNFKSNFDLAEDAKLQLSKDTYDDDLDNLLAQIGDQYADLFLAAKNLSDAILLSDILRVNTEITKAPLSASMIKRYDEHHQDLTLLKALVRQQLPEKYKEIFFDQSKNGYAGYIDGGASQEEFYKFIKPILEKMDGTEELLVKLNREDLLRKQRTFDNGSIPHQIHLGELHAILRRQEDFYPFLKDNREKIEKILTFRIPYYVGPLARGNSRFAWMTRKSEETITPWNFEEVVDKGASAQSFIERMTNFDKNLPNEKVLPKHSLLYEYFTVYNELTKVKYVTEGMRKPAFLSGEQKKAIVDLLFKTNRKVTVKQLKEDYFKKIECFDSVEISGVEDRFNASLGTYHDLLKIIKDKDFLDNEENEDILEDIVLTLTLFEDREMIEERLKTYAHLFDDKVMKQLKRRRYTGWGRLSRKLINGIRDKQSGKTILDFLKSDGFANRNFMQLIHDDSLTFKEDIQKAQVSGQGDSLHEHIANLAGSPAIKKGILQTVKVVDELVKVMGRHKPENIVIEMARENQTTQKGQKNSRERMKRIEEGIKELGSQILKEHPVENTQLQNEKLYLYYLQNGRDMYVDQELDINRLSDYDVDHIVPQSFLKDDSIDNKVLTRSDKARGKSDNVPSEEVVKKMKNYWRQLLNAKLITQRKFDNLTKAERGGLSELDKAGFIKRQLVETRQITKHVAQILDSRMNTKYDENDKLIREVKVITLKSKLVSDFRKDFQFYKVREINNYHHAHDAYLNAVVGTALIKKYPKLESEFVYGDYKVYDVRKMIAKSEQEIGKATAKYFFYSNIMNFFKTEITLANGEIRKRPLIETNGETGEIVWDKGRDFATVRKVLSMPQVNIVKKTEVQTGGFSKESILPKRNSDKLIARKKDWDPKKYGGFDSPTVAYSVLVVAKVEKGKSKKLKSVKELLGITIMERSSFEKNPIDFLEAKGYKEVKKDLIIKLPKYSLFELENGRKRMLASAGELQKGNELALPSKYVNFLYLASHYEKLKGSPEDNEQKQLFVEQHKHYLDEIIEQISEFSKRVILADANLDKVLSAYNKHRDKPIREQAENIIHLFTLTNLGAPAAFKYFDTTIDRKRYTSTKEVLDATLIHQSITGLYETRIDLSQLGGDGGEAAAKGGGGSSGGVLNLEEEYRLHEKPVPSSIDPSWLQLFPTVWAERAGMGLANQVPPVVVELRSGASPVAVRQYPMSKEAREGIRPHIQKFLDLGVLVPCRSPWNTPLLPVKKPGTNDYRPVQDLREINKRVQDIHPTVPNPYNLLSSLPPSYTWYSVLDLKDAFFCLRLHPNSQPLFAFEWKDPEKGNTGQLTWTRLPQGFKNSPTLFNEALHRDLAPFRALNPQVVLLQYVDDLLVAAPTYEDCKKGTQKLLQELSKLGYRVSAKKAQLCQREVTYLGYLLKEGKRWLTPARKATVMKIPVPTTPRQVREFLGKAGFCRLFIPGFASLAAPLYPLTKPSIPFIWTEEHQQAFDHIKKALLSAPALALPDLTKPFTLYIDERAGVARGVLTQTLGPWRRPVAYLSKKLDPVASGWPTCLKAVAAVALLLKDADKLTLGQNVTVIASHSLESIVRQPPDRWMTNARMTHYQSLLLNERVSFAPPAVLNPATLLPVESEATPVHRCSEILAEETGTRRDLEDQPLPGVPTWYTDGSSFITEGKRRAGAPIVDGKRTVWASSLPEGTSAQKAELVALTQALRLAEGKNINIYTDSRYAFATAHIHGAIYKQRGWLTSAGKDIKNKEEILALLEAIHLPRRVAIIHCPGHQRGSNPVATGNRRADEAAKQAALSTRVLAGTTKPAGKRTADGSEFEKRTADGSEFESPKKKAKVE

SEQ ID NO: 1456 - protein, 2094 aa, synthetic construct
  source 1..2094: note = Description of Artificial Sequence: Synthetic polypeptide
MPAAKRVKLDGGDKKYSIGLDIGTNSVGWAVITDEYKVPSKKFKVLGNTDRHSIKKNLIGALLFDSGETAEATRLKRTARRRYTRRKNRICYLQEIFSNEMAKVDDSFFHRLEESFLVEEDKKHERHPIFGNIVDEVAYHEKYPTIYHLRKKLVDSTDKADLRLIYLALAHMIKFRGHFLIEGDLNPDNSDVDKLFIQLVQTYNQLFEENPINASGVDAKAILSARLSKSRRLENLIAQLPGEKKNGLFGNLIALSLGLTPNFKSNFDLAEDAKLQLSKDTYDDDLDNLLAQIGDQYADLFLAAKNLSDAILLSDILRVNTEITKAPLSASMIKRYDEHHQDLTLLKALVRQQLPEKYKEIFFDQSKNGYAGYIDGGASQEEFYKFIKPILEKMDGTEELLVKLNREDLLRKQRTFDNGSIPHQIHLGELHAILRRQEDFYPFLKDNREKIEKILTFRIPYYVGPLARGNSRFAWMTRKSEETITPWNFEEVVDKGASAQSFIERMTNFDKNLPNEKVLPKHSLLYEYFTVYNELTKVKYVTEGMRKPAFLSGEQKKAIVDLLFKTNRKVTVKQLKEDYFKKIECFDSVEISGVEDRFNASLGTYHDLLKIIKDKDFLDNEENEDILEDIVLTLTLFEDREMIEERLKTYAHLFDDKVMKQLKRRRYTGWGRLSRKLINGIRDKQSGKTILDFLKSDGFANRNFMQLIHDDSLTFKEDIQKAQVSGQGDSLHEHIANLAGSPAIKKGILQTVKVVDELVKVMGRHKPENIVIEMARENQTTQKGQKNSRERMKRIEEGIKELGSQILKEHPVENTQLQNEKLYLYYLQNGRDMYVDQELDINRLSDYDVDHIVPQSFLKDDSIDNKVLTRSDKARGKSDNVPSEEVVKKMKNYWRQLLNAKLITQRKFDNLTKAERGGLSELDKAGFIKRQLVETRQITKHVAQILDSRMNTKYDENDKLIREVKVITLKSKLVSDFRKDFQFYKVREINNYHHAHDAYLNAVVGTALIKKYPKLESEFVYGDYKVYDVRKMIAKSEQEIGKATAKYFFYSNIMNFFKTEITLANGEIRKRPLIETNGETGEIVWDKGRDFATVRKVLSMPQVNIVKKTEVQTGGFSKESILPKRNSDKLIARKKDWDPKKYGGFDSPTVAYSVLVVAKVEKGKSKKLKSVKELLGITIMERSSFEKNPIDFLEAKGYKEVKKDLIIKLPKYSLFELENGRKRMLASAGELQKGNELALPSKYVNFLYLASHYEKLKGSPEDNEQKQLFVEQHKHYLDEIIEQISEFSKRVILADANLDKVLSAYNKHRDKPIREQAENIIHLFTLTNLGAPAAFKYFDTTIDRKRYTSTKEVLDATLIHQSITGLYETRIDLSQLGGDGGGGGGGSEAAAKGGVLNLEEEYRLHEKPVPSSIDPSWLQLFPTVWAERAGMGLANQVPPVVVELRSGASPVAVRQYPMSKEAREGIRPHIQKFLDLGVLVPCRSPWNTPLLPVKKPGTNDYRPVQDLREINKRVQDIHPTVPNPYNLLSSLPPSYTWYSVLDLKDAFFCLRLHPNSQPLFAFEWKDPEKGNTGQLTWTRLPQGFKNSPTLFNEALHRDLAPFRALNPQVVLLQYVDDLLVAAPTYEDCKKGTQKLLQELSKLGYRVSAKKAQLCQREVTYLGYLLKEGKRWLTPARKATVMKIPVPTTPRQVREFLGKAGFCRLFIPGFASLAAPLYPLTKPSIPFIWTEEHQQAFDHIKKALLSAPALALPDLTKPFTLYIDERAGVARGVLTQTLGPWRRPVAYLSKKLDPVASGWPTCLKAVAAVALLLKDADKLTLGQNVTVIASHSLESIVRQPPDRWMTNARMTHYQSLLLNERVSFAPPAVLNPATLLPVESEATPVHRCSEILAEETGTRRDLEDQPLPGVPTWYTDGSSFITEGKRRAGAPIVDGKRTVWASSLPEGTSAQKAELVALTQALRLAEGKNINIYTDSRYAFATAHIHGAIYKQRGWLTSAGKDIKNKEEILALLEAIHLPRRVAIIHCPGHQRGSNPVATGNRRADEAAKQAALSTRVLAGTTKPAGKRTADGSEFEKRTADGSEFESPKKKAKVE

SEQ ID NO: 1457 - protein, 2094 aa, synthetic construct
  source 1..2094: note = Description of Artificial Sequence: Synthetic polypeptide
MPAAKRVKLDGGDKKYSIGLDIGTNSVGWAVITDEYKVPSKKFKVLGNTDRHSIKKNLIGALLFDSGETAEATRLKRTARRRYTRRKNRICYLQEIFSNEMAKVDDSFFHRLEESFLVEEDKKHERHPIFGNIVDEVAYHEKYPTIYHLRKKLVDSTDKADLRLIYLALAHMIKFRGHFLIEGDLNPDNSDVDKLFIQLVQTYNQLFEENPINASGVDAKAILSARLSKSRRLENLIAQLPGEKKNGLFGNLIALSLGLTPNFKSNFDLAEDAKLQLSKDTYDDDLDNLLAQIGDQYADLFLAAKNLSDAILLSDILRVNTEITKAPLSASMIKRYDEHHQDLTLLKALVRQQLPEKYKEIFFDQSKNGYAGYIDGGASQEEFYKFIKPILEKMDGTEELLVKLNREDLLRKQRTFDNGSIPHQIHLGELHAILRRQEDFYPFLKDNREKIEKILTFRIPYYVGPLARGNSRFAWMTRKSEETITPWNFEEVVDKGASAQSFIERMTNFDKNLPNEKVLPKHSLLYEYFTVYNELTKVKYVTEGMRKPAFLSGEQKKAIVDLLFKTNRKVTVKQLKEDYFKKIECFDSVEISGVEDRFNASLGTYHDLLKIIKDKDFLDNEENEDILEDIVLTLTLFEDREMIEERLKTYAHLFDDKVMKQLKRRRYTGWGRLSRKLINGIRDKQSGKTILDFLKSDGFANRNFMQLIHDDSLTFKEDIQKAQVSGQGDSLHEHIANLAGSPAIKKGILQTVKVVDELVKVMGRHKPENIVIEMARENQTTQKGQKNSRERMKRIEEGIKELGSQILKEHPVENTQLQNEKLYLYYLQNGRDMYVDQELDINRLSDYDVDHIVPQSFLKDDSIDNKVLTRSDKARGKSDNVPSEEVVKKMKNYWRQLLNAKLITQRKFDNLTKAERGGLSELDKAGFIKRQLVETRQITKHVAQILDSRMNTKYDENDKLIREVKVITLKSKLVSDFRKDFQFYKVREINNYHHAHDAYLNAVVGTALIKKYPKLESEFVYGDYKVYDVRKMIAKSEQEIGKATAKYFFYSNIMNFFKTEITLANGEIRKRPLIETNGETGEIVWDKGRDFATVRKVLSMPQVNIVKKTEVQTGGFSKESILPKRNSDKLIARKKDWDPKKYGGFDSPTVAYSVLVVAKVEKGKSKKLKSVKELLGITIMERSSFEKNPIDFLEAKGYKEVKKDLIIKLPKYSLFELENGRKRMLASAGELQKGNELALPSKYVNFLYLASHYEKLKGSPEDNEQKQLFVEQHKHYLDEIIEQISEFSKRVILADANLDKVLSAYNKHRDKPIREQAENIIHLFTLTNLGAPAAFKYFDTTIDRKRYTSTKEVLDATLIHQSITGLYETRIDLSQLGGDGGGSSPAPEAAAKGGVLNLEEEYRLHEKPVPSSIDPSWLQLFPTVWAERAGMGLANQVPPVVVELRSGASPVAVRQYPMSKEAREGIRPHIQKFLDLGVLVPCRSPWNTPLLPVKKPGTNDYRPVQDLREINKRVQDIHPTVPNPYNLLSSLPPSYTWYSVLDLKDAFFCLRLHPNSQPLFAFEWKDPEKGNTGQLTWTRLPQGFKNSPTLFNEALHRDLAPFRALNPQVVLLQYVDDLLVAAPTYEDCKKGTQKLLQELSKLGYRVSAKKAQLCQREVTYLGYLLKEGKRWLTPARKATVMKIPVPTTPRQVREFLGKAGFCRLFIPGFASLAAPLYPLTKPSIPFIWTEEHQQAFDHIKKALLSAPALALPDLTKPFTLYIDERAGVARGVLTQTLGPWRRPVAYLSKKLDPVASGWPTCLKAVAAVALLLKDADKLTLGQNVTVIASHSLESIVRQPPDRWMTNARMTHYQSLLLNERVSFAPPAVLNPATLLPVESEATPVHRCSEILAEETGTRRDLEDQPLPGVPTWYTDGSSFITEGKRRAGAPIVDGKRTVWASSLPEGTSAQKAELVALTQALRLAEGKNINIYTDSRYAFATAHIHGAIYKQRGWLTSAGKDIKNKEEILALLEAIHLPRRVAIIHCPGHQRGSNPVATGNRRADEAAKQAALSTRVLAGTTKPAGKRTADGSEFEKRTADGSEFESPKKKAKVE

SEQ ID NO: 1458 - protein, 2098 aa, synthetic construct
  source 1..2098: note = Description of Artificial Sequence: Synthetic polypeptide
MPAAKRVKLDGGDKKYSIGLDIGTNSVGWAVITDEYKVPSKKFKVLGNTDRHSIKKNLIGALLFDSGETAEATRLKRTARRRYTRRKNRICYLQEIFSNEMAKVDDSFFHRLEESFLVEEDKKHERHPIFGNIVDEVAYHEKYPTIYHLRKKLVDSTDKADLRLIYLALAHMIKFRGHFLIEGDLNPDNSDVDKLFIQLVQTYNQLFEENPINASGVDAKAILSARLSKSRRLENLIAQLPGEKKNGLFGNLIALSLGLTPNFKSNFDLAEDAKLQLSKDTYDDDLDNLLAQIGDQYADLFLAAKNLSDAILLSDILRVNTEITKAPLSASMIKRYDEHHQDLTLLKALVRQQLPEKYKEIFFDQSKNGYAGYIDGGASQEEFYKFIKPILEKMDGTEELLVKLNREDLLRKQRTFDNGSIPHQIHLGELHAILRRQEDFYPFLKDNREKIEKILTFRIPYYVGPLARGNSRFAWMTRKSEETITPWNFEEVVDKGASAQSFIERMTNFDKNLPNEKVLPKHSLLYEYFTVYNELTKVKYVTEGMRKPAFLSGEQKKAIVDLLFKTNRKVTVKQLKEDYFKKIECFDSVEISGVEDRFNASLGTYHDLLKIIKDKDFLDNEENEDILEDIVLTLTLFEDREMIEERLKTYAHLFDDKVMKQLKRRRYTGWGRLSRKLINGIRDKQSGKTILDFLKSDGFANRNFMQLIHDDSLTFKEDIQKAQVSGQGDSLHEHIANLAGSPAIKKGILQTVKVVDELVKVMGRHKPENIVIEMARENQTTQKGQKNSRERMKRIEEGIKELGSQILKEHPVENTQLQNEKLYLYYLQNGRDMYVDQELDINRLSDYDVDHIVPQSFLKDDSIDNKVLTRSDKARGKSDNVPSEEVVKKMKNYWRQLLNAKLITQRKFDNLTKAERGGLSELDKAGFIKRQLVETRQITKHVAQILDSRMNTKYDENDKLIREVKVITLKSKLVSDFRKDFQFYKVREINNYHHAHDAYLNAVVGTALIKKYPKLESEFVYGDYKVYDVRKMIAKSEQEIGKATAKYFFYSNIMNFFKTEITLANGEIRKRPLIETNGETGEIVWDKGRDFATVRKVLSMPQVNIVKKTEVQTGGFSKESILPKRNSDKLIARKKDWDPKKYGGFDSPTVAYSVLVVAKVEKGKSKKLKSVKELLGITIMERSSFEKNPIDFLEAKGYKEVKKDLIIKLPKYSLFELENGRKRMLASAGELQKGNELALPSKYVNFLYLASHYEKLKGSPEDNEQKQLFVEQHKHYLDEIIEQISEFSKRVILADANLDKVLSAYNKHRDKPIREQAENIIHLFTLTNLGAPAAFKYFDTTIDRKRYTSTKEVLDATLIHQSITGLYETRIDLSQLGGDGGGGGGSGGGGSGGGGSGGVLNLEEEYRLHEKPVPSSIDPSWLQLFPTVWAERAGMGLANQVPPVVVELRSGASPVAVRQYPMSKEAREGIRPHIQKFLDLGVLVPCRSPWNTPLLPVKKPGTNDYRPVQDLREINKRVQDIHPTVPNPYNLLSSLPPSYTWYSVLDLKDAFFCLRLHPNSQPLFAFEWKDPEKGNTGQLTWTRLPQGFKNSPTLFNEALHRDLAPFRALNPQVVLLQYVDDLLVAAPTYEDCKKGTQKLLQELSKLGYRVSAKKAQLCQREVTYLGYLLKEGKRWLTPARKATVMKIPVPTTPRQVREFLGKAGFCRLFIPGFASLAAPLYPLTKPSIPFIWTEEHQQAFDHIKKALLSAPALALPDLTKPFTLYIDERAGVARGVLTQTLGPWRRPVAYLSKKLDPVASGWPTCLKAVAAVALLLKDADKLTLGQNVTVIASHSLESIVRQPPDRWMTNARMTHYQSLLLNERVSFAPPAVLNPATLLPVESEATPVHRCSEILAEETGTRRDLEDQPLPGVPTWYTDGSSFITEGKRRAGAPIVDGKRTVWASSLPEGTSAQKAELVALTQALRLAEGKNINIYTDSRYAFATAHIHGAIYKQRGWLTSAGKDIKNKEEILALLEAIHLPRRVAIIHCPGHQRGSNPVATGNRRADEAAKQAALSTRVLAGTTKPAGKRTADGSEFEKRTADGSEFESPKKKAKVE

SEQ ID NO: 1459 - protein, 2094 aa, synthetic construct
  source 1..2094: note = Description of Artificial Sequence: Synthetic polypeptide
MPAAKRVKLDGGDKKYSIGLDIGTNSVGWAVITDEYKVPSKKFKVLGNTDRHSIKKNLIGALLFDSGETAEATRLKRTARRRYTRRKNRICYLQEIFSNEMAKVDDSFFHRLEESFLVEEDKKHERHPIFGNIVDEVAYHEKYPTIYHLRKKLVDSTDKADLRLIYLALAHMIKFRGHFLIEGDLNPDNSDVDKLFIQLVQTYNQLFEENPINASGVDAKAILSARLSKSRRLENLIAQLPGEKKNGLFGNLIALSLGLTPNFKSNFDLAEDAKLQLSKDTYDDDLDNLLAQIGDQYADLFLAAKNLSDAILLSDILRVNTEITKAPLSASMIKRYDEHHQDLTLLKALVRQQLPEKYKEIFFDQSKNGYAGYIDGGASQEEFYKFIKPILEKMDGTEELLVKLNREDLLRKQRTFDNGSIPHQIHLGELHAILRRQEDFYPFLKDNREKIEKILTFRIPYYVGPLARGNSRFAWMTRKSEETITPWNFEEVVDKGASAQSFIERMTNFDKNLPNEKVLPKHSLLYEYFTVYNELTKVKYVTEGMRKPAFLSGEQKKAIVDLLFKTNRKVTVKQLKEDYFKKIECFDSVEISGVEDRFNASLGTYHDLLKIIKDKDFLDNEENEDILEDIVLTLTLFEDREMIEERLKTYAHLFDDKVMKQLKRRRYTGWGRLSRKLINGIRDKQSGKTILDFLKSDGFANRNFMQLIHDDSLTFKEDIQKAQVSGQGDSLHEHIANLAGSPAIKKGILQTVKVVDELVKVMGRHKPENIVIEMARENQTTQKGQKNSRERMKRIEEGIKELGSQILKEHPVENTQLQNEKLYLYYLQNGRDMYVDQELDINRLSDYDVDHIVPQSFLKDDSIDNKVLTRSDKARGKSDNVPSEEVVKKMKNYWRQLLNAKLITQRKFDNLTKAERGGLSELDKAGFIKRQLVETRQITKHVAQILDSRMNTKYDENDKLIREVKVITLKSKLVSDFRKDFQFYKVREINNYHHAHDAYLNAVVGTALIKKYPKLESEFVYGDYKVYDVRKMIAKSEQEIGKATAKYFFYSNIMNFFKTEITLANGEIRKRPLIETNGETGEIVWDKGRDFATVRKVLSMPQVNIVKKTEVQTGGFSKESILPKRNSDKLIARKKDWDPKKYGGFDSPTVAYSVLVVAKVEKGKSKKLKSVKELLGITIMERSSFEKNPIDFLEAKGYKEVKKDLIIKLPKYSLFELENGRKRMLASAGELQKGNELALPSKYVNFLYLASHYEKLKGSPEDNEQKQLFVEQHKHYLDEIIEQISEFSKRVILADANLDKVLSAYNKHRDKPIREQAENIIHLFTLTNLGAPAAFKYFDTTIDRKRYTSTKEVLDATLIHQSITGLYETRIDLSQLGGDGGPAPGGGEAAAKGGVLNLEEEYRLHEKPVPSSIDPSWLQLFPTVWAERAGMGLANQVPPVVVELRSGASPVAVRQYPMSKEAREGIRPHIQKFLDLGVLVPCRSPWNTPLLPVKKPGTNDYRPVQDLREINKRVQDIHPTVPNPYNLLSSLPPSYTWYSVLDLKDAFFCLRLHPNSQPLFAFEWKDPEKGNTGQLTWTRLPQGFKNSPTLFNEALHRDLAPFRALNPQVVLLQYVDDLLVAAPTYEDCKKGTQKLLQELSKLGYRVSAKKAQLCQREVTYLGYLLKEGKRWLTPARKATVMKIPVPTTPRQVREFLGKAGFCRLFIPGFASLAAPLYPLTKPSIPFIWTEEHQQAFDHIKKALLSAPALALPDLTKPFTLYIDERAGVARGVLTQTLGPWRRPVAYLSKKLDPVASGWPTCLKAVAAVALLLKDADKLTLGQNVTVIASHSLESIVRQPPDRWMTNARMTHYQSLLLNERVSFAPPAVLNPATLLPVESEATPVHRCSEILAEETGTRRDLEDQPLPGVPTWYTDGSSFITEGKRRAGAPIVDGKRTVWASSLPEGTSAQKAELVALTQALRLAEGKNINIYTDSRYAFATAHIHGAIYKQRGWLTSAGKDIKNKEEILALLEAIHLPRRVAIIHCPGHQRGSNPVATGNRRADEAAKQAALSTRVLAGTTKPAGKRTADGSEFEKRTADGSEFESPKKKAKVE

SEQ ID NO: 1460 - protein, 2092 aa, synthetic construct
  source 1..2092: note = Description of Artificial Sequence: Synthetic polypeptide
MPAAKRVKLDGGDKKYSIGLDIGTNSVGWAVITDEYKVPSKKFKVLGNTDRHSIKKNLIGALLFDSGETAEATRLKRTARRRYTRRKNRICYLQEIFSNEMAKVDDSFFHRLEESFLVEEDKKHERHPIFGNIVDEVAYHEKYPTIYHLRKKLVDSTDKADLRLIYLALAHMIKFRGHFLIEGDLNPDNSDVDKLFIQLVQTYNQLFEENPINASGVDAKAILSARLSKSRRLENLIAQLPGEKKNGLFGNLIALSLGLTPNFKSNFDLAEDAKLQLSKDTYDDDLDNLLAQIGDQYADLFLAAKNLSDAILLSDILRVNTEITKAPLSASMIKRYDEHHQDLTLLKALVRQQLPEKYKEIFFDQSKNGYAGYIDGGASQEEFYKFIKPILEKMDGTEELLVKLNREDLLRKQRTFDNGSIPHQIHLGELHAILRRQEDFYPFLKDNREKIEKILTFRIPYYVGPLARGNSRFAWMTRKSEETITPWNFEEVVDKGASAQSFIERMTNFDKNLPNEKVLPKHSLLYEYFTVYNELTKVKYVTEGMRKPAFLSGEQKKAIVDLLFKTNRKVTVKQLKEDYFKKIECFDSVEISGVEDRFNASLGTYHDLLKIIKDKDFLDNEENEDILEDIVLTLTLFEDREMIEERLKTYAHLFDDKVMKQLKRRRYTGWGRLSRKLINGIRDKQSGKTILDFLKSDGFANRNFMQLIHDDSLTFKEDIQKAQVSGQGDSLHEHIANLAGSPAIKKGILQTVKVVDELVKVMGRHKPENIVIEMARENQTTQKGQKNSRERMKRIEEGIKELGSQILKEHPVENTQLQNEKLYLYYLQNGRDMYVDQELDINRLSDYDVDHIVPQSFLKDDSIDNKVLTRSDKARGKSDNVPSEEVVKKMKNYWRQLLNAKLITQRKFDNLTKAERGGLSELDKAGFIKRQLVETRQITKHVAQILDSRMNTKYDENDKLIREVKVITLKSKLVSDFRKDFQFYKVREINNYHHAHDAYLNAVVGTALIKKYPKLESEFVYGDYKVYDVRKMIAKSEQEIGKATAKYFFYSNIMNFFKTEITLANGEIRKRPLIETNGETGEIVWDKGRDFATVRKVLSMPQVNIVKKTEVQTGGFSKESILPKRNSDKLIARKKDWDPKKYGGFDSPTVAYSVLVVAKVEKGKSKKLKSVKELLGITIMERSSFEKNPIDFLEAKGYKEVKKDLIIKLPKYSLFELENGRKRMLASAGELQKGNELALPSKYVNFLYLASHYEKLKGSPEDNEQKQLFVEQHKHYLDEIIEQISEFSKRVILADANLDKVLSAYNKHRDKPIREQAENIIHLFTLTNLGAPAAFKYFDTTIDRKRYTSTKEVLDATLIHQSITGLYETRIDLSQLGGDGGPAPGGGGGSGGVLNLEEEYRLHEKPVPSSIDPSWLQLFPTVWAERAGMGLANQVPPVVVELRSGASPVAVRQYPMSKEAREGIRPHIQKFLDLGVLVPCRSPWNTPLLPVKKPGTNDYRPVQDLREINKRVQDIHPTVPNPYNLLSSLPPSYTWYSVLDLKDAFFCLRLHPNSQPLFAFEWKDPEKGNTGQLTWTRLPQGFKNSPTLFNEALHRDLAPFRALNPQVVLLQYVDDLLVAAPTYEDCKKGTQKLLQELSKLGYRVSAKKAQLCQREVTYLGYLLKEGKRWLTPARKATVMKIPVPTTPRQVREFLGKAGFCRLFIPGFASLAAPLYPLTKPSIPFIWTEEHQQAFDHIKKALLSAPALALPDLTKPFTLYIDERAGVARGVLTQTLGPWRRPVAYLSKKLDPVASGWPTCLKAVAAVALLLKDADKLTLGQNVTVIASHSLESIVRQPPDRWMTNARMTHYQSLLLNERVSFAPPAVLNPATLLPVESEATPVHRCSEILAEETGTRRDLEDQPLPGVPTWYTDGSSFITEGKRRAGAPIVDGKRTVWASSLPEGTSAQKAELVALTQALRLAEGKNINIYTDSRYAFATAHIHGAIYKQRGWLTSAGKDIKNKEEILALLEAIHLPRRVAIIHCPGHQRGSNPVATGNRRADEAAKQAALSTRVLAGTTKPAGKRTADGSEFEKRTADGSEFESPKKKAKVE

SEQ ID NO: 1461 - protein, 2094 aa, synthetic construct
  source 1..2094: note = Description of Artificial Sequence: Synthetic polypeptide
MPAAKRVKLDGGDKKYSIGLDIGTNSVGWAVITDEYKVPSKKFKVLGNTDRHSIKKNLIGALLFDSGETAEATRLKRTARRRYTRRKNRICYLQEIFSNEMAKVDDSFFHRLEESFLVEEDKKHERHPIFGNIVDEVAYHEKYPTIYHLRKKLVDSTDKADLRLIYLALAHMIKFRGHFLIEGDLNPDNSDVDKLFIQLVQTYNQLFEENPINASGVDAKAILSARLSKSRRLENLIAQLPGEKKNGLFGNLIALSLGLTPNFKSNFDLAEDAKLQLSKDTYDDDLDNLLAQIGDQYADLFLAAKNLSDAILLSDILRVNTEITKAPLSASMIKRYDEHHQDLTLLKALVRQQLPEKYKEIFFDQSKNGYAGYIDGGASQEEFYKFIKPILEKMDGTEELLVKLNREDLLRKQRTFDNGSIPHQIHLGELHAILRRQEDFYPFLKDNREKIEKILTFRIPYYVGPLARGNSRFAWMTRKSEETITPWNFEEVVDKGASAQSFIERMTNFDKNLPNEKVLPKHSLLYEYFTVYNELTKVKYVTEGMRKPAFLSGEQKKAIVDLLFKTNRKVTVKQLKEDYFKKIECFDSVEISGVEDRFNASLGTYHDLLKIIKDKDFLDNEENEDILEDIVLTLTLFEDREMIEERLKTYAHLFDDKVMKQLKRRRYTGWGRLSRKLINGIRDKQSGKTILDFLKSDGFANRNFMQLIHDDSLTFKEDIQKAQVSGQGDSLHEHIANLAGSPAIKKGILQTVKVVDELVKVMGRHKPENIVIEMARENQTTQKGQKNSRERMKRIEEGIKELGSQILKEHPVENTQLQNEKLYLYYLQNGRDMYVDQELDINRLSDYDVDHIVPQSFLKDDSIDNKVLTRSDKARGKSDNVPSEEVVKKMKNYWRQLLNAKLITQRKFDNLTKAERGGLSELDKAGFIKRQLVETRQITKHVAQILDSRMNTKYDENDKLIREVKVITLKSKLVSDFRKDFQFYKVREINNYHHAHDAYLNAVVGTALIKKYPKLESEFVYGDYKVYDVRKMIAKSEQEIGKATAKYFFYSNIMNFFKTEITLANGEIRKRPLIETNGETGEIVWDKGRDFATVRKVLSMPQVNIVKKTEVQTGGFSKESILPKRNSDKLIARKKDWDPKKYGGFDSPTVAYSVLVVAKVEKGKSKKLKSVKELLGITIMERSSFEKNPIDFLEAKGYKEVKKDLIIKLPKYSLFELENGRKRMLASAGELQKGNELALPSKYVNFLYLASHYEKLKGSPEDNEQKQLFVEQHKHYLDEIIEQISEFSKRVILADANLDKVLSAYNKHRDKPIREQAENIIHLFTLTNLGAPAAFKYFDTTIDRKRYTSTKEVLDATLIHQSITGLYETRIDLSQLGGDGGGGGEAAAKGSSGGVLNLEEEYRLHEKPVPSSIDPSWLQLFPTVWAERAGMGLANQVPPVVVELRSGASPVAVRQYPMSKEAREGIRPHIQKFLDLGVLVPCRSPWNTPLLPVKKPGTNDYRPVQDLREINKRVQDIHPTVPNPYNLLSSLPPSYTWYSVLDLKDAFFCLRLHPNSQPLFAFEWKDPEKGNTGQLTWTRLPQGFKNSPTLFNEALHRDLAPFRALNPQVVLLQYVDDLLVAAPTYEDCKKGTQKLLQELSKLGYRVSAKKAQLCQREVTYLGYLLKEGKRWLTPARKATVMKIPVPTTPRQVREFLGKAGFCRLFIPGFASLAAPLYPLTKPSIPFIWTEEHQQAFDHIKKALLSAPALALPDLTKPFTLYIDERAGVARGVLTQTLGPWRRPVAYLSKKLDPVASGWPTCLKAVAAVALLLKDADKLTLGQNVTVIASHSLESIVRQPPDRWMTNARMTHYQSLLLNERVSFAPPAVLNPATLLPVESEATPVHRCSEILAEETGTRRDLEDQPLPGVPTWYTDGSSFITEGKRRAGAPIVDGKRTVWASSLPEGTSAQKAELVALTQALRLAEGKNINIYTDSRYAFATAHIHGAIYKQRGWLTSAGKDIKNKEEILALLEAIHLPRRVAIIHCPGHQRGSNPVATGNRRADEAAKQAALSTRVLAGTTKPAGKRTADGSEFEKRTADGSEFESPKKKAKVE

SEQ ID NO: 1462 - protein, 2088 aa, synthetic construct
  source 1..2088: note = Description of Artificial Sequence: Synthetic polypeptide
MPAAKRVKLDGGDKKYSIGLDIGTNSVGWAVITDEYKVPSKKFKVLGNTDRHSIKKNLIGALLFDSGETAEATRLKRTARRRYTRRKNRICYLQEIFSNEMAKVDDSFFHRLEESFLVEEDKKHERHPIFGNIVDEVAYHEKYPTIYHLRKKLVDSTDKADLRLIYLALAHMIKFRGHFLIEGDLNPDNSDVDKLFIQLVQTYNQLFEENPINASGVDAKAILSARLSKSRRLENLIAQLPGEKKNGLFGNLIALSLGLTPNFKSNFDLAEDAKLQLSKDTYDDDLDNLLAQIGDQYADLFLAAKNLSDAILLSDILRVNTEITKAPLSASMIKRYDEHHQDLTLLKALVRQQLPEKYKEIFFDQSKNGYAGYIDGGASQEEFYKFIKPILEKMDGTEELLVKLNREDLLRKQRTFDNGSIPHQIHLGELHAILRRQEDFYPFLKDNREKIEKILTFRIPYYVGPLARGNSRFAWMTRKSEETITPWNFEEVVDKGASAQSFIERMTNFDKNLPNEKVLPKHSLLYEYFTVYNELTKVKYVTEGMRKPAFLSGEQKKAIVDLLFKTNRKVTVKQLKEDYFKKIECFDSVEISGVEDRFNASLGTYHDLLKIIKDKDFLDNEENEDILEDIVLTLTLFEDREMIEERLKTYAHLFDDKVMKQLKRRRYTGWGRLSRKLINGIRDKQSGKTILDFLKSDGFANRNFMQLIHDDSLTFKEDIQKAQVSGQGDSLHEHIANLAGSPAIKKGILQTVKVVDELVKVMGRHKPENIVIEMARENQTTQKGQKNSRERMKRIEEGIKELGSQILKEHPVENTQLQNEKLYLYYLQNGRDMYVDQELDINRLSDYDVDHIVPQSFLKDDSIDNKVLTRSDKARGKSDNVPSEEVVKKMKNYWRQLLNAKLITQRKFDNLTKAERGGLSELDKAGFIKRQLVETRQITKHVAQILDSRMNTKYDENDKLIREVKVITLKSKLVSDFRKDFQFYKVREINNYHHAHDAYLNAVVGTALIKKYPKLESEFVYGDYKVYDVRKMIAKSEQEIGKATAKYFFYSNIMNFFKTEITLANGEIRKRPLIETNGETGEIVWDKGRDFATVRKVLSMPQVNIVKKTEVQTGGFSKESILPKRNSDKLIARKKDWDPKKYGGFDSPTVAYSVLVVAKVEKGKSKKLKSVKELLGITIMERSSFEKNPIDFLEAKGYKEVKKDLIIKLPKYSLFELENGRKRMLASAGELQKGNELALPSKYVNFLYLASHYEKLKGSPEDNEQKQLFVEQHKHYLDEIIEQISEFSKRVILADANLDKVLSAYNKHRDKPIREQAENIIHLFTLTNLGAPAAFKYFDTTIDRKRYTSTKEVLDATLIHQSITGLYETRIDLSQLGGDGGGGGGSGGVLNLEEEYRLHEKPVPSSIDPSWLQLFPTVWAERAGMGLANQVPPVVVELRSGASPVAVRQYPMSKEAREGIRPHIQKFLDLGVLVPCRSPWNTPLLPVKKPGTNDYRPVQDLREINKRVQDIHPTVPNPYNLLSSLPPSYTWYSVLDLKDAFFCLRLHPNSQPLFAFEWKDPEKGNTGQLTWTRLPQGFKNSPTLFNEALHRDLAPFRALNPQVVLLQYVDDLLVAAPTYEDCKKGTQKLLQELSKLGYRVSAKKAQLCQREVTYLGYLLKEGKRWLTPARKATVMKIPVPTTPRQVREFLGKAGFCRLFIPGFASLAAPLYPLTKPSIPFIWTEEHQQAFDHIKKALLSAPALALPDLTKPFTLYIDERAGVARGVLTQTLGPWRRPVAYLSKKLDPVASGWPTCLKAVAAVALLLKDADKLTLGQNVTVIASHSLESIVRQPPDRWMTNARMTHYQSLLLNERVSFAPPAVLNPATLLPVESEATPVHRCSEILAEETGTRRDLEDQPLPGVPTWYTDGSSFITEGKRRAGAPIVDGKRTVWASSLPEGTSAQKAELVALTQALRLAEGKNINIYTDSRYAFATAHIHGAIYKQRGWLTSAGKDIKNKEEILALLEAIHLPRRVAIIHCPGHQRGSNPVATGNRRADEAAKQAALSTRVLAGTTKPAGKRTADGSEFEKRTADGSEFESPKKKAKVE

SEQ ID NO: 1463 - protein, 2094 aa, synthetic construct
  source 1..2094: note = Description of Artificial Sequence: Synthetic polypeptide
MPAAKRVKLDGGDKKYSIGLDIGTNSVGWAVITDEYKVPSKKFKVLGNTDRHSIKKNLIGALLFDSGETAEATRLKRTARRRYTRRKNRICYLQEIFSNEMAKVDDSFFHRLEESFLVEEDKKHERHPIFGNIVDEVAYHEKYPTIYHLRKKLVDSTDKADLRLIYLALAHMIKFRGHFLIEGDLNPDNSDVDKLFIQLVQTYNQLFEENPINASGVDAKAILSARLSKSRRLENLIAQLPGEKKNGLFGNLIALSLGLTPNFKSNFDLAEDAKLQLSKDTYDDDLDNLLAQIGDQYADLFLAAKNLSDAILLSDILRVNTEITKAPLSASMIKRYDEHHQDLTLLKALVRQQLPEKYKEIFFDQSKNGYAGYIDGGASQEEFYKFIKPILEKMDGTEELLVKLNREDLLRKQRTFDNGSIPHQIHLGELHAILRRQEDFYPFLKDNREKIEKILTFRIPYYVGPLARGNSRFAWMTRKSEETITPWNFEEVVDKGASAQSFIERMTNFDKNLPNEKVLPKHSLLYEYFTVYNELTKVKYVTEGMRKPAFLSGEQKKAIVDLLFKTNRKVTVKQLKEDYFKKIECFDSVEISGVEDRFNASLGTYHDLLKIIKDKDFLDNEENEDILEDIVLTLTLFEDREMIEERLKTYAHLFDDKVMKQLKRRRYTGWGRLSRKLINGIRDKQSGKTILDFLKSDGFANRNFMQLIHDDSLTFKEDIQKAQVSGQGDSLHEHIANLAGSPAIKKGILQTVKVVDELVKVMGRHKPENIVIEMARENQTTQKGQKNSRERMKRIEEGIKELGSQILKEHPVENTQLQNEKLYLYYLQNGRDMYVDQELDINRLSDYDVDHIVPQSFLKDDSIDNKVLTRSDKARGKSDNVPSEEVVKKMKNYWRQLLNAKLITQRKFDNLTKAERGGLSELDKAGFIKRQLVETRQITKHVAQILDSRMNTKYDENDKLIREVKVITLKSKLVSDFRKDFQFYKVREINNYHHAHDAYLNAVVGTALIKKYPKLESEFVYGDYKVYDVRKMIAKSEQEIGKATAKYFFYSNIMNFFKTEITLANGEIRKRPLIETNGETGEIVWDKGRDFATVRKVLSMPQVNIVKKTEVQTGGFSKESILPKRNSDKLIARKKDWDPKKYGGFDSPTVAYSVLVVAKVEKGKSKKLKSVKELLGITIMERSSFEKNPIDFLEAKGYKEVKKDLIIKLPKYSLFELENGRKRMLASAGELQKGNELALPSKYVNFLYLASHYEKLKGSPEDNEQKQLFVEQHKHYLDEIIEQISEFSKRVILADANLDKVLSAYNKHRDKPIREQAENIIHLFTLTNLGAPAAFKYFDTTIDRKRYTSTKEVLDATLIHQSITGLYETRIDLSQLGGDGGGGSEAAAKGGGGGVLNLEEEYRLHEKPVPSSIDPSWLQLFPTVWAERAGMGLANQVPPVVVELRSGASPVAVRQYPMSKEAREGIRPHIQKFLDLGVLVPCRSPWNTPLLPVKKPGTNDYRPVQDLREINKRVQDIHPTVPNPYNLLSSLPPSYTWYSVLDLKDAFFCLRLHPNSQPLFAFEWKDPEKGNTGQLTWTRLPQGFKNSPTLFNEALHRDLAPFRALNPQVVLLQYVDDLLVAAPTYEDCKKGTQKLLQELSKLGYRVSAKKAQLCQREVTYLGYLLKEGKRWLTPARKATVMKIPVPTTPRQVREFLGKAGFCRLFIPGFASLAAPLYPLTKPSIPFIWTEEHQQAFDHIKKALLSAPALALPDLTKPFTLYIDERAGVARGVLTQTLGPWRRPVAYLSKKLDPVASGWPTCLKAVAAVALLLKDADKLTLGQNVTVIASHSLESIVRQPPDRWMTNARMTHYQSLLLNERVSFAPPAVLNPATLLPVESEATPVHRCSEILAEETGTRRDLEDQPLPGVPTWYTDGSSFITEGKRRAGAPIVDGKRTVWASSLPEGTSAQKAELVALTQALRLAEGKNINIYTDSRYAFATAHIHGAIYKQRGWLTSAGKDIKNKEEILALLEAIHLPRRVAIIHCPGHQRGSNPVATGNRRADEAAKQAALSTRVLAGTTKPAGKRTADGSEFEKRTADGSEFESPKKKAKVE

SEQ ID NO: 1464 - protein, 2086 aa, synthetic construct
  source 1..2086: note = Description of Artificial Sequence: Synthetic polypeptide
MPAAKRVKLDGGDKKYSIGLDIGTNSVGWAVITDEYKVPSKKFKVLGNTDRHSIKKNLIGALLFDSGETAEATRLKRTARRRYTRRKNRICYLQEIFSNEMAKVDDSFFHRLEESFLVEEDKKHERHPIFGNIVDEVAYHEKYPTIYHLRKKLVDSTDKADLRLIYLALAHMIKFRGHFLIEGDLNPDNSDVDKLFIQLVQTYNQLFEENPINASGVDAKAILSARLSKSRRLENLIAQLPGEKKNGLFGNLIALSLGLTPNFKSNFDLAEDAKLQLSKDTYDDDLDNLLAQIGDQYADLFLAAKNLSDAILLSDILRVNTEITKAPLSASMIKRYDEHHQDLTLLKALVRQQLPEKYKEIFFDQSKNGYAGYIDGGASQEEFYKFIKPILEKMDGTEELLVKLNREDLLRKQRTFDNGSIPHQIHLGELHAILRRQEDFYPFLKDNREKIEKILTFRIPYYVGPLARGNSRFAWMTRKSEETITPWNFEEVVDKGASAQSFIERMTNFDKNLPNEKVLPKHSLLYEYFTVYNELTKVKYVTEGMRKPAFLSGEQKKAIVDLLFKTNRKVTVKQLKEDYFKKIECFDSVEISGVEDRFNASLGTYHDLLKIIKDKDFLDNEENEDILEDIVLTLTLFEDREMIEERLKTYAHLFDDKVMKQLKRRRYTGWGRLSRKLINGIRDKQSGKTILDFLKSDGFANRNFMQLIHDDSLTFKEDIQKAQVSGQGDSLHEHIANLAGSPAIKKGILQTVKVVDELVKVMGRHKPENIVIEMARENQTTQKGQKNSRERMKRIEEGIKELGSQILKEHPVENTQLQNEKLYLYYLQNGRDMYVDQELDINRLSDYDVDHIVPQSFLKDDSIDNKVLTRSDKARGKSDNVPSEEVVKKMKNYWRQLLNAKLITQRKFDNLTKAERGGLSELDKAGFIKRQLVETRQITKHVAQILDSRMNTKYDENDKLIREVKVITLKSKLVSDFRKDFQFYKVREINNYHHAHDAYLNAVVGTALIKKYPKLESEFVYGDYKVYDVRKMIAKSEQEIGKATAKYFFYSNIMNFFKTEITLANGEIRKRPLIETNGETGEIVWDKGRDFATVRKVLSMPQVNIVKKTEVQTGGFSKESILPKRNSDKLIARKKDWDPKKYGGFDSPTVAYSVLVVAKVEKGKSKKLKSVKELLGITIMERSSFEKNPIDFLEAKGYKEVKKDLIIKLPKYSLFELENGRKRMLASAGELQKGNELALPSKYVNFLYLASHYEKLKGSPEDNEQKQLFVEQHKHYLDEIIEQISEFSKRVILADANLDKVLSAYNKHRDKPIREQAENIIHLFTLTNLGAPAAFKYFDTTIDRKRYTSTKEVLDATLIHQSITGLYETRIDLSQLGGDGGGGSGGVLNLEEEYRLHEKPVPSSIDPSWLQLFPTVWAERAGMGLANQVPPVVVELRSGASPVAVRQYPMSKEAREGIRPHIQKFLDLGVLVPCRSPWNTPLLPVKKPGTNDYRPVQDLREINKRVQDIHPTVPNPYNLLSSLPPSYTWYSVLDLKDAFFCLRLHPNSQPLFAFEWKDPEKGNTGQLTWTRLPQGFKNSPTLFNEALHRDLAPFRALNPQVVLLQYVDDLLVAAPTYEDCKKGTQKLLQELSKLGYRVSAKKAQLCQREVTYLGYLLKEGKRWLTPARKATVMKIPVPTTPRQVREFLGKAGFCRLFIPGFASLAAPLYPLTKPSIPFIWTEEHQQAFDHIKKALLSAPALALPDLTKPFTLYIDERAGVARGVLTQTLGPWRRPVAYLSKKLDPVASGWPTCLKAVAAVALLLKDADKLTLGQNVTVIASHSLESIVRQPPDRWMTNARMTHYQSLLLNERVSFAPPAVLNPATLLPVESEATPVHRCSEILAEETGTRRDLEDQPLPGVPTWYTDGSSFITEGKRRAGAPIVDGKRTVWASSLPEGTSAQKAELVALTQALRLAEGKNINIYTDSRYAFATAHIHGAIYKQRGWLTSAGKDIKNKEEILALLEAIHLPRRVAIIHCPGHQRGSNPVATGNRRADEAAKQAALSTRVLAGTTKPAGKRTADGSEFEKRTADGSEFESPKKKAKVE

SEQ ID NO: 1465 - protein, 2091 aa, synthetic construct
  source 1..2091: note = Description of Artificial Sequence: Synthetic polypeptide
MPAAKRVKLDGGDKKYSIGLDIGTNSVGWAVITDEYKVPSKKFKVLGNTDRHSIKKNLIGALLFDSGETAEATRLKRTARRRYTRRKNRICYLQEIFSNEMAKVDDSFFHRLEESFLVEEDKKHERHPIFGNIVDEVAYHEKYPTIYHLRKKLVDSTDKADLRLIYLALAHMIKFRGHFLIEGDLNPDNSDVDKLFIQLVQTYNQLFEENPINASGVDAKAILSARLSKSRRLENLIAQLPGEKKNGLFGNLIALSLGLTPNFKSNFDLAEDAKLQLSKDTYDDDLDNLLAQIGDQYADLFLAAKNLSDAILLSDILRVNTEITKAPLSASMIKRYDEHHQDLTLLKALVRQQLPEKYKEIFFDQSKNGYAGYIDGGASQEEFYKFIKPILEKMDGTEELLVKLNREDLLRKQRTFDNGSIPHQIHLGELHAILRRQEDFYPFLKDNREKIEKILTFRIPYYVGPLARGNSRFAWMTRKSEETITPWNFEEVVDKGASAQSFIERMTNFDKNLPNEKVLPKHSLLYEYFTVYNELTKVKYVTEGMRKPAFLSGEQKKAIVDLLFKTNRKVTVKQLKEDYFKKIECFDSVEISGVEDRFNASLGTYHDLLKIIKDKDFLDNEENEDILEDIVLTLTLFEDREMIEERLKTYAHLFDDKVMKQLKRRRYTGWGRLSRKLINGIRDKQSGKTILDFLKSDGFANRNFMQLIHDDSLTFKEDIQKAQVSGQGDSLHEHIANLAGSPAIKKGILQTVKVVDELVKVMGRHKPENIVIEMARENQTTQKGQKNSRERMKRIEEGIKELGSQILKEHPVENTQLQNEKLYLYYLQNGRDMYVDQELDINRLSDYDVDHIVPQSFLKDDSIDNKVLTRSDKARGKSDNVPSEEVVKKMKNYWRQLLNAKLITQRKFDNLTKAERGGLSELDKAGFIKRQLVETRQITKHVAQILDSRMNTKYDENDKLIREVKVITLKSKLVSDFRKDFQFYKVREINNYHHAHDAYLNAVVGTALIKKYPKLESEFVYGDYKVYDVRKMIAKSEQEIGKATAKYFFYSNIMNFFKTEITLANGEIRKRPLIETNGETGEIVWDKGRDFATVRKVLSMPQVNIVKKTEVQTGGFSKESILPKRNSDKLIARKKDWDPKKYGGFDSPTVAYSVLVVAKVEKGKSKKLKSVKELLGITIMERSSFEKNPIDFLEAKGYKEVKKDLIIKLPKYSLFELENGRKRMLASAGELQKGNELALPSKYVNFLYLASHYEKLKGSPEDNEQKQLFVEQHKHYLDEIIEQISEFSKRVILADANLDKVLSAYNKHRDKPIREQAENIIHLFTLTNLGAPAAFKYFDTTIDRKRYTSTKEVLDATLIHQSITGLYETRIDLSQLGGDGGGGGGGGGGGGVLNLEEEYRLHEKPVPSSIDPSWLQLFPTVWAERAGMGLANQVPPVVVELRSGASPVAVRQYPMSKEAREGIRPHIQKFLDLGVLVPCRSPWNTPLLPVKKPGTNDYRPVQDLREINKRVQDIHPTVPNPYNLLSSLPPSYTWYSVLDLKDAFFCLRLHPNSQPLFAFEWKDPEKGNTGQLTWTRLPQGFKNSPTLFNEALHRDLAPFRALNPQVVLLQYVDDLLVAAPTYEDCKKGTQKLLQELSKLGYRVSAKKAQLCQREVTYLGYLLKEGKRWLTPARKATVMKIPVPTTPRQVREFLGKAGFCRLFIPGFASLAAPLYPLTKPSIPFIWTEEHQQAFDHIKKALLSAPALALPDLTKPFTLYIDERAGVARGVLTQTLGPWRRPVAYLSKKLDPVASGWPTCLKAVAAVALLLKDADKLTLGQNVTVIASHSLESIVRQPPDRWMTNARMTHYQSLLLNERVSFAPPAVLNPATLLPVESEATPVHRCSEILAEETGTRRDLEDQPLPGVPTWYTDGSSFITEGKRRAGAPIVDGKRTVWASSLPEGTSAQKAELVALTQALRLAEGKNINIYTDSRYAFATAHIHGAIYKQRGWLTSAGKDIKNKEEILALLEAIHLPRRVAIIHCPGHQRGSNPVATGNRRADEAAKQAALSTRVLAGTTKPAGKRTADGSEFEKRTADGSEFESPKKKAKVE

SEQ ID NO: 1466 - protein, 2094 aa, synthetic construct
  source 1..2094: note = Description of Artificial Sequence: Synthetic polypeptide
MPAAKRVKLDGGDKKYSIGLDIGTNSVGWAVITDEYKVPSKKFKVLGNTDRHSIKKNLIGALLFDSGETAEATRLKRTARRRYTRRKNRICYLQEIFSNEMAKVDDSFFHRLEESFLVEEDKKHERHPIFGNIVDEVAYHEKYPTIYHLRKKLVDSTDKADLRLIYLALAHMIKFRGHFLIEGDLNPDNSDVDKLFIQLVQTYNQLFEENPINASGVDAKAILSARLSKSRRLENLIAQLPGEKKNGLFGNLIALSLGLTPNFKSNFDLAEDAKLQLSKDTYDDDLDNLLAQIGDQYADLFLAAKNLSDAILLSDILRVNTEITKAPLSASMIKRYDEHHQDLTLLKALVRQQLPEKYKEIFFDQSKNGYAGYIDGGASQEEFYKFIKPILEKMDGTEELLVKLNREDLLRKQRTFDNGSIPHQIHLGELHAILRRQEDFYPFLKDNREKIEKILTFRIPYYVGPLARGNSRFAWMTRKSEETITPWNFEEVVDKGASAQSFIERMTNFDKNLPNEKVLPKHSLLYEYFTVYNELTKVKYVTEGMRKPAFLSGEQKKAIVDLLFKTNRKVTVKQLKEDYFKKIECFDSVEISGVEDRFNASLGTYHDLLKIIKDKDFLDNEENEDILEDIVLTLTLFEDREMIEERLKTYAHLFDDKVMKQLKRRRYTGWGRLSRKLINGIRDKQSGKTILDFLKSDGFANRNFMQLIHDDSLTFKEDIQKAQVSGQGDSLHEHIANLAGSPAIKKGILQTVKVVDELVKVMGRHKPENIVIEMARENQTTQKGQKNSRERMKRIEEGIKELGSQILKEHPVENTQLQNEKLYLYYLQNGRDMYVDQELDINRLSDYDVDHIVPQSFLKDDSIDNKVLTRSDKARGKSDNVPSEEVVKKMKNYWRQLLNAKLITQRKFDNLTKAERGGLSELDKAGFIKRQLVETRQITKHVAQILDSRMNTKYDENDKLIREVKVITLKSKLVSDFRKDFQFYKVREINNYHHAHDAYLNAVVGTALIKKYPKLESEFVYGDYKVYDVRKMIAKSEQEIGKATAKYFFYSNIMNFFKTEITLANGEIRKRPLIETNGETGEIVWDKGRDFATVRKVLSMPQVNIVKKTEVQTGGFSKESILPKRNSDKLIARKKDWDPKKYGGFDSPTVAYSVLVVAKVEKGKSKKLKSVKELLGITIMERSSFEKNPIDFLEAKGYKEVKKDLIIKLPKYSLFELENGRKRMLASAGELQKGNELALPSKYVNFLYLASHYEKLKGSPEDNEQKQLFVEQHKHYLDEIIEQISEFSKRVILADANLDKVLSAYNKHRDKPIREQAENIIHLFTLTNLGAPAAFKYFDTTIDRKRYTSTKEVLDATLIHQSITGLYETRIDLSQLGGDGGGSSGGGEAAAKGGVLNLEEEYRLHEKPVPSSIDPSWLQLFPTVWAERAGMGLANQVPPVVVELRSGASPVAVRQYPMSKEAREGIRPHIQKFLDLGVLVPCRSPWNTPLLPVKKPGTNDYRPVQDLREINKRVQDIHPTVPNPYNLLSSLPPSYTWYSVLDLKDAFFCLRLHPNSQPLFAFEWKDPEKGNTGQLTWTRLPQGFKNSPTLFNEALHRDLAPFRALNPQVVLLQYVDDLLVAAPTYEDCKKGTQKLLQELSKLGYRVSAKKAQLCQREVTYLGYLLKEGKRWLTPARKATVMKIPVPTTPRQVREFLGKAGFCRLFIPGFASLAAPLYPLTKPSIPFIWTEEHQQAFDHIKKALLSAPALALPDLTKPFTLYIDERAGVARGVLTQTLGPWRRPVAYLSKKLDPVASGWPTCLKAVAAVALLLKDADKLTLGQNVTVIASHSLESIVRQPPDRWMTNARMTHYQSLLLNERVSFAPPAVLNPATLLPVESEATPVHRCSEILAEETGTRRDLEDQPLPGVPTWYTDGSSFITEGKRRAGAPIVDGKRTVWASSLPEGTSAQKAELVALTQALRLAEGKNINIYTDSRYAFATAHIHGAIYKQRGWLTSAGKDIKNKEEILALLEAIHLPRRVAIIHCPGHQRGSNPVATGNRRADEAAKQAALSTRVLAGTTKPAGKRTADGSEFEKRTADGSEFESPKKKAKVE

SEQ ID NO: 1467 - protein, 2094 aa, synthetic construct
  source 1..2094: note = Description of Artificial Sequence: Synthetic polypeptide
MPAAKRVKLDGGDKKYSIGLDIGTNSVGWAVITDEYKVPSKKFKVLGNTDRHSIKKNLIGALLFDSGETAEATRLKRTARRRYTRRKNRICYLQEIFSNEMAKVDDSFFHRLEESFLVEEDKKHERHPIFGNIVDEVAYHEKYPTIYHLRKKLVDSTDKADLRLIYLALAHMIKFRGHFLIEGDLNPDNSDVDKLFIQLVQTYNQLFEENPINASGVDAKAILSARLSKSRRLENLIAQLPGEKKNGLFGNLIALSLGLTPNFKSNFDLAEDAKLQLSKDTYDDDLDNLLAQIGDQYADLFLAAKNLSDAILLSDILRVNTEITKAPLSASMIKRYDEHHQDLTLLKALVRQQLPEKYKEIFFDQSKNGYAGYIDGGASQEEFYKFIKPILEKMDGTEELLVKLNREDLLRKQRTFDNGSIPHQIHLGELHAILRRQEDFYPFLKDNREKIEKILTFRIPYYVGPLARGNSRFAWMTRKSEETITPWNFEEVVDKGASAQSFIERMTNFDKNLPNEKVLPKHSLLYEYFTVYNELTKVKYVTEGMRKPAFLSGEQKKAIVDLLFKTNRKVTVKQLKEDYFKKIECFDSVEISGVEDRFNASLGTYHDLLKIIKDKDFLDNEENEDILEDIVLTLTLFEDREMIEERLKTYAHLFDDKVMKQLKRRRYTGWGRLSRKLINGIRDKQSGKTILDFLKSDGFANRNFMQLIHDDSLTFKEDIQKAQVSGQGDSLHEHIANLAGSPAIKKGILQTVKVVDELVKVMGRHKPENIVIEMARENQTTQKGQKNSRERMKRIEEGIKELGSQILKEHPVENTQLQNEKLYLYYLQNGRDMYVDQELDINRLSDYDVDHIVPQSFLKDDSIDNKVLTRSDKARGKSDNVPSEEVVKKMKNYWRQLLNAKLITQRKFDNLTKAERGGLSELDKAGFIKRQLVETRQITKHVAQILDSRMNTKYDENDKLIREVKVITLKSKLVSDFRKDFQFYKVREINNYHHAHDAYLNAVVGTALIKKYPKLESEFVYGDYKVYDVRKMIAKSEQEIGKATAKYFFYSNIMNFFKTEITLANGEIRKRPLIETNGETGEIVWDKGRDFATVRKVLSMPQVNIVKKTEVQTGGFSKESILPKRNSDKLIARKKDWDPKKYGGFDSPTVAYSVLVVAKVEKGKSKKLKSVKELLGITIMERSSFEKNPIDFLEAKGYKEVKKDLIIKLPKYSLFELENGRKRMLASAGELQKGNELALPSKYVNFLYLASHYEKLKGSPEDNEQKQLFVEQHKHYLDEIIEQISEFSKRVILADANLDKVLSAYNKHRDKPIREQAENIIHLFTLTNLGAPAAFKYFDTTIDRKRYTSTKEVLDATLIHQSITGLYETRIDLSQLGGDGGEAAAKGSSPAPGGVLNLEEEYRLHEKPVPSSIDPSWLQLFPTVWAERAGMGLANQVPPVVVELRSGASPVAVRQYPMSKEAREGIRPHIQKFLDLGVLVPCRSPWNTPLLPVKKPGTNDYRPVQDLREINKRVQDIHPTVPNPYNLLSSLPPSYTWYSVLDLKDAFFCLRLHPNSQPLFAFEWKDPEKGNTGQLTWTRLPQGFKNSPTLFNEALHRDLAPFRALNPQVVLLQYVDDLLVAAPTYEDCKKGTQKLLQELSKLGYRVSAKKAQLCQREVTYLGYLLKEGKRWLTPARKATVMKIPVPTTPRQVREFLGKAGFCRLFIPGFASLAAPLYPLTKPSIPFIWTEEHQQAFDHIKKALLSAPALALPDLTKPFTLYIDERAGVARGVLTQTLGPWRRPVAYLSKKLDPVASGWPTCLKAVAAVALLLKDADKLTLGQNVTVIASHSLESIVRQPPDRWMTNARMTHYQSLLLNERVSFAPPAVLNPATLLPVESEATPVHRCSEILAEETGTRRDLEDQPLPGVPTWYTDGSSFITEGKRRAGAPIVDGKRTVWASSLPEGTSAQKAELVALTQALRLAEGKNINIYTDSRYAFATAHIHGAIYKQRGWLTSAGKDIKNKEEILALLEAIHLPRRVAIIHCPGHQRGSNPVATGNRRADEAAKQAALSTRVLAGTTKPAGKRTADGSEFEKRTADGSEFESPKKKAKVE

SEQ ID NO: 1468 - protein, 2094 aa, synthetic construct
  source 1..2094: note = Description of Artificial Sequence: Synthetic polypeptide
MPAAKRVKLDGGDKKYSIGLDIGTNSVGWAVITDEYKVPSKKFKVLGNTDRHSIKKNLIGALLFDSGETAEATRLKRTARRRYTRRKNRICYLQEIFSNEMAKVDDSFFHRLEESFLVEEDKKHERHPIFGNIVDEVAYHEKYPTIYHLRKKLVDSTDKADLRLIYLALAHMIKFRGHFLIEGDLNPDNSDVDKLFIQLVQTYNQLFEENPINASGVDAKAILSARLSKSRRLENLIAQLPGEKKNGLFGNLIALSLGLTPNFKSNFDLAEDAKLQLSKDTYDDDLDNLLAQIGDQYADLFLAAKNLSDAILLSDILRVNTEITKAPLSASMIKRYDEHHQDLTLLKALVRQQLPEKYKEIFFDQSKNGYAGYIDGGASQEEFYKFIKPILEKMDGTEELLVKLNREDLLRKQRTFDNGSIPHQIHLGELHAILRRQEDFYPFLKDNREKIEKILTFRIPYYVGPLARGNSRFAWMTRKSEETITPWNFEEVVDKGASAQSFIERMTNFDKNLPNEKVLPKHSLLYEYFTVYNELTKVKYVTEGMRKPAFLSGEQKKAIVDLLFKTNRKVTVKQLKEDYFKKIECFDSVEISGVEDRFNASLGTYHDLLKIIKDKDFLDNEENEDILEDIVLTLTLFEDREMIEERLKTYAHLFDDKVMKQLKRRRYTGWGRLSRKLINGIRDKQSGKTILDFLKSDGFANRNFMQLIHDDSLTFKEDIQKAQVSGQGDSLHEHIANLAGSPAIKKGILQTVKVVDELVKVMGRHKPENIVIEMARENQTTQKGQKNSRERMKRIEEGIKELGSQILKEHPVENTQLQNEKLYLYYLQNGRDMYVDQELDINRLSDYDVDHIVPQSFLKDDSIDNKVLTRSDKARGKSDNVPSEEVVKKMKNYWRQLLNAKLITQRKFDNLTKAERGGLSELDKAGFIKRQLVETRQITKHVAQILDSRMNTKYDENDKLIREVKVITLKSKLVSDFRKDFQFYKVREINNYHHAHDAYLNAVVGTALIKKYPKLESEFVYGDYKVYDVRKMIAKSEQEIGKATAKYFFYSNIMNFFKTEITLANGEIRKRPLIETNGETGEIVWDKGRDFATVRKVLSMPQVNIVKKTEVQTGGFSKESILPKRNSDKLIARKKDWDPKKYGGFDSPTVAYSVLVVAKVEKGKSKKLKSVKELLGITIMERSSFEKNPIDFLEAKGYKEVKKDLIIKLPKYSLFELENGRKRMLASAGELQKGNELALPSKYVNFLYLASHYEKLKGSPEDNEQKQLFVEQHKHYLDEIIEQISEFSKRVILADANLDKVLSAYNKHRDKPIREQAENIIHLFTLTNLGAPAAFKYFDTTIDRKRYTSTKEVLDATLIHQSITGLYETRIDLSQLGGDGGGGSEAAAKPAPGGVLNLEEEYRLHEKPVPSSIDPSWLQLFPTVWAERAGMGLANQVPPVVVELRSGASPVAVRQYPMSKEAREGIRPHIQKFLDLGVLVPCRSPWNTPLLPVKKPGTNDYRPVQDLREINKRVQDIHPTVPNPYNLLSSLPPSYTWYSVLDLKDAFFCLRLHPNSQPLFAFEWKDPEKGNTGQLTWTRLPQGFKNSPTLFNEALHRDLAPFRALNPQVVLLQYVDDLLVAAPTYEDCKKGTQKLLQELSKLGYRVSAKKAQLCQREVTYLGYLLKEGKRWLTPARKATVMKIPVPTTPRQVREFLGKAGFCRLFIPGFASLAAPLYPLTKPSIPFIWTEEHQQAFDHIKKALLSAPALALPDLTKPFTLYIDERAGVARGVLTQTLGPWRRPVAYLSKKLDPVASGWPTCLKAVAAVALLLKDADKLTLGQNVTVIASHSLESIVRQPPDRWMTNARMTHYQSLLLNERVSFAPPAVLNPATLLPVESEATPVHRCSEILAEETGTRRDLEDQPLPGVPTWYTDGSSFITEGKRRAGAPIVDGKRTVWASSLPEGTSAQKAELVALTQALRLAEGKNINIYTDSRYAFATAHIHGAIYKQRGWLTSAGKDIKNKEEILALLEAIHLPRRVAIIHCPGHQRGSNPVATGNRRADEAAKQAALSTRVLAGTTKPAGKRTADGSEFEKRTADGSEFESPKKKAKVE

SEQ ID NO: 1469 - protein, 2094 aa, synthetic construct
  source 1..2094: note = Description of Artificial Sequence: Synthetic polypeptide
MPAAKRVKLDGGDKKYSIGLDIGTNSVGWAVITDEYKVPSKKFKVLGNTDRHSIKKNLIGALLFDSGETAEATRLKRTARRRYTRRKNRICYLQEIFSNEMAKVDDSFFHRLEESFLVEEDKKHERHPIFGNIVDEVAYHEKYPTIYHLRKKLVDSTDKADLRLIYLALAHMIKFRGHFLIEGDLNPDNSDVDKLFIQLVQTYNQLFEENPINASGVDAKAILSARLSKSRRLENLIAQLPGEKKNGLFGNLIALSLGLTPNFKSNFDLAEDAKLQLSKDTYDDDLDNLLAQIGDQYADLFLAAKNLSDAILLSDILRVNTEITKAPLSASMIKRYDEHHQDLTLLKALVRQQLPEKYKEIFFDQSKNGYAGYIDGGASQEEFYKFIKPILEKMDGTEELLVKLNREDLLRKQRTFDNGSIPHQIHLGELHAILRRQEDFYPFLKDNREKIEKILTFRIPYYVGPLARGNSRFAWMTRKSEETITPWNFEEVVDKGASAQSFIERMTNFDKNLPNEKVLPKHSLLYEYFTVYNELTKVKYVTEGMRKPAFLSGEQKKAIVDLLFKTNRKVTVKQLKEDYFKKIECFDSVEISGVEDRFNASLGTYHDLLKIIKDKDFLDNEENEDILEDIVLTLTLFEDREMIEERLKTYAHLFDDKVMKQLKRRRYTGWGRLSRKLINGIRDKQSGKTILDFLKSDGFANRNFMQLIHDDSLTFKEDIQKAQVSGQGDSLHEHIANLAGSPAIKKGILQTVKVVDELVKVMGRHKPENIVIEMARENQTTQKGQKNSRERMKRIEEGIKELGSQILKEHPVENTQLQNEKLYLYYLQNGRDMYVDQELDINRLSDYDVDHIVPQSFLKDDSIDNKVLTRSDKARGKSDNVPSEEVVKKMKNYWRQLLNAKLITQRKFDNLTKAERGGLSELDKAGFIKRQLVETRQITKHVAQILDSRMNTKYDENDKLIREVKVITLKSKLVSDFRKDFQFYKVREINNYHHAHDAYLNAVVGTALIKKYPKLESEFVYGDYKVYDVRKMIAKSEQEIGKATAKYFFYSNIMNFFKTEITLANGEIRKRPLIETNGETGEIVWDKGRDFATVRKVLSMPQVNIVKKTEVQTGGFSKESILPKRNSDKLIARKKDWDPKKYGGFDSPTVAYSVLVVAKVEKGKSKKLKSVKELLGITIMERSSFEKNPIDFLEAKGYKEVKKDLIIKLPKYSLFELENGRKRMLASAGELQKGNELALPSKYVNFLYLASHYEKLKGSPEDNEQKQLFVEQHKHYLDEIIEQISEFSKRVILADANLDKVLSAYNKHRDKPIREQAENIIHLFTLTNLGAPAAFKYFDTTIDRKRYTSTKEVLDATLIHQSITGLYETRIDLSQLGGDGGEAAAKPAPGGSGGVLNLEEEYRLHEKPVPSSIDPSWLQLFPTVWAERAGMGLANQVPPVVVELRSGASPVAVRQYPMSKEAREGIRPHIQKFLDLGVLVPCRSPWNTPLLPVKKPGTNDYRPVQDLREINKRVQDIHPTVPNPYNLLSSLPPSYTWYSVLDLKDAFFCLRLHPNSQPLFAFEWKDPEKGNTGQLTWTRLPQGFKNSPTLFNEALHRDLAPFRALNPQVVLLQYVDDLLVAAPTYEDCKKGTQKLLQELSKLGYRVSAKKAQLCQREVTYLGYLLKEGKRWLTPARKATVMKIPVPTTPRQVREFLGKAGFCRLFIPGFASLAAPLYPLTKPSIPFIWTEEHQQAFDHIKKALLSAPALALPDLTKPFTLYIDERAGVARGVLTQTLGPWRRPVAYLSKKLDPVASGWPTCLKAVAAVALLLKDADKLTLGQNVTVIASHSLESIVRQPPDRWMTNARMTHYQSLLLNERVSFAPPAVLNPATLLPVESEATPVHRCSEILAEETGTRRDLEDQPLPGVPTWYTDGSSFITEGKRRAGAPIVDGKRTVWASSLPEGTSAQKAELVALTQALRLAEGKNINIYTDSRYAFATAHIHGAIYKQRGWLTSAGKDIKNKEEILALLEAIHLPRRVAIIHCPGHQRGSNPVATGNRRADEAAKQAALSTRVLAGTTKPAGKRTADGSEFEKRTADGSEFESPKKKAKVE

SEQ ID NO: 1470 - protein, 2089 aa, synthetic construct
  source 1..2089: note = Description of Artificial Sequence: Synthetic polypeptide
MPAAKRVKLDGGDKKYSIGLDIGTNSVGWAVITDEYKVPSKKFKVLGNTDRHSIKKNLIGALLFDSGETAEATRLKRTARRRYTRRKNRICYLQEIFSNEMAKVDDSFFHRLEESFLVEEDKKHERHPIFGNIVDEVAYHEKYPTIYHLRKKLVDSTDKADLRLIYLALAHMIKFRGHFLIEGDLNPDNSDVDKLFIQLVQTYNQLFEENPINASGVDAKAILSARLSKSRRLENLIAQLPGEKKNGLFGNLIALSLGLTPNFKSNFDLAEDAKLQLSKDTYDDDLDNLLAQIGDQYADLFLAAKNLSDAILLSDILRVNTEITKAPLSASMIKRYDEHHQDLTLLKALVRQQLPEKYKEIFFDQSKNGYAGYIDGGASQEEFYKFIKPILEKMDGTEELLVKLNREDLLRKQRTFDNGSIPHQIHLGELHAILRRQEDFYPFLKDNREKIEKILTFRIPYYVGPLARGNSRFAWMTRKSEETITPWNFEEVVDKGASAQSFIERMTNFDKNLPNEKVLPKHSLLYEYFTVYNELTKVKYVTEGMRKPAFLSGEQKKAIVDLLFKTNRKVTVKQLKEDYFKKIECFDSVEISGVEDRFNASLGTYHDLLKIIKDKDFLDNEENEDILEDIVLTLTLFEDREMIEERLKTYAHLFDDKVMKQLKRRRYTGWGRLSRKLINGIRDKQSGKTILDFLKSDGFANRNFMQLIHDDSLTFKEDIQKAQVSGQGDSLHEHIANLAGSPAIKKGILQTVKVVDELVKVMGRHKPENIVIEMARENQTTQKGQKNSRERMKRIEEGIKELGSQILKEHPVENTQLQNEKLYLYYLQNGRDMYVDQELDINRLSDYDVDHIVPQSFLKDDSIDNKVLTRSDKARGKSDNVPSEEVVKKMKNYWRQLLNAKLITQRKFDNLTKAERGGLSELDKAGFIKRQLVETRQITKHVAQILDSRMNTKYDENDKLIREVKVITLKSKLVSDFRKDFQFYKVREINNYHHAHDAYLNAVVGTALIKKYPKLESEFVYGDYKVYDVRKMIAKSEQEIGKATAKYFFYSNIMNFFKTEITLANGEIRKRPLIETNGETGEIVWDKGRDFATVRKVLSMPQVNIVKKTEVQTGGFSKESILPKRNSDKLIARKKDWDPKKYGGFDSPTVAYSVLVVAKVEKGKSKKLKSVKELLGITIMERSSFEKNPIDFLEAKGYKEVKKDLIIKLPKYSLFELENGRKRMLASAGELQKGNELALPSKYVNFLYLASHYEKLKGSPEDNEQKQLFVEQHKHYLDEIIEQISEFSKRVILADANLDKVLSAYNKHRDKPIREQAENIIHLFTLTNLGAPAAFKYFDTTIDRKRYTSTKEVLDATLIHQSITGLYETRIDLSQLGGDGGGGSPAPGGVLNLEEEYRLHEKPVPSSIDPSWLQLFPTVWAERAGMGLANQVPPVVVELRSGASPVAVRQYPMSKEAREGIRPHIQKFLDLGVLVPCRSPWNTPLLPVKKPGTNDYRPVQDLREINKRVQDIHPTVPNPYNLLSSLPPSYTWYSVLDLKDAFFCLRLHPNSQPLFAFEWKDPEKGNTGQLTWTRLPQGFKNSPTLFNEALHRDLAPFRALNPQVVLLQYVDDLLVAAPTYEDCKKGTQKLLQELSKLGYRVSAKKAQLCQREVTYLGYLLKEGKRWLTPARKATVMKIPVPTTPRQVREFLGKAGFCRLFIPGFASLAAPLYPLTKPSIPFIWTEEHQQAFDHIKKALLSAPALALPDLTKPFTLYIDERAGVARGVLTQTLGPWRRPVAYLSKKLDPVASGWPTCLKAVAAVALLLKDADKLTLGQNVTVIASHSLESIVRQPPDRWMTNARMTHYQSLLLNERVSFAPPAVLNPATLLPVESEATPVHRCSEILAEETGTRRDLEDQPLPGVPTWYTDGSSFITEGKRRAGAPIVDGKRTVWASSLPEGTSAQKAELVALTQALRLAEGKNINIYTDSRYAFATAHIHGAIYKQRGWLTSAGKDIKNKEEILALLEAIHLPRRVAIIHCPGHQRGSNPVATGNRRADEAAKQAALSTRVLAGTTKPAGKRTADGSEFEKRTADGSEFESPKKKAKVE

SEQ ID NO: 1471 - protein, 2092 aa, synthetic construct
  source 1..2092: note = Description of Artificial Sequence: Synthetic polypeptide
MPAAKRVKLDGGDKKYSIGLDIGTNSVGWAVITDEYKVPSKKFKVLGNTDRHSIKKNLIGALLFDSGETAEATRLKRTARRRYTRRKNRICYLQEIFSNEMAKVDDSFFHRLEESFLVEEDKKHERHPIFGNIVDEVAYHEKYPTIYHLRKKLVDSTDKADLRLIYLALAHMIKFRGHFLIEGDLNPDNSDVDKLFIQLVQTYNQLFEENPINASGVDAKAILSARLSKSRRLENLIAQLPGEKKNGLFGNLIALSLGLTPNFKSNFDLAEDAKLQLSKDTYDDDLDNLLAQIGDQYADLFLAAKNLSDAILLSDILRVNTEITKAPLSASMIKRYDEHHQDLTLLKALVRQQLPEKYKEIFFDQSKNGYAGYIDGGASQEEFYKFIKPILEKMDGTEELLVKLNREDLLRKQRTFDNGSIPHQIHLGELHAILRRQEDFYPFLKDNREKIEKILTFRIPYYVGPLARGNSRFAWMTRKSEETITPWNFEEVVDKGASAQSFIERMTNFDKNLPNEKVLPKHSLLYEYFTVYNELTKVKYVTEGMRKPAFLSGEQKKAIVDLLFKTNRKVTVKQLKEDYFKKIECFDSVEISGVEDRFNASLGTYHDLLKIIKDKDFLDNEENEDILEDIVLTLTLFEDREMIEERLKTYAHLFDDKVMKQLKRRRYTGWGRLSRKLINGIRDKQSGKTILDFLKSDGFANRNFMQLIHDDSLTFKEDIQKAQVSGQGDSLHEHIANLAGSPAIKKGILQTVKVVDELVKVMGRHKPENIVIEMARENQTTQKGQKNSRERMKRIEEGIKELGSQILKEHPVENTQLQNEKLYLYYLQNGRDMYVDQELDINRLSDYDVDHIVPQSFLKDDSIDNKVLTRSDKARGKSDNVPSEEVVKKMKNYWRQLLNAKLITQRKFDNLTKAERGGLSELDKAGFIKRQLVETRQITKHVAQILDSRMNTKYDENDKLIREVKVITLKSKLVSDFRKDFQFYKVREINNYHHAHDAYLNAVVGTALIKKYPKLESEFVYGDYKVYDVRKMIAKSEQEIGKATAKYFFYSNIMNFFKTEITLANGEIRKRPLIETNGETGEIVWDKGRDFATVRKVLSMPQVNIVKKTEVQTGGFSKESILPKRNSDKLIARKKDWDPKKYGGFDSPTVAYSVLVVAKVEKGKSKKLKSVKELLGITIMERSSFEKNPIDFLEAKGYKEVKKDLIIKLPKYSLFELENGRKRMLASAGELQKGNELALPSKYVNFLYLASHYEKLKGSPEDNEQKQLFVEQHKHYLDEIIEQISEFSKRVILADANLDKVLSAYNKHRDKPIREQAENIIHLFTLTNLGAPAAFKYFDTTIDRKRYTSTKEVLDATLIHQSITGLYETRIDLSQLGGDGGGGGGSSGGSGGVLNLEEEYRLHEKPVPSSIDPSWLQLFPTVWAERAGMGLANQVPPVVVELRSGASPVAVRQYPMSKEAREGIRPHIQKFLDLGVLVPCRSPWNTPLLPVKKPGTNDYRPVQDLREINKRVQDIHPTVPNPYNLLSSLPPSYTWYSVLDLKDAFFCLRLHPNSQPLFAFEWKDPEKGNTGQLTWTRLPQGFKNSPTLFNEALHRDLAPFRALNPQVVLLQYVDDLLVAAPTYEDCKKGTQKLLQELSKLGYRVSAKKAQLCQREVTYLGYLLKEGKRWLTPARKATVMKIPVPTTPRQVREFLGKAGFCRLFIPGFASLAAPLYPLTKPSIPFIWTEEHQQAFDHIKKALLSAPALALPDLTKPFTLYIDERAGVARGVLTQTLGPWRRPVAYLSKKLDPVASGWPTCLKAVAAVALLLKDADKLTLGQNVTVIASHSLESIVRQPPDRWMTNARMTHYQSLLLNERVSFAPPAVLNPATLLPVESEATPVHRCSEILAEETGTRRDLEDQPLPGVPTWYTDGSSFITEGKRRAGAPIVDGKRTVWASSLPEGTSAQKAELVALTQALRLAEGKNINIYTDSRYAFATAHIHGAIYKQRGWLTSAGKDIKNKEEILALLEAIHLPRRVAIIHCPGHQRGSNPVATGNRRADEAAKQAALSTRVLAGTTKPAGKRTADGSEFEKRTADGSEFESPKKKAKVE

SEQ ID NO: 1472 - protein, 2092 aa, synthetic construct
  source 1..2092: note = Description of Artificial Sequence: Synthetic polypeptide
MPAAKRVKLDGGDKKYSIGLDIGTNSVGWAVITDEYKVPSKKFKVLGNTDRHSIKKNLIGALLFDSGETAEATRLKRTARRRYTRRKNRICYLQEIFSNEMAKVDDSFFHRLEESFLVEEDKKHERHPIFGNIVDEVAYHEKYPTIYHLRKKLVDSTDKADLRLIYLALAHMIKFRGHFLIEGDLNPDNSDVDKLFIQLVQTYNQLFEENPINASGVDAKAILSARLSKSRRLENLIAQLPGEKKNGLFGNLIALSLGLTPNFKSNFDLAEDAKLQLSKDTYDDDLDNLLAQIGDQYADLFLAAKNLSDAILLSDILRVNTEITKAPLSASMIKRYDEHHQDLTLLKALVRQQLPEKYKEIFFDQSKNGYAGYIDGGASQEEFYKFIKPILEKMDGTEELLVKLNREDLLRKQRTFDNGSIPHQIHLGELHAILRRQEDFYPFLKDNREKIEKILTFRIPYYVGPLARGNSRFAWMTRKSEETITPWNFEEVVDKGASAQSFIERMTNFDKNLPNEKVLPKHSLLYEYFTVYNELTKVKYVTEGMRKPAFLSGEQKKAIVDLLFKTNRKVTVKQLKEDYFKKIECFDSVEISGVEDRFNASLGTYHDLLKIIKDKDFLDNEENEDILEDIVLTLTLFEDREMIEERLKTYAHLFDDKVMKQLKRRRYTGWGRLSRKLINGIRDKQSGKTILDFLKSDGFANRNFMQLIHDDSLTFKEDIQKAQVSGQGDSLHEHIANLAGSPAIKKGILQTVKVVDELVKVMGRHKPENIVIEMARENQTTQKGQKNSRERMKRIEEGIKELGSQILKEHPVENTQLQNEKLYLYYLQNGRDMYVDQELDINRLSDYDVDHIVPQSFLKDDSIDNKVLTRSDKARGKSDNVPSEEVVKKMKNYWRQLLNAKLITQRKFDNLTKAERGGLSELDKAGFIKRQLVETRQITKHVAQILDSRMNTKYDENDKLIREVKVITLKSKLVSDFRKDFQFYKVREINNYHHAHDAYLNAVVGTALIKKYPKLESEFVYGDYKVYDVRKMIAKSEQEIGKATAKYFFYSNIMNFFKTEITLANGEIRKRPLIETNGETGEIVWDKGRDFATVRKVLSMPQVNIVKKTEVQTGGFSKESILPKRNSDKLIARKKDWDPKKYGGFDSPTVAYSVLVVAKVEKGKSKKLKSVKELLGITIMERSSFEKNPIDFLEAKGYKEVKKDLIIKLPKYSLFELENGRKRMLASAGELQKGNELALPSKYVNFLYLASHYEKLKGSPEDNEQKQLFVEQHKHYLDEIIEQISEFSKRVILADANLDKVLSAYNKHRDKPIREQAENIIHLFTLTNLGAPAAFKYFDTTIDRKRYTSTKEVLDATLIHQSITGLYETRIDLSQLGGDGGGGSGGGGSSGGVLNLEEEYRLHEKPVPSSIDPSWLQLFPTVWAERAGMGLANQVPPVVVELRSGASPVAVRQYPMSKEAREGIRPHIQKFLDLGVLVPCRSPWNTPLLPVKKPGTNDYRPVQDLREINKRVQDIHPTVPNPYNLLSSLPPSYTWYSVLDLKDAFFCLRLHPNSQPLFAFEWKDPEKGNTGQLTWTRLPQGFKNSPTLFNEALHRDLAPFRALNPQVVLLQYVDDLLVAAPTYEDCKKGTQKLLQELSKLGYRVSAKKAQLCQREVTYLGYLLKEGKRWLTPARKATVMKIPVPTTPRQVREFLGKAGFCRLFIPGFASLAAPLYPLTKPSIPFIWTEEHQQAFDHIKKALLSAPALALPDLTKPFTLYIDERAGVARGVLTQTLGPWRRPVAYLSKKLDPVASGWPTCLKAVAAVALLLKDADKLTLGQNVTVIASHSLESIVRQPPDRWMTNARMTHYQSLLLNERVSFAPPAVLNPATLLPVESEATPVHRCSEILAEETGTRRDLEDQPLPGVPTWYTDGSSFITEGKRRAGAPIVDGKRTVWASSLPEGTSAQKAELVALTQALRLAEGKNINIYTDSRYAFATAHIHGAIYKQRGWLTSAGKDIKNKEEILALLEAIHLPRRVAIIHCPGHQRGSNPVATGNRRADEAAKQAALSTRVLAGTTKPAGKRTADGSEFEKRTADGSEFESPKKKAKVE

SEQ ID NO: 1473 - protein, 2094 aa, synthetic construct
  source 1..2094: note = Description of Artificial Sequence: Synthetic polypeptide
MPAAKRVKLDGGDKKYSIGLDIGTNSVGWAVITDEYKVPSKKFKVLGNTDRHSIKKNLIGALLFDSGETAEATRLKRTARRRYTRRKNRICYLQEIFSNEMAKVDDSFFHRLEESFLVEEDKKHERHPIFGNIVDEVAYHEKYPTIYHLRKKLVDSTDKADLRLIYLALAHMIKFRGHFLIEGDLNPDNSDVDKLFIQLVQTYNQLFEENPINASGVDAKAILSARLSKSRRLENLIAQLPGEKKNGLFGNLIALSLGLTPNFKSNFDLAEDAKLQLSKDTYDDDLDNLLAQIGDQYADLFLAAKNLSDAILLSDILRVNTEITKAPLSASMIKRYDEHHQDLTLLKALVRQQLPEKYKEIFFDQSKNGYAGYIDGGASQEEFYKFIKPILEKMDGTEELLVKLNREDLLRKQRTFDNGSIPHQIHLGELHAILRRQEDFYPFLKDNREKIEKILTFRIPYYVGPLARGNSRFAWMTRKSEETITPWNFEEVVDKGASAQSFIERMTNFDKNLPNEKVLPKHSLLYEYFTVYNELTKVKYVTEGMRKPAFLSGEQKKAIVDLLFKTNRKVTVKQLKEDYFKKIECFDSVEISGVEDRFNASLGTYHDLLKIIKDKDFLDNEENEDILEDIVLTLTLFEDREMIEERLKTYAHLFDDKVMKQLKRRRYTGWGRLSRKLINGIRDKQSGKTILDFLKSDGFANRNFMQLIHDDSLTFKEDIQKAQVSGQGDSLHEHIANLAGSPAIKKGILQTVKVVDELVKVMGRHKPENIVIEMARENQTTQKGQKNSRERMKRIEEGIKELGSQILKEHPVENTQLQNEKLYLYYLQNGRDMYVDQELDINRLSDYDVDHIVPQSFLKDDSIDNKVLTRSDKARGKSDNVPSEEVVKKMKNYWRQLLNAKLITQRKFDNLTKAERGGLSELDKAGFIKRQLVETRQITKHVAQILDSRMNTKYDENDKLIREVKVITLKSKLVSDFRKDFQFYKVREINNYHHAHDAYLNAVVGTALIKKYPKLESEFVYGDYKVYDVRKMIAKSEQEIGKATAKYFFYSNIMNFFKTEITLANGEIRKRPLIETNGETGEIVWDKGRDFATVRKVLSMPQVNIVKKTEVQTGGFSKESILPKRNSDKLIARKKDWDPKKYGGFDSPTVAYSVLVVAKVEKGKSKKLKSVKELLGITIMERSSFEKNPIDFLEAKGYKEVKKDLIIKLPKYSLFELENGRKRMLASAGELQKGNELALPSKYVNFLYLASHYEKLKGSPEDNEQKQLFVEQHKHYLDEIIEQISEFSKRVILADANLDKVLSAYNKHRDKPIREQAENIIHLFTLTNLGAPAAFKYFDTTIDRKRYTSTKEVLDATLIHQSITGLYETRIDLSQLGGDGGGGSEAAAKGSSGGVLNLEEEYRLHEKPVPSSIDPSWLQLFPTVWAERAGMGLANQVPPVVVELRSGASPVAVRQYPMSKEAREGIRPHIQKFLDLGVLVPCRSPWNTPLLPVKKPGTNDYRPVQDLREINKRVQDIHPTVPNPYNLLSSLPPSYTWYSVLDLKDAFFCLRLHPNSQPLFAFEWKDPEKGNTGQLTWTRLPQGFKNSPTLFNEALHRDLAPFRALNPQVVLLQYVDDLLVAAPTYEDCKKGTQKLLQELSKLGYRVSAKKAQLCQREVTYLGYLLKEGKRWLTPARKATVMKIPVPTTPRQVREFLGKAGFCRLFIPGFASLAAPLYPLTKPSIPFIWTEEHQQAFDHIKKALLSAPALALPDLTKPFTLYIDERAGVARGVLTQTLGPWRRPVAYLSKKLDPVASGWPTCLKAVAAVALLLKDADKLTLGQNVTVIASHSLESIVRQPPDRWMTNARMTHYQSLLLNERVSFAPPAVLNPATLLPVESEATPVHRCSEILAEETGTRRDLEDQPLPGVPTWYTDGSSFITEGKRRAGAPIVDGKRTVWASSLPEGTSAQKAELVALTQALRLAEGKNINIYTDSRYAFATAHIHGAIYKQRGWLTSAGKDIKNKEEILALLEAIHLPRRVAIIHCPGHQRGSNPVATGNRRADEAAKQAALSTRVLAGTTKPAGKRTADGSEFEKRTADGSEFESPKKKAKVE

SEQ ID NO: 1474 - protein, 2094 aa, synthetic construct
  source 1..2094: note = Description of Artificial Sequence: Synthetic polypeptide
MPAAKRVKLDGGDKKYSIGLDIGTNSVGWAVITDEYKVPSKKFKVLGNTDRHSIKKNLIGALLFDSGETAEATRLKRTARRRYTRRKNRICYLQEIFSNEMAKVDDSFFHRLEESFLVEEDKKHERHPIFGNIVDEVAYHEKYPTIYHLRKKLVDSTDKADLRLIYLALAHMIKFRGHFLIEGDLNPDNSDVDKLFIQLVQTYNQLFEENPINASGVDAKAILSARLSKSRRLENLIAQLPGEKKNGLFGNLIALSLGLTPNFKSNFDLAEDAKLQLSKDTYDDDLDNLLAQIGDQYADLFLAAKNLSDAILLSDILRVNTEITKAPLSASMIKRYDEHHQDLTLLKALVRQQLPEKYKEIFFDQSKNGYAGYIDGGASQEEFYKFIKPILEKMDGTEELLVKLNREDLLRKQRTFDNGSIPHQIHLGELHAILRRQEDFYPFLKDNREKIEKILTFRIPYYVGPLARGNSRFAWMTRKSEETITPWNFEEVVDKGASAQSFIERMTNFDKNLPNEKVLPKHSLLYEYFTVYNELTKVKYVTEGMRKPAFLSGEQKKAIVDLLFKTNRKVTVKQLKEDYFKKIECFDSVEISGVEDRFNASLGTYHDLLKIIKDKDFLDNEENEDILEDIVLTLTLFEDREMIEERLKTYAHLFDDKVMKQLKRRRYTGWGRLSRKLINGIRDKQSGKTILDFLKSDGFANRNFMQLIHDDSLTFKEDIQKAQVSGQGDSLHEHIANLAGSPAIKKGILQTVKVVDELVKVMGRHKPENIVIEMARENQTTQKGQKNSRERMKRIEEGIKELGSQILKEHPVENTQLQNEKLYLYYLQNGRDMYVDQELDINRLSDYDVDHIVPQSFLKDDSIDNKVLTRSDKARGKSDNVPSEEVVKKMKNYWRQLLNAKLITQRKFDNLTKAERGGLSELDKAGFIKRQLVETRQITKHVAQILDSRMNTKYDENDKLIREVKVITLKSKLVSDFRKDFQFYKVREINNYHHAHDAYLNAVVGTALIKKYPKLESEFVYGDYKVYDVRKMIAKSEQEIGKATAKYFFYSNIMNFFKTEITLANGEIRKRPLIETNGETGEIVWDKGRDFATVRKVLSMPQVNIVKKTEVQTGGFSKESILPKRNSDKLIARKKDWDPKKYGGFDSPTVAYSVLVVAKVEKGKSKKLKSVKELLGITIMERSSFEKNPIDFLEAKGYKEVKKDLIIKLPKYSLFELENGRKRMLASAGELQKGNELALPSKYVNFLYLASHYEKLKGSPEDNEQKQLFVEQHKHYLDEIIEQISEFSKRVILADANLDKVLSAYNKHRDKPIREQAENIIHLFTLTNLGAPAAFKYFDTTIDRKRYTSTKEVLDATLIHQSITGLYETRIDLSQLGGDGGGSSEAAAKGGSGGVLNLEEEYRLHEKPVPSSIDPSWLQLFPTVWAERAGMGLANQVPPVVVELRSGASPVAVRQYPMSKEAREGIRPHIQKFLDLGVLVPCRSPWNTPLLPVKKPGTNDYRPVQDLREINKRVQDIHPTVPNPYNLLSSLPPSYTWYSVLDLKDAFFCLRLHPNSQPLFAFEWKDPEKGNTGQLTWTRLPQGFKNSPTLFNEALHRDLAPFRALNPQVVLLQYVDDLLVAAPTYEDCKKGTQKLLQELSKLGYRVSAKKAQLCQREVTYLGYLLKEGKRWLTPARKATVMKIPVPTTPRQVREFLGKAGFCRLFIPGFASLAAPLYPLTKPSIPFIWTEEHQQAFDHIKKALLSAPALALPDLTKPFTLYIDERAGVARGVLTQTLGPWRRPVAYLSKKLDPVASGWPTCLKAVAAVALLLKDADKLTLGQNVTVIASHSLESIVRQPPDRWMTNARMTHYQSLLLNERVSFAPPAVLNPATLLPVESEATPVHRCSEILAEETGTRRDLEDQPLPGVPTWYTDGSSFITEGKRRAGAPIVDGKRTVWASSLPEGTSAQKAELVALTQALRLAEGKNINIYTDSRYAFATAHIHGAIYKQRGWLTSAGKDIKNKEEILALLEAIHLPRRVAIIHCPGHQRGSNPVATGNRRADEAAKQAALSTRVLAGTTKPAGKRTADGSEFEKRTADGSEFESPKKKAKVE

SEQ ID NO: 1475 - protein, 2089 aa, synthetic construct
  source 1..2089: note = Description of Artificial Sequence: Synthetic polypeptide
MPAAKRVKLDGGDKKYSIGLDIGTNSVGWAVITDEYKVPSKKFKVLGNTDRHSIKKNLIGALLFDSGETAEATRLKRTARRRYTRRKNRICYLQEIFSNEMAKVDDSFFHRLEESFLVEEDKKHERHPIFGNIVDEVAYHEKYPTIYHLRKKLVDSTDKADLRLIYLALAHMIKFRGHFLIEGDLNPDNSDVDKLFIQLVQTYNQLFEENPINASGVDAKAILSARLSKSRRLENLIAQLPGEKKNGLFGNLIALSLGLTPNFKSNFDLAEDAKLQLSKDTYDDDLDNLLAQIGDQYADLFLAAKNLSDAILLSDILRVNTEITKAPLSASMIKRYDEHHQDLTLLKALVRQQLPEKYKEIFFDQSKNGYAGYIDGGASQEEFYKFIKPILEKMDGTEELLVKLNREDLLRKQRTFDNGSIPHQIHLGELHAILRRQEDFYPFLKDNREKIEKILTFRIPYYVGPLARGNSRFAWMTRKSEETITPWNFEEVVDKGASAQSFIERMTNFDKNLPNEKVLPKHSLLYEYFTVYNELTKVKYVTEGMRKPAFLSGEQKKAIVDLLFKTNRKVTVKQLKEDYFKKIECFDSVEISGVEDRFNASLGTYHDLLKIIKDKDFLDNEENEDILEDIVLTLTLFEDREMIEERLKTYAHLFDDKVMKQLKRRRYTGWGRLSRKLINGIRDKQSGKTILDFLKSDGFANRNFMQLIHDDSLTFKEDIQKAQVSGQGDSLHEHIANLAGSPAIKKGILQTVKVVDELVKVMGRHKPENIVIEMARENQTTQKGQKNSRERMKRIEEGIKELGSQILKEHPVENTQLQNEKLYLYYLQNGRDMYVDQELDINRLSDYDVDHIVPQSFLKDDSIDNKVLTRSDKARGKSDNVPSEEVVKKMKNYWRQLLNAKLITQRKFDNLTKAERGGLSELDKAGFIKRQLVETRQITKHVAQILDSRMNTKYDENDKLIREVKVITLKSKLVSDFRKDFQFYKVREINNYHHAHDAYLNAVVGTALIKKYPKLESEFVYGDYKVYDVRKMIAKSEQEIGKATAKYFFYSNIMNFFKTEITLANGEIRKRPLIETNGETGEIVWDKGRDFATVRKVLSMPQVNIVKKTEVQTGGFSKESILPKRNSDKLIARKKDWDPKKYGGFDSPTVAYSVLVVAKVEKGKSKKLKSVKELLGITIMERSSFEKNPIDFLEAKGYKEVKKDLIIKLPKYSLFELENGRKRMLASAGELQKGNELALPSKYVNFLYLASHYEKLKGSPEDNEQKQLFVEQHKHYLDEIIEQISEFSKRVILADANLDKVLSAYNKHRDKPIREQAENIIHLFTLTNLGAPAAFKYFDTTIDRKRYTSTKEVLDATLIHQSITGLYETRIDLSQLGGDGGGGSGGSGGVLNLEEEYRLHEKPVPSSIDPSWLQLFPTVWAERAGMGLANQVPPVVVELRSGASPVAVRQYPMSKEAREGIRPHIQKFLDLGVLVPCRSPWNTPLLPVKKPGTNDYRPVQDLREINKRVQDIHPTVPNPYNLLSSLPPSYTWYSVLDLKDAFFCLRLHPNSQPLFAFEWKDPEKGNTGQLTWTRLPQGFKNSPTLFNEALHRDLAPFRALNPQVVLLQYVDDLLVAAPTYEDCKKGTQKLLQELSKLGYRVSAKKAQLCQREVTYLGYLLKEGKRWLTPARKATVMKIPVPTTPRQVREFLGKAGFCRLFIPGFASLAAPLYPLTKPSIPFIWTEEHQQAFDHIKKALLSAPALALPDLTKPFTLYIDERAGVARGVLTQTLGPWRRPVAYLSKKLDPVASGWPTCLKAVAAVALLLKDADKLTLGQNVTVIASHSLESIVRQPPDRWMTNARMTHYQSLLLNERVSFAPPAVLNPATLLPVESEATPVHRCSEILAEETGTRRDLEDQPLPGVPTWYTDGSSFITEGKRRAGAPIVDGKRTVWASSLPEGTSAQKAELVALTQALRLAEGKNINIYTDSRYAFATAHIHGAIYKQRGWLTSAGKDIKNKEEILALLEAIHLPRRVAIIHCPGHQRGSNPVATGNRRADEAAKQAALSTRVLAGTTKPAGKRTADGSEFEKRTADGSEFESPKKKAKVE

SEQ ID NO: 1476 - protein, 2092 aa, synthetic construct
  source 1..2092: note = Description of Artificial Sequence: Synthetic polypeptide
MPAAKRVKLDGGDKKYSIGLDIGTNSVGWAVITDEYKVPSKKFKVLGNTDRHSIKKNLIGALLFDSGETAEATRLKRTARRRYTRRKNRICYLQEIFSNEMAKVDDSFFHRLEESFLVEEDKKHERHPIFGNIVDEVAYHEKYPTIYHLRKKLVDSTDKADLRLIYLALAHMIKFRGHFLIEGDLNPDNSDVDKLFIQLVQTYNQLFEENPINASGVDAKAILSARLSKSRRLENLIAQLPGEKKNGLFGNLIALSLGLTPNFKSNFDLAEDAKLQLSKDTYDDDLDNLLAQIGDQYADLFLAAKNLSDAILLSDILRVNTEITKAPLSASMIKRYDEHHQDLTLLKALVRQQLPEKYKEIFFDQSKNGYAGYIDGGASQEEFYKFIKPILEKMDGTEELLVKLNREDLLRKQRTFDNGSIPHQIHLGELHAILRRQEDFYPFLKDNREKIEKILTFRIPYYVGPLARGNSRFAWMTRKSEETITPWNFEEVVDKGASAQSFIERMTNFDKNLPNEKVLPKHSLLYEYFTVYNELTKVKYVTEGMRKPAFLSGEQKKAIVDLLFKTNRKVTVKQLKEDYFKKIECFDSVEISGVEDRFNASLGTYHDLLKIIKDKDFLDNEENEDILEDIVLTLTLFEDREMIEERLKTYAHLFDDKVMKQLKRRRYTGWGRLSRKLINGIRDKQSGKTILDFLKSDGFANRNFMQLIHDDSLTFKEDIQKAQVSGQGDSLHEHIANLAGSPAIKKGILQTVKVVDELVKVMGRHKPENIVIEMARENQTTQKGQKNSRERMKRIEEGIKELGSQILKEHPVENTQLQNEKLYLYYLQNGRDMYVDQELDINRLSDYDVDHIVPQSFLKDDSIDNKVLTRSDKARGKSDNVPSEEVVKKMKNYWRQLLNAKLITQRKFDNLTKAERGGLSELDKAGFIKRQLVETRQITKHVAQILDSRMNTKYDENDKLIREVKVITLKSKLVSDFRKDFQFYKVREINNYHHAHDAYLNAVVGTALIKKYPKLESEFVYGDYKVYDVRKMIAKSEQEIGKATAKYFFYSNIMNFFKTEITLANGEIRKRPLIETNGETGEIVWDKGRDFATVRKVLSMPQVNIVKKTEVQTGGFSKESILPKRNSDKLIARKKDWDPKKYGGFDSPTVAYSVLVVAKVEKGKSKKLKSVKELLGITIMERSSFEKNPIDFLEAKGYKEVKKDLIIKLPKYSLFELENGRKRMLASAGELQKGNELALPSKYVNFLYLASHYEKLKGSPEDNEQKQLFVEQHKHYLDEIIEQISEFSKRVILADANLDKVLSAYNKHRDKPIREQAENIIHLFTLTNLGAPAAFKYFDTTIDRKRYTSTKEVLDATLIHQSITGLYETRIDLSQLGGDGGGGSGSSPAPGGVLNLEEEYRLHEKPVPSSIDPSWLQLFPTVWAERAGMGLANQVPPVVVELRSGASPVAVRQYPMSKEAREGIRPHIQKFLDLGVLVPCRSPWNTPLLPVKKPGTNDYRPVQDLREINKRVQDIHPTVPNPYNLLSSLPPSYTWYSVLDLKDAFFCLRLHPNSQPLFAFEWKDPEKGNTGQLTWTRLPQGFKNSPTLFNEALHRDLAPFRALNPQVVLLQYVDDLLVAAPTYEDCKKGTQKLLQELSKLGYRVSAKKAQLCQREVTYLGYLLKEGKRWLTPARKATVMKIPVPTTPRQVREFLGKAGFCRLFIPGFASLAAPLYPLTKPSIPFIWTEEHQQAFDHIKKALLSAPALALPDLTKPFTLYIDERAGVARGVLTQTLGPWRRPVAYLSKKLDPVASGWPTCLKAVAAVALLLKDADKLTLGQNVTVIASHSLESIVRQPPDRWMTNARMTHYQSLLLNERVSFAPPAVLNPATLLPVESEATPVHRCSEILAEETGTRRDLEDQPLPGVPTWYTDGSSFITEGKRRAGAPIVDGKRTVWASSLPEGTSAQKAELVALTQALRLAEGKNINIYTDSRYAFATAHIHGAIYKQRGWLTSAGKDIKNKEEILALLEAIHLPRRVAIIHCPGHQRGSNPVATGNRRADEAAKQAALSTRVLAGTTKPAGKRTADGSEFEKRTADGSEFESPKKKAKVE

SEQ ID NO: 1477 - protein, 2092 aa, synthetic construct
  source 1..2092: note = Description of Artificial Sequence: Synthetic polypeptide
MPAAKRVKLDGGDKKYSIGLDIGTNSVGWAVITDEYKVPSKKFKVLGNTDRHSIKKNLIGALLFDSGETAEATRLKRTARRRYTRRKNRICYLQEIFSNEMAKVDDSFFHRLEESFLVEEDKKHERHPIFGNIVDEVAYHEKYPTIYHLRKKLVDSTDKADLRLIYLALAHMIKFRGHFLIEGDLNPDNSDVDKLFIQLVQTYNQLFEENPINASGVDAKAILSARLSKSRRLENLIAQLPGEKKNGLFGNLIALSLGLTPNFKSNFDLAEDAKLQLSKDTYDDDLDNLLAQIGDQYADLFLAAKNLSDAILLSDILRVNTEITKAPLSASMIKRYDEHHQDLTLLKALVRQQLPEKYKEIFFDQSKNGYAGYIDGGASQEEFYKFIKPILEKMDGTEELLVKLNREDLLRKQRTFDNGSIPHQIHLGELHAILRRQEDFYPFLKDNREKIEKILTFRIPYYVGPLARGNSRFAWMTRKSEETITPWNFEEVVDKGASAQSFIERMTNFDKNLPNEKVLPKHSLLYEYFTVYNELTKVKYVTEGMRKPAFLSGEQKKAIVDLLFKTNRKVTVKQLKEDYFKKIECFDSVEISGVEDRFNASLGTYHDLLKIIKDKDFLDNEENEDILEDIVLTLTLFEDREMIEERLKTYAHLFDDKVMKQLKRRRYTGWGRLSRKLINGIRDKQSGKTILDFLKSDGFANRNFMQLIHDDSLTFKEDIQKAQVSGQGDSLHEHIANLAGSPAIKKGILQTVKVVDELVKVMGRHKPENIVIEMARENQTTQKGQKNSRERMKRIEEGIKELGSQILKEHPVENTQLQNEKLYLYYLQNGRDMYVDQELDINRLSDYDVDHIVPQSFLKDDSIDNKVLTRSDKARGKSDNVPSEEVVKKMKNYWRQLLNAKLITQRKFDNLTKAERGGLSELDKAGFIKRQLVETRQITKHVAQILDSRMNTKYDENDKLIREVKVITLKSKLVSDFRKDFQFYKVREINNYHHAHDAYLNAVVGTALIKKYPKLESEFVYGDYKVYDVRKMIAKSEQEIGKATAKYFFYSNIMNFFKTEITLANGEIRKRPLIETNGETGEIVWDKGRDFATVRKVLSMPQVNIVKKTEVQTGGFSKESILPKRNSDKLIARKKDWDPKKYGGFDSPTVAYSVLVVAKVEKGKSKKLKSVKELLGITIMERSSFEKNPIDFLEAKGYKEVKKDLIIKLPKYSLFELENGRKRMLASAGELQKGNELALPSKYVNFLYLASHYEKLKGSPEDNEQKQLFVEQHKHYLDEIIEQISEFSKRVILADANLDKVLSAYNKHRDKPIREQAENIIHLFTLTNLGAPAAFKYFDTTIDRKRYTSTKEVLDATLIHQSITGLYETRIDLSQLGGDGGGSSGGGGGSGGVLNLEEEYRLHEKPVPSSIDPSWLQLFPTVWAERAGMGLANQVPPVVVELRSGASPVAVRQYPMSKEAREGIRPHIQKFLDLGVLVPCRSPWNTPLLPVKKPGTNDYRPVQDLREINKRVQDIHPTVPNPYNLLSSLPPSYTWYSVLDLKDAFFCLRLHPNSQPLFAFEWKDPEKGNTGQLTWTRLPQGFKNSPTLFNEALHRDLAPFRALNPQVVLLQYVDDLLVAAPTYEDCKKGTQKLLQELSKLGYRVSAKKAQLCQREVTYLGYLLKEGKRWLTPARKATVMKIPVPTTPRQVREFLGKAGFCRLFIPGFASLAAPLYPLTKPSIPFIWTEEHQQAFDHIKKALLSAPALALPDLTKPFTLYIDERAGVARGVLTQTLGPWRRPVAYLSKKLDPVASGWPTCLKAVAAVALLLKDADKLTLGQNVTVIASHSLESIVRQPPDRWMTNARMTHYQSLLLNERVSFAPPAVLNPATLLPVESEATPVHRCSEILAEETGTRRDLEDQPLPGVPTWYTDGSSFITEGKRRAGAPIVDGKRTVWASSLPEGTSAQKAELVALTQALRLAEGKNINIYTDSRYAFATAHIHGAIYKQRGWLTSAGKDIKNKEEILALLEAIHLPRRVAIIHCPGHQRGSNPVATGNRRADEAAKQAALSTRVLAGTTKPAGKRTADGSEFEKRTADGSEFESPKKKAKVE

SEQ ID NO: 1478 - protein, 2007 aa, synthetic construct
  source 1..2007: note = Description of Artificial Sequence: Synthetic polypeptide
MPAAKRVKLDGGDKKYSIGLDIGTNSVGWAVITDEYKVPSKKFKVLGNTDRHSIKKNLIGALLFDSGETAEATRLKRTARRRYTRRKNRICYLQEIFSNEMAKVDDSFFHRLEESFLVEEDKKHERHPIFGNIVDEVAYHEKYPTIYHLRKKLVDSTDKADLRLIYLALAHMIKFRGHFLIEGDLNPDNSDVDKLFIQLVQTYNQLFEENPINASGVDAKAILSARLSKSRRLENLIAQLPGEKKNGLFGNLIALSLGLTPNFKSNFDLAEDAKLQLSKDTYDDDLDNLLAQIGDQYADLFLAAKNLSDAILLSDILRVNTEITKAPLSASMIKRYDEHHQDLTLLKALVRQQLPEKYKEIFFDQSKNGYAGYIDGGASQEEFYKFIKPILEKMDGTEELLVKLNREDLLRKQRTFDNGSIPHQIHLGELHAILRRQEDFYPFLKDNREKIEKILTFRIPYYVGPLARGNSRFAWMTRKSEETITPWNFEEVVDKGASAQSFIERMTNFDKNLPNEKVLPKHSLLYEYFTVYNELTKVKYVTEGMRKPAFLSGEQKKAIVDLLFKTNRKVTVKQLKEDYFKKIECFDSVEISGVEDRFNASLGTYHDLLKIIKDKDFLDNEENEDILEDIVLTLTLFEDREMIEERLKTYAHLFDDKVMKQLKRRRYTGWGRLSRKLINGIRDKQSGKTILDFLKSDGFANRNFMQLIHDDSLTFKEDIQKAQVSGQGDSLHEHIANLAGSPAIKKGILQTVKVVDELVKVMGRHKPENIVIEMARENQTTQKGQKNSRERMKRIEEGIKELGSQILKEHPVENTQLQNEKLYLYYLQNGRDMYVDQELDINRLSDYDVDHIVPQSFLKDDSIDNKVLTRSDKARGKSDNVPSEEVVKKMKNYWRQLLNAKLITQRKFDNLTKAERGGLSELDKAGFIKRQLVETRQITKHVAQILDSRMNTKYDENDKLIREVKVITLKSKLVSDFRKDFQFYKVREINNYHHAHDAYLNAVVGTALIKKYPKLESEFVYGDYKVYDVRKMIAKSEQEIGKATAKYFFYSNIMNFFKTEITLANGEIRKRPLIETNGETGEIVWDKGRDFATVRKVLSMPQVNIVKKTEVQTGGFSKESILPKRNSDKLIARKKDWDPKKYGGFDSPTVAYSVLVVAKVEKGKSKKLKSVKELLGITIMERSSFEKNPIDFLEAKGYKEVKKDLIIKLPKYSLFELENGRKRMLASAGELQKGNELALPSKYVNFLYLASHYEKLKGSPEDNEQKQLFVEQHKHYLDEIIEQISEFSKRVILADANLDKVLSAYNKHRDKPIREQAENIIHLFTLTNLGAPAAFKYFDTTIDRKRYTSTKEVLDATLIHQSITGLYETRIDLSQLGGDGGGGGGGGGAVLGLEHLPRPPQISQFPLNPERLQALQHLVRKALEAGHIEPYTGPGNNPVFPVKKANGTWRFIHDLRATNSLTIDLSSSSPGPPDLSSLPTTLAHLQTIDLRDAFFQIPLPKQFQPYFAFTVPQQCNYGPGTRYAWKVLPQGFKNSPTLFEMQLAHILQPIRQAFPQCTILQYMDDILLASPSHEDLLLLSEATMASLISHGLPVSENKTQQTPGTIKFLGQIISPNHLTYDAVPTVPIRSRWALPELQALLGEIQWVSKGTPTLRQPLHSLYCALQRHTDPRDQIYLNPSQVQSLVQLRQALSQNCRSRLVQTLPLLGAIMLTLTGTTTVVFQSKEQWPLVWLHAPLPHTSQCPWGQLLASAVLLLDKYTLQSYGLLCQTIHHNISTQTFNQFIQTSDHPSVPILLHHSHRFKNLGAQTGELWNTFLKTAAPLAPVKALMPVFTLSPVIINTAPCLFSDGSTSRAAYILWDKQILSQRSFPLPPPHKSAQRAELLGLLHGLSSARSWRCLNIFLDSKYLYHYLRTLALGTFQGRSSQAPFQALLPRLLSRKVVYLHHVRSHTNLPDPISRLNALTDALLITPVLQLAGKRTADGSEFEKRTADGSEFESPKKKAKVE

SEQ ID NO: 1479 - protein, 2013 aa, synthetic construct
  source 1..2013: note = Description of Artificial Sequence: Synthetic polypeptide
MPAAKRVKLDGGDKKYSIGLDIGTNSVGWAVITDEYKVPSKKFKVLGNTDRHSIKKNLIGALLFDSGETAEATRLKRTARRRYTRRKNRICYLQEIFSNEMAKVDDSFFHRLEESFLVEEDKKHERHPIFGNIVDEVAYHEKYPTIYHLRKKLVDSTDKADLRLIYLALAHMIKFRGHFLIEGDLNPDNSDVDKLFIQLVQTYNQLFEENPINASGVDAKAILSARLSKSRRLENLIAQLPGEKKNGLFGNLIALSLGLTPNFKSNFDLAEDAKLQLSKDTYDDDLDNLLAQIGDQYADLFLAAKNLSDAILLSDILRVNTEITKAPLSASMIKRYDEHHQDLTLLKALVRQQLPEKYKEIFFDQSKNGYAGYIDGGASQEEFYKFIKPILEKMDGTEELLVKLNREDLLRKQRTFDNGSIPHQIHLGELHAILRRQEDFYPFLKDNREKIEKILTFRIPYYVGPLARGNSRFAWMTRKSEETITPWNFEEVVDKGASAQSFIERMTNFDKNLPNEKVLPKHSLLYEYFTVYNELTKVKYVTEGMRKPAFLSGEQKKAIVDLLFKTNRKVTVKQLKEDYFKKIECFDSVEISGVEDRFNASLGTYHDLLKIIKDKDFLDNEENEDILEDIVLTLTLFEDREMIEERLKTYAHLFDDKVMKQLKRRRYTGWGRLSRKLINGIRDKQSGKTILDFLKSDGFANRNFMQLIHDDSLTFKEDIQKAQVSGQGDSLHEHIANLAGSPAIKKGILQTVKVVDELVKVMGRHKPENIVIEMARENQTTQKGQKNSRERMKRIEEGIKELGSQILKEHPVENTQLQNEKLYLYYLQNGRDMYVDQELDINRLSDYDVDHIVPQSFLKDDSIDNKVLTRSDKARGKSDNVPSEEVVKKMKNYWRQLLNAKLITQRKFDNLTKAERGGLSELDKAGFIKRQLVETRQITKHVAQILDSRMNTKYDENDKLIREVKVITLKSKLVSDFRKDFQFYKVREINNYHHAHDAYLNAVVGTALIKKYPKLESEFVYGDYKVYDVRKMIAKSEQEIGKATAKYFFYSNIMNFFKTEITLANGEIRKRPLIETNGETGEIVWDKGRDFATVRKVLSMPQVNIVKKTEVQTGGFSKESILPKRNSDKLIARKKDWDPKKYGGFDSPTVAYSVLVVAKVEKGKSKKLKSVKELLGITIMERSSFEKNPIDFLEAKGYKEVKKDLIIKLPKYSLFELENGRKRMLASAGELQKGNELALPSKYVNFLYLASHYEKLKGSPEDNEQKQLFVEQHKHYLDEIIEQISEFSKRVILADANLDKVLSAYNKHRDKPIREQAENIIHLFTLTNLGAPAAFKYFDTTIDRKRYTSTKEVLDATLIHQSITGLYETRIDLSQLGGDGGPAPAPAPAPAPGGAVLGLEHLPRPPQISQFPLNPERLQALQHLVRKALEAGHIEPYTGPGNNPVFPVKKANGTWRFIHDLRATNSLTIDLSSSSPGPPDLSSLPTTLAHLQTIDLRDAFFQIPLPKQFQPYFAFTVPQQCNYGPGTRYAWKVLPQGFKNSPTLFEMQLAHILQPIRQAFPQCTILQYMDDILLASPSHEDLLLLSEATMASLISHGLPVSENKTQQTPGTIKFLGQIISPNHLTYDAVPTVPIRSRWALPELQALLGEIQWVSKGTPTLRQPLHSLYCALQRHTDPRDQIYLNPSQVQSLVQLRQALSQNCRSRLVQTLPLLGAIMLTLTGTTTVVFQSKEQWPLVWLHAPLPHTSQCPWGQLLASAVLLLDKYTLQSYGLLCQTIHHNISTQTFNQFIQTSDHPSVPILLHHSHRFKNLGAQTGELWNTFLKTAAPLAPVKALMPVFTLSPVIINTAPCLFSDGSTSRAAYILWDKQILSQRSFPLPPPHKSAQRAELLGLLHGLSSARSWRCLNIFLDSKYLYHYLRTLALGTFQGRSSQAPFQALLPRLLSRKVVYLHHVRSHTNLPDPISRLNALTDALLITPVLQLAGKRTADGSEFEKRTADGSEFESPKKKAKVE

SEQ ID NO: 1480 - protein, 2013 aa, synthetic construct
  source 1..2013: note = Description of Artificial Sequence: Synthetic polypeptide
MPAAKRVKLDGGDKKYSIGLDIGTNSVGWAVITDEYKVPSKKFKVLGNTDRHSIKKNLIGALLFDSGETAEATRLKRTARRRYTRRKNRICYLQEIFSNEMAKVDDSFFHRLEESFLVEEDKKHERHPIFGNIVDEVAYHEKYPTIYHLRKKLVDSTDKADLRLIYLALAHMIKFRGHFLIEGDLNPDNSDVDKLFIQLVQTYNQLFEENPINASGVDAKAILSARLSKSRRLENLIAQLPGEKKNGLFGNLIALSLGLTPNFKSNFDLAEDAKLQLSKDTYDDDLDNLLAQIGDQYADLFLAAKNLSDAILLSDILRVNTEITKAPLSASMIKRYDEHHQDLTLLKALVRQQLPEKYKEIFFDQSKNGYAGYIDGGASQEEFYKFIKPILEKMDGTEELLVKLNREDLLRKQRTFDNGSIPHQIHLGELHAILRRQEDFYPFLKDNREKIEKILTFRIPYYVGPLARGNSRFAWMTRKSEETITPWNFEEVVDKGASAQSFIERMTNFDKNLPNEKVLPKHSLLYEYFTVYNELTKVKYVTEGMRKPAFLSGEQKKAIVDLLFKTNRKVTVKQLKEDYFKKIECFDSVEISGVEDRFNASLGTYHDLLKIIKDKDFLDNEENEDILEDIVLTLTLFEDREMIEERLKTYAHLFDDKVMKQLKRRRYTGWGRLSRKLINGIRDKQSGKTILDFLKSDGFANRNFMQLIHDDSLTFKEDIQKAQVSGQGDSLHEHIANLAGSPAIKKGILQTVKVVDELVKVMGRHKPENIVIEMARENQTTQKGQKNSRERMKRIEEGIKELGSQILKEHPVENTQLQNEKLYLYYLQNGRDMYVDQELDINRLSDYDVDHIVPQSFLKDDSIDNKVLTRSDKARGKSDNVPSEEVVKKMKNYWRQLLNAKLITQRKFDNLTKAERGGLSELDKAGFIKRQLVETRQITKHVAQILDSRMNTKYDENDKLIREVKVITLKSKLVSDFRKDFQFYKVREINNYHHAHDAYLNAVVGTALIKKYPKLESEFVYGDYKVYDVRKMIAKSEQEIGKATAKYFFYSNIMNFFKTEITLANGEIRKRPLIETNGETGEIVWDKGRDFATVRKVLSMPQVNIVKKTEVQTGGFSKESILPKRNSDKLIARKKDWDPKKYGGFDSPTVAYSVLVVAKVEKGKSKKLKSVKELLGITIMERSSFEKNPIDFLEAKGYKEVKKDLIIKLPKYSLFELENGRKRMLASAGELQKGNELALPSKYVNFLYLASHYEKLKGSPEDNEQKQLFVEQHKHYLDEIIEQISEFSKRVILADANLDKVLSAYNKHRDKPIREQAENIIHLFTLTNLGAPAAFKYFDTTIDRKRYTSTKEVLDATLIHQSITGLYETRIDLSQLGGDGGPAPEAAAKGGSGGAVLGLEHLPRPPQISQFPLNPERLQALQHLVRKALEAGHIEPYTGPGNNPVFPVKKANGTWRFIHDLRATNSLTIDLSSSSPGPPDLSSLPTTLAHLQTIDLRDAFFQIPLPKQFQPYFAFTVPQQCNYGPGTRYAWKVLPQGFKNSPTLFEMQLAHILQPIRQAFPQCTILQYMDDILLASPSHEDLLLLSEATMASLISHGLPVSENKTQQTPGTIKFLGQIISPNHLTYDAVPTVPIRSRWALPELQALLGEIQWVSKGTPTLRQPLHSLYCALQRHTDPRDQIYLNPSQVQSLVQLRQALSQNCRSRLVQTLPLLGAIMLTLTGTTTVVFQSKEQWPLVWLHAPLPHTSQCPWGQLLASAVLLLDKYTLQSYGLLCQTIHHNISTQTFNQFIQTSDHPSVPILLHHSHRFKNLGAQTGELWNTFLKTAAPLAPVKALMPVFTLSPVIINTAPCLFSDGSTSRAAYILWDKQILSQRSFPLPPPHKSAQRAELLGLLHGLSSARSWRCLNIFLDSKYLYHYLRTLALGTFQGRSSQAPFQALLPRLLSRKVVYLHHVRSHTNLPDPISRLNALTDALLITPVLQLAGKRTADGSEFEKRTADGSEFESPKKKAKVE

SEQ ID NO: 1481 - protein, 2011 aa, synthetic construct
  source 1..2011: note = Description of Artificial Sequence: Synthetic polypeptide
MPAAKRVKLDGGDKKYSIGLDIGTNSVGWAVITDEYKVPSKKFKVLGNTDRHSIKKNLIGALLFDSGETAEATRLKRTARRRYTRRKNRICYLQEIFSNEMAKVDDSFFHRLEESFLVEEDKKHERHPIFGNIVDEVAYHEKYPTIYHLRKKLVDSTDKADLRLIYLALAHMIKFRGHFLIEGDLNPDNSDVDKLFIQLVQTYNQLFEENPINASGVDAKAILSARLSKSRRLENLIAQLPGEKKNGLFGNLIALSLGLTPNFKSNFDLAEDAKLQLSKDTYDDDLDNLLAQIGDQYADLFLAAKNLSDAILLSDILRVNTEITKAPLSASMIKRYDEHHQDLTLLKALVRQQLPEKYKEIFFDQSKNGYAGYIDGGASQEEFYKFIKPILEKMDGTEELLVKLNREDLLRKQRTFDNGSIPHQIHLGELHAILRRQEDFYPFLKDNREKIEKILTFRIPYYVGPLARGNSRFAWMTRKSEETITPWNFEEVVDKGASAQSFIERMTNFDKNLPNEKVLPKHSLLYEYFTVYNELTKVKYVTEGMRKPAFLSGEQKKAIVDLLFKTNRKVTVKQLKEDYFKKIECFDSVEISGVEDRFNASLGTYHDLLKIIKDKDFLDNEENEDILEDIVLTLTLFEDREMIEERLKTYAHLFDDKVMKQLKRRRYTGWGRLSRKLINGIRDKQSGKTILDFLKSDGFANRNFMQLIHDDSLTFKEDIQKAQVSGQGDSLHEHIANLAGSPAIKKGILQTVKVVDELVKVMGRHKPENIVIEMARENQTTQKGQKNSRERMKRIEEGIKELGSQILKEHPVENTQLQNEKLYLYYLQNGRDMYVDQELDINRLSDYDVDHIVPQSFLKDDSIDNKVLTRSDKARGKSDNVPSEEVVKKMKNYWRQLLNAKLITQRKFDNLTKAERGGLSELDKAGFIKRQLVETRQITKHVAQILDSRMNTKYDENDKLIREVKVITLKSKLVSDFRKDFQFYKVREINNYHHAHDAYLNAVVGTALIKKYPKLESEFVYGDYKVYDVRKMIAKSEQEIGKATAKYFFYSNIMNFFKTEITLANGEIRKRPLIETNGETGEIVWDKGRDFATVRKVLSMPQVNIVKKTEVQTGGFSKESILPKRNSDKLIARKKDWDPKKYGGFDSPTVAYSVLVVAKVEKGKSKKLKSVKELLGITIMERSSFEKNPIDFLEAKGYKEVKKDLIIKLPKYSLFELENGRKRMLASAGELQKGNELALPSKYVNFLYLASHYEKLKGSPEDNEQKQLFVEQHKHYLDEIIEQISEFSKRVILADANLDKVLSAYNKHRDKPIREQAENIIHLFTLTNLGAPAAFKYFDTTIDRKRYTSTKEVLDATLIHQSITGLYETRIDLSQLGGDGGPAPGSSGGGGGAVLGLEHLPRPPQISQFPLNPERLQALQHLVRKALEAGHIEPYTGPGNNPVFPVKKANGTWRFIHDLRATNSLTIDLSSSSPGPPDLSSLPTTLAHLQTIDLRDAFFQIPLPKQFQPYFAFTVPQQCNYGPGTRYAWKVLPQGFKNSPTLFEMQLAHILQPIRQAFPQCTILQYMDDILLASPSHEDLLLLSEATMASLISHGLPVSENKTQQTPGTIKFLGQIISPNHLTYDAVPTVPIRSRWALPELQALLGEIQWVSKGTPTLRQPLHSLYCALQRHTDPRDQIYLNPSQVQSLVQLRQALSQNCRSRLVQTLPLLGAIMLTLTGTTTVVFQSKEQWPLVWLHAPLPHTSQCPWGQLLASAVLLLDKYTLQSYGLLCQTIHHNISTQTFNQFIQTSDHPSVPILLHHSHRFKNLGAQTGELWNTFLKTAAPLAPVKALMPVFTLSPVIINTAPCLFSDGSTSRAAYILWDKQILSQRSFPLPPPHKSAQRAELLGLLHGLSSARSWRCLNIFLDSKYLYHYLRTLALGTFQGRSSQAPFQALLPRLLSRKVVYLHHVRSHTNLPDPISRLNALTDALLITPVLQLAGKRTADGSEFEKRTADGSEFESPKKKAKVE

SEQ ID NO: 1482 - protein, 2013 aa, synthetic construct
  source 1..2013: note = Description of Artificial Sequence: Synthetic polypeptide
MPAAKRVKLDGGDKKYSIGLDIGTNSVGWAVITDEYKVPSKKFKVLGNTDRHSIKKNLIGALLFDSGETAEATRLKRTARRRYTRRKNRICYLQEIFSNEMAKVDDSFFHRLEESFLVEEDKKHERHPIFGNIVDEVAYHEKYPTIYHLRKKLVDSTDKADLRLIYLALAHMIKFRGHFLIEGDLNPDNSDVDKLFIQLVQTYNQLFEENPINASGVDAKAILSARLSKSRRLENLIAQLPGEKKNGLFGNLIALSLGLTPNFKSNFDLAEDAKLQLSKDTYDDDLDNLLAQIGDQYADLFLAAKNLSDAILLSDILRVNTEITKAPLSASMIKRYDEHHQDLTLLKALVRQQLPEKYKEIFFDQSKNGYAGYIDGGASQEEFYKFIKPILEKMDGTEELLVKLNREDLLRKQRTFDNGSIPHQIHLGELHAILRRQEDFYPFLKDNREKIEKILTFRIPYYVGPLARGNSRFAWMTRKSEETITPWNFEEVVDKGASAQSFIERMTNFDKNLPNEKVLPKHSLLYEYFTVYNELTKVKYVTEGMRKPAFLSGEQKKAIVDLLFKTNRKVTVKQLKEDYFKKIECFDSVEISGVEDRFNASLGTYHDLLKIIKDKDFLDNEENEDILEDIVLTLTLFEDREMIEERLKTYAHLFDDKVMKQLKRRRYTGWGRLSRKLINGIRDKQSGKTILDFLKSDGFANRNFMQLIHDDSLTFKEDIQKAQVSGQGDSLHEHIANLAGSPAIKKGILQTVKVVDELVKVMGRHKPENIVIEMARENQTTQKGQKNSRERMKRIEEGIKELGSQILKEHPVENTQLQNEKLYLYYLQNGRDMYVDQELDINRLSDYDVDHIVPQSFLKDDSIDNKVLTRSDKARGKSDNVPSEEVVKKMKNYWRQLLNAKLITQRKFDNLTKAERGGLSELDKAGFIKRQLVETRQITKHVAQILDSRMNTKYDENDKLIREVKVITLKSKLVSDFRKDFQFYKVREINNYHHAHDAYLNAVVGTALIKKYPKLESEFVYGDYKVYDVRKMIAKSEQEIGKATAKYFFYSNIMNFFKTEITLANGEIRKRPLIETNGETGEIVWDKGRDFATVRKVLSMPQVNIVKKTEVQTGGFSKESILPKRNSDKLIARKKDWDPKKYGGFDSPTVAYSVLVVAKVEKGKSKKLKSVKELLGITIMERSSFEKNPIDFLEAKGYKEVKKDLIIKLPKYSLFELENGRKRMLASAGELQKGNELALPSKYVNFLYLASHYEKLKGSPEDNEQKQLFVEQHKHYLDEIIEQISEFSKRVILADANLDKVLSAYNKHRDKPIREQAENIIHLFTLTNLGAPAAFKYFDTTIDRKRYTSTKEVLDATLIHQSITGLYETRIDLSQLGGDGGEAAAKGSSGGSGGAVLGLEHLPRPPQISQFPLNPERLQALQHLVRKALEAGHIEPYTGPGNNPVFPVKKANGTWRFIHDLRATNSLTIDLSSSSPGPPDLSSLPTTLAHLQTIDLRDAFFQIPLPKQFQPYFAFTVPQQCNYGPGTRYAWKVLPQGFKNSPTLFQMQLAHILQPIRQAFPQCTILQYMDDILLASPSHEDLLLLSEATMASLISHGLPVSENKTQQTPGTIKFLGQIISPNHLTYDAVPTVPIRSRWALPELQALLGEIQWVSKGTPTLRQPLHSLYCALQPHTDPRDQIYLNPSQVQSLVQLRQALSQNCRSRLVQTLPLLGAIMLTLTGTTTVVFQSKEQWPLVWLHAPLPHTSQCPWGQLLASAVLLLDKYTLQSYGLLCQTIHHNISTQTFNQFIQTSDHPSVPILLHHSHRFKNLGAQTGELWNTFLKTAAPLAPVKALMPVFTLSPVIINTAPCLFSDGSTSRAAYILWDKQILSQRSFPLPPPHKSAQRAELLGLLHGLSSARSWRCLNIFLDSKYLYHYLRTLALGTFQGRSSQAPFQALLPRLLSRKVVYLHHVRSHTNLPDPISRLNALTDALLITPVLQLAGKRTADGSEFEKRTADGSEFESPKKKAKVE

SEQ ID NO: 1483 - protein, 2010 aa, synthetic construct
  source 1..2010: note = Description of Artificial Sequence: Synthetic polypeptide
MPAAKRVKLDGGDKKYSIGLDIGTNSVGWAVITDEYKVPSKKFKVLGNTDRHSIKKNLIGALLFDSGETAEATRLKRTARRRYTRRKNRICYLQEIFSNEMAKVDDSFFHRLEESFLVEEDKKHERHPIFGNIVDEVAYHEKYPTIYHLRKKLVDSTDKADLRLIYLALAHMIKFRGHFLIEGDLNPDNSDVDKLFIQLVQTYNQLFEENPINASGVDAKAILSARLSKSRRLENLIAQLPGEKKNGLFGNLIALSLGLTPNFKSNFDLAEDAKLQLSKDTYDDDLDNLLAQIGDQYADLFLAAKNLSDAILLSDILRVNTEITKAPLSASMIKRYDEHHQDLTLLKALVRQQLPEKYKEIFFDQSKNGYAGYIDGGASQEEFYKFIKPILEKMDGTEELLVKLNREDLLRKQRTFDNGSIPHQIHLGELHAILRRQEDFYPFLKDNREKIEKILTFRIPYYVGPLARGNSRFAWMTRKSEETITPWNFEEVVDKGASAQSFIERMTNFDKNLPNEKVLPKHSLLYEYFTVYNELTKVKYVTEGMRKPAFLSGEQKKAIVDLLFKTNRKVTVKQLKEDYFKKIECFDSVEISGVEDRFNASLGTYHDLLKIIKDKDFLDNEENEDILEDIVLTLTLFEDREMIEERLKTYAHLFDDKVMKQLKRRRYTGWGRLSRKLINGIRDKQSGKTILDFLKSDGFANRNFMQLIHDDSLTFKEDIQKAQVSGQGDSLHEHIANLAGSPAIKKGILQTVKVVDELVKVMGRHKPENIVIEMARENQTTQKGQKNSRERMKRIEEGIKELGSQILKEHPVENTQLQNEKLYLYYLQNGRDMYVDQELDINRLSDYDVDHIVPQSFLKDDSIDNKVLTRSDKARGKSDNVPSEEVVKKMKNYWRQLLNAKLITQRKFDNLTKAERGGLSELDKAGFIKRQLVETRQITKHVAQILDSRMNTKYDENDKLIREVKVITLKSKLVSDFRKDFQFYKVREINNYHHAHDAYLNAVVGTALIKKYPKLESEFVYGDYKVYDVRKMIAKSEQEIGKATAKYFFYSNIMNFFKTEITLANGEIRKRPLIETNGETGEIVWDKGRDFATVRKVLSMPQVNIVKKTEVQTGGFSKESILPKRNSDKLIARKKDWDPKKYGGFDSPTVAYSVLVVAKVEKGKSKKLKSVKELLGITIMERSSFEKNPIDFLEAKGYKEVKKDLIIKLPKYSLFELENGRKRMLASAGELQKGNELALPSKYVNFLYLASHYEKLKGSPEDNEQKQLFVEQHKHYLDEIIEQISEFSKRVILADANLDKVLSAYNKHRDKPIREQAENIIHLFTLTNLGAPAAFKYFDTTIDRKRYTSTKEVLDATLIHQSITGLYETRIDLSQLGGDGGEAAAKGGSGGAVLGLEHLPRPPQISQFPLNPERLQALQHLVRKALEAGHIEPYTGPGNNPVFPVKKANGTWRFIHDLRATNSLTIDLSSSSPGPPDLSSLPTTLAHLQTIDLRDAFFQIPLPKQFQPYFAFTVPQQCNYGPGTRYAWKVLPQGFKNSPTLFQMQLAHILQPIRQAFPQCTILQYMDDILLASPSHEDLLLLSEATMASLISHGLPVSENKTQQTPGTIKFLGQIISPNHLTYDAVPTVPIRSRWALPELQALLGEIQWVSKGTPTLRQPLHSLYCALQPHTDPRDQIYLNPSQVQSLVQLRQALSQNCRSRLVQTLPLLGAIMLTLTGTTTVVFQSKEQWPLVWLHAPLPHTSQCPWGQLLASAVLLLDKYTLQSYGLLCQTIHHNISTQTFNQFIQTSDHPSVPILLHHSHRFKNLGAQTGELWNTFLKTAAPLAPVKALMPVFTLSPVIINTAPCLFSDGSTSRAAYILWDKQILSQRSFPLPPPHKSAQRAELLGLLHGLSSARSWRCLNIFLDSKYLYHYLRTLALGTFQGRSSQAPFQALLPRLLSRKVVYLHHVRSHTNLPDPISRLNALTDALLITPVLQLAGKRTADGSEFEKRTADGSEFESPKKKAKVE

SEQ ID NO: 1484 - protein, 2013 aa, synthetic construct
  source 1..2013: note = Description of Artificial Sequence: Synthetic polypeptide
MPAAKRVKLDGGDKKYSIGLDIGTNSVGWAVITDEYKVPSKKFKVLGNTDRHSIKKNLIGALLFDSGETAEATRLKRTARRRYTRRKNRICYLQEIFSNEMAKVDDSFFHRLEESFLVEEDKKHERHPIFGNIVDEVAYHEKYPTIYHLRKKLVDSTDKADLRLIYLALAHMIKFRGHFLIEGDLNPDNSDVDKLFIQLVQTYNQLFEENPINASGVDAKAILSARLSKSRRLENLIAQLPGEKKNGLFGNLIALSLGLTPNFKSNFDLAEDAKLQLSKDTYDDDLDNLLAQIGDQYADLFLAAKNLSDAILLSDILRVNTEITKAPLSASMIKRYDEHHQDLTLLKALVRQQLPEKYKEIFFDQSKNGYAGYIDGGASQEEFYKFIKPILEKMDGTEELLVKLNREDLLRKQRTFDNGSIPHQIHLGELHAILRRQEDFYPFLKDNREKIEKILTFRIPYYVGPLARGNSRFAWMTRKSEETITPWNFEEVVDKGASAQSFIERMTNFDKNLPNEKVLPKHSLLYEYFTVYNELTKVKYVTEGMRKPAFLSGEQKKAIVDLLFKTNRKVTVKQLKEDYFKKIECFDSVEISGVEDRFNASLGTYHDLLKIIKDKDFLDNEENEDILEDIVLTLTLFEDREMIEERLKTYAHLFDDKVMKQLKRRRYTGWGRLSRKLINGIRDKQSGKTILDFLKSDGFANRNFMQLIHDDSLTFKEDIQKAQVSGQGDSLHEHIANLAGSPAIKKGILQTVKVVDELVKVMGRHKPENIVIEMARENQTTQKGQKNSRERMKRIEEGIKELGSQILKEHPVENTQLQNEKLYLYYLQNGRDMYVDQELDINRLSDYDVDHIVPQSFLKDDSIDNKVLTRSDKARGKSDNVPSEEVVKKMKNYWRQLLNAKLITQRKFDNLTKAERGGLSELDKAGFIKRQLVETRQITKHVAQILDSRMNTKYDENDKLIREVKVITLKSKLVSDFRKDFQFYKVREINNYHHAHDAYLNAVVGTALIKKYPKLESEFVYGDYKVYDVRKMIAKSEQEIGKATAKYFFYSNIMNFFKTEITLANGEIRKRPLIETNGETGEIVWDKGRDFATVRKVLSMPQVNIVKKTEVQTGGFSKESILPKRNSDKLIARKKDWDPKKYGGFDSPTVAYSVLVVAKVEKGKSKKLKSVKELLGITIMERSSFEKNPIDFLEAKGYKEVKKDLIIKLPKYSLFELENGRKRMLASAGELQKGNELALPSKYVNFLYLASHYEKLKGSPEDNEQKQLFVEQHKHYLDEIIEQISEFSKRVILADANLDKVLSAYNKHRDKPIREQAENIIHLFTLTNLGAPAAFKYFDTTIDRKRYTSTKEVLDATLIHQSITGLYETRIDLSQLGGDGGGGSEAAAKPAPGGAVLGLEHLPRPPQISQFPLNPERLQALQHLVRKALEAGHIEPYTGPGNNPVFPVKKANGTWRFIHDLRATNSLTIDLSSSSPGPPDLSSLPTTLAHLQTIDLRDAFFQIPLPKQFQPYFAFTVPQQCNYGPGTRYAWKVLPQGFKNSPTLFQMQLAHILQPIRQAFPQCTILQYMDDILLASPSHEDLLLLSEATMASLISHGLPVSENKTQQTPGTIKFLGQIISPNHLTYDAVPTVPIRSRWALPELQALLGEIQWVSKGTPTLRQPLHSLYCALQPHTDPRDQIYLNPSQVQSLVQLRQALSQNCRSRLVQTLPLLGAIMLTLTGTTTVVFQSKEQWPLVWLHAPLPHTSQCPWGQLLASAVLLLDKYTLQSYGLLCQTIHHNISTQTFNQFIQTSDHPSVPILLHHSHRFKNLGAQTGELWNTFLKTAAPLAPVKALMPVFTLSPVIINTAPCLFSDGSTSRAAYILWDKQILSQRSFPLPPPHKSAQRAELLGLLHGLSSARSWRCLNIFLDSKYLYHYLRTLALGTFQGRSSQAPFQALLPRLLSRKVVYLHHVRSHTNLPDPISRLNALTDALLITPVLQLAGKRTADGSEFEKRTADGSEFESPKKKAKVE

SEQ ID NO: 1485 - protein, 2011 aa, synthetic construct
  source 1..2011: note = Description of Artificial Sequence: Synthetic polypeptide
MPAAKRVKLDGGDKKYSIGLDIGTNSVGWAVITDEYKVPSKKFKVLGNTDRHSIKKNLIGALLFDSGETAEATRLKRTARRRYTRRKNRICYLQEIFSNEMAKVDDSFFHRLEESFLVEEDKKHERHPIFGNIVDEVAYHEKYPTIYHLRKKLVDSTDKADLRLIYLALAHMIKFRGHFLIEGDLNPDNSDVDKLFIQLVQTYNQLFEENPINASGVDAKAILSARLSKSRRLENLIAQLPGEKKNGLFGNLIALSLGLTPNFKSNFDLAEDAKLQLSKDTYDDDLDNLLAQIGDQYADLFLAAKNLSDAILLSDILRVNTEITKAPLSASMIKRYDEHHQDLTLLKALVRQQLPEKYKEIFFDQSKNGYAGYIDGGASQEEFYKFIKPILEKMDGTEELLVKLNREDLLRKQRTFDNGSIPHQIHLGELHAILRRQEDFYPFLKDNREKIEKILTFRIPYYVGPLARGNSRFAWMTRKSEETITPWNFEEVVDKGASAQSFIERMTNFDKNLPNEKVLPKHSLLYEYFTVYNELTKVKYVTEGMRKPAFLSGEQKKAIVDLLFKTNRKVTVKQLKEDYFKKIECFDSVEISGVEDRFNASLGTYHDLLKIIKDKDFLDNEENEDILEDIVLTLTLFEDREMIEERLKTYAHLFDDKVMKQLKRRRYTGWGRLSRKLINGIRDKQSGKTILDFLKSDGFANRNFMQLIHDDSLTFKEDIQKAQVSGQGDSLHEHIANLAGSPAIKKGILQTVKVVDELVKVMGRHKPENIVIEMARENQTTQKGQKNSRERMKRIEEGIKELGSQILKEHPVENTQLQNEKLYLYYLQNGRDMYVDQELDINRLSDYDVDHIVPQSFLKDDSIDNKVLTRSDKARGKSDNVPSEEVVKKMKNYWRQLLNAKLITQRKFDNLTKAERGGLSELDKAGFIKRQLVETRQITKHVAQILDSRMNTKYDENDKLIREVKVITLKSKLVSDFRKDFQFYKVREINNYHHAHDAYLNAVVGTALIKKYPKLESEFVYGDYKVYDVRKMIAKSEQEIGKATAKYFFYSNIMNFFKTEITLANGEIRKRPLIETNGETGEIVWDKGRDFATVRKVLSMPQVNIVKKTEVQTGGFSKESILPKRNSDKLIARKKDWDPKKYGGFDSPTVAYSVLVVAKVEKGKSKKLKSVKELLGITIMERSSFEKNPIDFLEAKGYKEVKKDLIIKLPKYSLFELENGRKRMLASAGELQKGNELALPSKYVNFLYLASHYEKLKGSPEDNEQKQLFVEQHKHYLDEIIEQISEFSKRVILADANLDKVLSAYNKHRDKPIREQAENIIHLFTLTNLGAPAAFKYFDTTIDRKRYTSTKEVLDATLIHQSITGLYETRIDLSQLGGDGGGGGGGSGSSGGAVLGLEHLPRPPQISQFPLNPERLQALQHLVRKALEAGHIEPYTGPGNNPVFPVKKANGTWRFIHDLRATNSLTIDLSSSSPGPPDLSSPPTTLAHLQTIDLRDAFFQIPLPKQFQPYFAFTVPQQCNYGPGTRYAWKVLPQGFKNSPTLFQMQLAHILQPIRQAFPQCTILQYMDDILLASPSHEDLLLLSEATMASLISHGLPVSENKTQQTPGTIKFLGQIISPNHLTYDAVPTVPIRSRWALPELQALLGEIQWVSKGTPTLRQPLHSLYCALQPHTDPRDQIYLNPSQVQSLVQLRQALSQNCRSRLVQTLPLLGAIMLTLTGTTTVVFQSKEQWPLVWLHAPLPHTSQCPWGQLLASAVLLLDKYTLQSYGLLCQTIHHNISTQTFNQFIQTSDHPSVPILLHHSHRFKNLGAQTGELWNTFLKTAAPLAPVKALMPVFTLSPVIINTAPCLFSDGSTSRAAYILWDKQILSQRSFPLPPPHKSAQRAELLGLLHGLSSARSWRCLNIFLDSKYLYHYLRTLALGTFQGRSSQAPFQALLPRLLSRKVVYLHHVRSHTNLPDPISRLNALTDALLITPVLQLAGKRTADGSEFEKRTADGSEFESPKKKAKVE

SEQ ID NO: 1486 - protein, 2013 aa, synthetic construct
  source 1..2013: note = Description of Artificial Sequence: Synthetic polypeptide
MPAAKRVKLDGGDKKYSIGLDIGTNSVGWAVITDEYKVPSKKFKVLGNTDRHSIKKNLIGALLFDSGETAEATRLKRTARRRYTRRKNRICYLQEIFSNEMAKVDDSFFHRLEESFLVEEDKKHERHPIFGNIVDEVAYHEKYPTIYHLRKKLVDSTDKADLRLIYLALAHMIKFRGHFLIEGDLNPDNSDVDKLFIQLVQTYNQLFEENPINASGVDAKAILSARLSKSRRLENLIAQLPGEKKNGLFGNLIALSLGLTPNFKSNFDLAEDAKLQLSKDTYDDDLDNLLAQIGDQYADLFLAAKNLSDAILLSDILRVNTEITKAPLSASMIKRYDEHHQDLTLLKALVRQQLPEKYKEIFFDQSKNGYAGYIDGGASQEEFYKFIKPILEKMDGTEELLVKLNREDLLRKQRTFDNGSIPHQIHLGELHAILRRQEDFYPFLKDNREKIEKILTFRIPYYVGPLARGNSRFAWMTRKSEETITPWNFEEVVDKGASAQSFIERMTNFDKNLPNEKVLPKHSLLYEYFTVYNELTKVKYVTEGMRKPAFLSGEQKKAIVDLLFKTNRKVTVKQLKEDYFKKIECFDSVEISGVEDRFNASLGTYHDLLKIIKDKDFLDNEENEDILEDIVLTLTLFEDREMIEERLKTYAHLFDDKVMKQLKRRRYTGWGRLSRKLINGIRDKQSGKTILDFLKSDGFANRNFMQLIHDDSLTFKEDIQKAQVSGQGDSLHEHIANLAGSPAIKKGILQTVKVVDELVKVMGRHKPENIVIEMARENQTTQKGQKNSRERMKRIEEGIKELGSQILKEHPVENTQLQNEKLYLYYLQNGRDMYVDQELDINRLSDYDVDHIVPQSFLKDDSIDNKVLTRSDKARGKSDNVPSEEVVKKMKNYWRQLLNAKLITQRKFDNLTKAERGGLSELDKAGFIKRQLVETRQITKHVAQILDSRMNTKYDENDKLIREVKVITLKSKLVSDFRKDFQFYKVREINNYHHAHDAYLNAVVGTALIKKYPKLESEFVYGDYKVYDVRKMIAKSEQEIGKATAKYFFYSNIMNFFKTEITLANGEIRKRPLIETNGETGEIVWDKGRDFATVRKVLSMPQVNIVKKTEVQTGGFSKESILPKRNSDKLIARKKDWDPKKYGGFDSPTVAYSVLVVAKVEKGKSKKLKSVKELLGITIMERSSFEKNPIDFLEAKGYKEVKKDLIIKLPKYSLFELENGRKRMLASAGELQKGNELALPSKYVNFLYLASHYEKLKGSPEDNEQKQLFVEQHKHYLDEIIEQISEFSKRVILADANLDKVLSAYNKHRDKPIREQAENIIHLFTLTNLGAPAAFKYFDTTIDRKRYTSTKEVLDATLIHQSITGLYETRIDLSQLGGDGGEAAAKGSSGGSGGAVLGLEHLPRPPQISQFPLNPERLQALQHLVRKALEAGHIEPYTGPGNNPVFPVKKANGTWRFIHDLRATNSLTIDLSSSSPGPPDLSSPPTTLAHLQTIDLRDAFFQIPLPKQFQPYFAFTVPQQCNYGPGTRYAWKVLPQGFKNSPTLFQMQLAHILQPIRQAFPQCTILQYMDDILLASPSHEDLLLLSEATMASLISHGLPVSENKTQQTPGTIKFLGQIISPNHLTYDAVPTVPIRSRWALPELQALLGEIQWVSKGTPTLRQPLHSLYCALQPHTDPRDQIYLNPSQVQSLVQLRQALSQNCRSRLVQTLPLLGAIMLTLTGTTTVVFQSKEQWPLVWLHAPLPHTSQCPWGQLLASAVLLLDKYTLQSYGLLCQTIHHNISTQTFNQFIQTSDHPSVPILLHHSHRFKNLGAQTGELWNTFLKTAAPLAPVKALMPVFTLSPVIINTAPCLFSDGSTSRAAYILWDKQILSQRSFPLPPPHKSAQRAELLGLLHGLSSARSWRCLNIFLDSKYLYHYLRTLALGTFQGRSSQAPFQALLPRLLSRKVVYLHHVRSHTNLPDPISRLNALTDALLITPVLQLAGKRTADGSEFEKRTADGSEFESPKKKAKVE

SEQ ID NO: 1487 - protein, 2013 aa, synthetic construct
  source 1..2013: note = Description of Artificial Sequence: Synthetic polypeptide
MPAAKRVKLDGGDKKYSIGLDIGTNSVGWAVITDEYKVPSKKFKVLGNTDRHSIKKNLIGALLFDSGETAEATRLKRTARRRYTRRKNRICYLQEIFSNEMAKVDDSFFHRLEESFLVEEDKKHERHPIFGNIVDEVAYHEKYPTIYHLRKKLVDSTDKADLRLIYLALAHMIKFRGHFLIEGDLNPDNSDVDKLFIQLVQTYNQLFEENPINASGVDAKAILSARLSKSRRLENLIAQLPGEKKNGLFGNLIALSLGLTPNFKSNFDLAEDAKLQLSKDTYDDDLDNLLAQIGDQYADLFLAAKNLSDAILLSDILRVNTEITKAPLSASMIKRYDEHHQDLTLLKALVRQQLPEKYKEIFFDQSKNGYAGYIDGGASQEEFYKFIKPILEKMDGTEELLVKLNREDLLRKQRTFDNGSIPHQIHLGELHAILRRQEDFYPFLKDNREKIEKILTFRIPYYVGPLARGNSRFAWMTRKSEETITPWNFEEVVDKGASAQSFIERMTNFDKNLPNEKVLPKHSLLYEYFTVYNELTKVKYVTEGMRKPAFLSGEQKKAIVDLLFKTNRKVTVKQLKEDYFKKIECFDSVEISGVEDRFNASLGTYHDLLKIIKDKDFLDNEENEDILEDIVLTLTLFEDREMIEERLKTYAHLFDDKVMKQLKRRRYTGWGRLSRKLINGIRDKQSGKTILDFLKSDGFANRNFMQLIHDDSLTFKEDIQKAQVSGQGDSLHEHIANLAGSPAIKKGILQTVKVVDELVKVMGRHKPENIVIEMARENQTTQKGQKNSRERMKRIEEGIKELGSQILKEHPVENTQLQNEKLYLYYLQNGRDMYVDQELDINRLSDYDVDHIVPQSFLKDDSIDNKVLTRSDKARGKSDNVPSEEVVKKMKNYWRQLLNAKLITQRKFDNLTKAERGGLSELDKAGFIKRQLVETRQITKHVAQILDSRMNTKYDENDKLIREVKVITLKSKLVSDFRKDFQFYKVREINNYHHAHDAYLNAVVGTALIKKYPKLESEFVYGDYKVYDVRKMIAKSEQEIGKATAKYFFYSNIMNFFKTEITLANGEIRKRPLIETNGETGEIVWDKGRDFATVRKVLSMPQVNIVKKTEVQTGGFSKESILPKRNSDKLIARKKDWDPKKYGGFDSPTVAYSVLVVAKVEKGKSKKLKSVKELLGITIMERSSFEKNPIDFLEAKGYKEVKKDLIIKLPKYSLFELENGRKRMLASAGELQKGNELALPSKYVNFLYLASHYEKLKGSPEDNEQKQLFVEQHKHYLDEIIEQISEFSKRVILADANLDKVLSAYNKHRDKPIREQAENIIHLFTLTNLGAPAAFKYFDTTIDRKRYTSTKEVLDATLIHQSITGLYETRIDLSQLGGDGGPAPEAAAKGGGGGAVLGLEHLPRPPQISQFPLNPERLQALQHLVRKALEAGHIEPYTGPGNNPVFPVKKANGTWRFIHDLRATNSLTIDLSSSSPGPPDLSSPPTTLAHLQTIDLRDAFFQIPLPKQFQPYFAFTVPQQCNYGPGTRYAWKVLPQGFKNSPTLFQMQLAHILQPIRQAFPQCTILQYMDDILLASPSHEDLLLLSEATMASLISHGLPVSENKTQQTPGTIKFLGQIISPNHLTYDAVPTVPIRSRWALPELQALLGEIQWVSKGTPTLRQPLHSLYCALQPHTDPRDQIYLNPSQVQSLVQLRQALSQNCRSRLVQTLPLLGAIMLTLTGTTTVVFQSKEQWPLVWLHAPLPHTSQCPWGQLLASAVLLLDKYTLQSYGLLCQTIHHNISTQTFNQFIQTSDHPSVPILLHHSHRFKNLGAQTGELWNTFLKTAAPLAPVKALMPVFTLSPVIINTAPCLFSDGSTSRAAYILWDKQILSQRSFPLPPPHKSAQRAELLGLLHGLSSARSWRCLNIFLDSKYLYHYLRTLALGTFQGRSSQAPFQALLPRLLSRKVVYLHHVRSHTNLPDPISRLNALTDALLITPVLQLAGKRTADGSEFEKRTADGSEFESPKKKAKVE

SEQ ID NO: 1488 - protein, 2017 aa, synthetic construct
  source 1..2017: note = Description of Artificial Sequence: Synthetic polypeptide
MPAAKRVKLDGGDKKYSIGLDIGTNSVGWAVITDEYKVPSKKFKVLGNTDRHSIKKNLIGALLFDSGETAEATRLKRTARRRYTRRKNRICYLQEIFSNEMAKVDDSFFHRLEESFLVEEDKKHERHPIFGNIVDEVAYHEKYPTIYHLRKKLVDSTDKADLRLIYLALAHMIKFRGHFLIEGDLNPDNSDVDKLFIQLVQTYNQLFEENPINASGVDAKAILSARLSKSRRLENLIAQLPGEKKNGLFGNLIALSLGLTPNFKSNFDLAEDAKLQLSKDTYDDDLDNLLAQIGDQYADLFLAAKNLSDAILLSDILRVNTEITKAPLSASMIKRYDEHHQDLTLLKALVRQQLPEKYKEIFFDQSKNGYAGYIDGGASQEEFYKFIKPILEKMDGTEELLVKLNREDLLRKQRTFDNGSIPHQIHLGELHAILRRQEDFYPFLKDNREKIEKILTFRIPYYVGPLARGNSRFAWMTRKSEETITPWNFEEVVDKGASAQSFIERMTNFDKNLPNEKVLPKHSLLYEYFTVYNELTKVKYVTEGMRKPAFLSGEQKKAIVDLLFKTNRKVTVKQLKEDYFKKIECFDSVEISGVEDRFNASLGTYHDLLKIIKDKDFLDNEENEDILEDIVLTLTLFEDREMIEERLKTYAHLFDDKVMKQLKRRRYTGWGRLSRKLINGIRDKQSGKTILDFLKSDGFANRNFMQLIHDDSLTFKEDIQKAQVSGQGDSLHEHIANLAGSPAIKKGILQTVKVVDELVKVMGRHKPENIVIEMARENQTTQKGQKNSRERMKRIEEGIKELGSQILKEHPVENTQLQNEKLYLYYLQNGRDMYVDQELDINRLSDYDVDHIVPQSFLKDDSIDNKVLTRSDKARGKSDNVPSEEVVKKMKNYWRQLLNAKLITQRKFDNLTKAERGGLSELDKAGFIKRQLVETRQITKHVAQILDSRMNTKYDENDKLIREVKVITLKSKLVSDFRKDFQFYKVREINNYHHAHDAYLNAVVGTALIKKYPKLESEFVYGDYKVYDVRKMIAKSEQEIGKATAKYFFYSNIMNFFKTEITLANGEIRKRPLIETNGETGEIVWDKGRDFATVRKVLSMPQVNIVKKTEVQTGGFSKESILPKRNSDKLIARKKDWDPKKYGGFDSPTVAYSVLVVAKVEKGKSKKLKSVKELLGITIMERSSFEKNPIDFLEAKGYKEVKKDLIIKLPKYSLFELENGRKRMLASAGELQKGNELALPSKYVNFLYLASHYEKLKGSPEDNEQKQLFVEQHKHYLDEIIEQISEFSKRVILADANLDKVLSAYNKHRDKPIREQAENIIHLFTLTNLGAPAAFKYFDTTIDRKRYTSTKEVLDATLIHQSITGLYETRIDLSQLGGDGGGGGGSEAAAKGGGGSGGAVLGLEHLPRPPEISQFPLNPERLQALQHLVRKALEAGHIEPYTGPGNNPVFPVKKANGTWRFIHDLRATNSLTIDLSSSSPGPPDLSSLPTTLAHLQTIDLKDAFFQIPLPKQFQPYFAFTVPQQCNYGPGTRYAWRVLPQGFKNSPTLFEMQLAHILQPIRQAFPQCTILQYMDDILLASPSHADLQLLSEATMASLISHGLPVSENKTQQTPGTIKFLGQIISPNHLTYDAVPKVPIRSRWALPELQALLGEIQWVSKGTPTLRQPLHSLYCALQRHTDPRDQIYLNPSQVQSLVQLRQALSQNCRSRLVQTLPLLGAIMLTLTGTTTVVFQSKQQWPLVWLHAPLPHTSQCPWGQLLASAVLLLDKYTLQSYGLLCQTIHHNISTQTFNQFIQTSDHPSVPILLHHSHRFKNLGAQTGELWNTFLKTTAPLAPVKALMPVFTLSPVIINTAPCLFSDGSTSQAAYILWDKHILSQRSFPLPPPHKSAQRAELLGLLHGLSSARSWRCLNIFLDSKYLYHYLRTLALGTFQGRSSQAPFQALLPRLLSRKVVYLHHVRSHTNLPDPISRLNALTDALLITPVLQLAGKRTADGSEFEKRTADGSEFESPKKKAKVE

SEQ ID NO: 1489 - protein, 2017 aa, synthetic construct
  source 1..2017: note = Description of Artificial Sequence: Synthetic polypeptide
MPAAKRVKLDGGDKKYSIGLDIGTNSVGWAVITDEYKVPSKKFKVLGNTDRHSIKKNLIGALLFDSGETAEATRLKRTARRRYTRRKNRICYLQEIFSNEMAKVDDSFFHRLEESFLVEEDKKHERHPIFGNIVDEVAYHEKYPTIYHLRKKLVDSTDKADLRLIYLALAHMIKFRGHFLIEGDLNPDNSDVDKLFIQLVQTYNQLFEENPINASGVDAKAILSARLSKSRRLENLIAQLPGEKKNGLFGNLIALSLGLTPNFKSNFDLAEDAKLQLSKDTYDDDLDNLLAQIGDQYADLFLAAKNLSDAILLSDILRVNTEITKAPLSASMIKRYDEHHQDLTLLKALVRQQLPEKYKEIFFDQSKNGYAGYIDGGASQEEFYKFIKPILEKMDGTEELLVKLNREDLLRKQRTFDNGSIPHQIHLGELHAILRRQEDFYPFLKDNREKIEKILTFRIPYYVGPLARGNSRFAWMTRKSEETITPWNFEEVVDKGASAQSFIERMTNFDKNLPNEKVLPKHSLLYEYFTVYNELTKVKYVTEGMRKPAFLSGEQKKAIVDLLFKTNRKVTVKQLKEDYFKKIECFDSVEISGVEDRFNASLGTYHDLLKIIKDKDFLDNEENEDILEDIVLTLTLFEDREMIEERLKTYAHLFDDKVMKQLKRRRYTGWGRLSRKLINGIRDKQSGKTILDFLKSDGFANRNFMQLIHDDSLTFKEDIQKAQVSGQGDSLHEHIANLAGSPAIKKGILQTVKVVDELVKVMGRHKPENIVIEMARENQTTQKGQKNSRERMKRIEEGIKELGSQILKEHPVENTQLQNEKLYLYYLQNGRDMYVDQELDINRLSDYDVDHIVPQSFLKDDSIDNKVLTRSDKARGKSDNVPSEEVVKKMKNYWRQLLNAKLITQRKFDNLTKAERGGLSELDKAGFIKRQLVETRQITKHVAQILDSRMNTKYDENDKLIREVKVITLKSKLVSDFRKDFQFYKVREINNYHHAHDAYLNAVVGTALIKKYPKLESEFVYGDYKVYDVRKMIAKSEQEIGKATAKYFFYSNIMNFFKTEITLANGEIRKRPLIETNGETGEIVWDKGRDFATVRKVLSMPQVNIVKKTEVQTGGFSKESILPKRNSDKLIARKKDWDPKKYGGFDSPTVAYSVLVVAKVEKGKSKKLKSVKELLGITIMERSSFEKNPIDFLEAKGYKEVKKDLIIKLPKYSLFELENGRKRMLASAGELQKGNELALPSKYVNFLYLASHYEKLKGSPEDNEQKQLFVEQHKHYLDEIIEQISEFSKRVILADANLDKVLSAYNKHRDKPIREQAENIIHLFTLTNLGAPAAFKYFDTTIDRKRYTSTKEVLDATLIHQSITGLYETRIDLSQLGGDGGEAAAKEAAAKEAAAKGGAVLGLEHLPRPPEISQFPLNPERLQALQHLVRKALEAGHIEPYTGPGNNPVFPVKKANGTWRFIHDLRATNSLTIDLSSSSPGPPDLSSLPTTLAHLQTIDLKDAFFQIPLPKQFQPYFAFTVPQQCNYGPGTRYAWRVLPQGFKNSPTLFEMQLAHILQPIRQAFPQCTILQYMDDILLASPSHADLQLLSEATMASLISHGLPVSENKTQQTPGTIKFLGQIISPNHLTYDAVPKVPIRSRWALPELQALLGEIQWVSKGTPTLRQPLHSLYCALQRHTDPRDQIYLNPSQVQSLVQLRQALSQNCRSRLVQTLPLLGAIMLTLTGTTTVVFQSKQQWPLVWLHAPLPHTSQCPWGQLLASAVLLLDKYTLQSYGLLCQTIHHNISTQTFNQFIQTSDHPSVPILLHHSHRFKNLGAQTGELWNTFLKTTAPLAPVKALMPVFTLSPVIINTAPCLFSDGSTSQAAYILWDKHILSQRSFPLPPPHKSAQRAELLGLLHGLSSARSWRCLNIFLDSKYLYHYLRTLALGTFQGRSSQAPFQALLPRLLSRKVVYLHHVRSHTNLPDPISRLNALTDALLITPVLQLAGKRTADGSEFEKRTADGSEFESPKKKAKVE

SEQ ID NO: 1490 - protein, 2010 aa, synthetic construct
  source 1..2010: note = Description of Artificial Sequence: Synthetic polypeptide
MPAAKRVKLDGGDKKYSIGLDIGTNSVGWAVITDEYKVPSKKFKVLGNTDRHSIKKNLIGALLFDSGETAEATRLKRTARRRYTRRKNRICYLQEIFSNEMAKVDDSFFHRLEESFLVEEDKKHERHPIFGNIVDEVAYHEKYPTIYHLRKKLVDSTDKADLRLIYLALAHMIKFRGHFLIEGDLNPDNSDVDKLFIQLVQTYNQLFEENPINASGVDAKAILSARLSKSRRLENLIAQLPGEKKNGLFGNLIALSLGLTPNFKSNFDLAEDAKLQLSKDTYDDDLDNLLAQIGDQYADLFLAAKNLSDAILLSDILRVNTEITKAPLSASMIKRYDEHHQDLTLLKALVRQQLPEKYKEIFFDQSKNGYAGYIDGGASQEEFYKFIKPILEKMDGTEELLVKLNREDLLRKQRTFDNGSIPHQIHLGELHAILRRQEDFYPFLKDNREKIEKILTFRIPYYVGPLARGNSRFAWMTRKSEETITPWNFEEVVDKGASAQSFIERMTNFDKNLPNEKVLPKHSLLYEYFTVYNELTKVKYVTEGMRKPAFLSGEQKKAIVDLLFKTNRKVTVKQLKEDYFKKIECFDSVEISGVEDRFNASLGTYHDLLKIIKDKDFLDNEENEDILEDIVLTLTLFEDREMIEERLKTYAHLFDDKVMKQLKRRRYTGWGRLSRKLINGIRDKQSGKTILDFLKSDGFANRNFMQLIHDDSLTFKEDIQKAQVSGQGDSLHEHIANLAGSPAIKKGILQTVKVVDELVKVMGRHKPENIVIEMARENQTTQKGQKNSRERMKRIEEGIKELGSQILKEHPVENTQLQNEKLYLYYLQNGRDMYVDQELDINRLSDYDVDHIVPQSFLKDDSIDNKVLTRSDKARGKSDNVPSEEVVKKMKNYWRQLLNAKLITQRKFDNLTKAERGGLSELDKAGFIKRQLVETRQITKHVAQILDSRMNTKYDENDKLIREVKVITLKSKLVSDFRKDFQFYKVREINNYHHAHDAYLNAVVGTALIKKYPKLESEFVYGDYKVYDVRKMIAKSEQEIGKATAKYFFYSNIMNFFKTEITLANGEIRKRPLIETNGETGEIVWDKGRDFATVRKVLSMPQVNIVKKTEVQTGGFSKESILPKRNSDKLIARKKDWDPKKYGGFDSPTVAYSVLVVAKVEKGKSKKLKSVKELLGITIMERSSFEKNPIDFLEAKGYKEVKKDLIIKLPKYSLFELENGRKRMLASAGELQKGNELALPSKYVNFLYLASHYEKLKGSPEDNEQKQLFVEQHKHYLDEIIEQISEFSKRVILADANLDKVLSAYNKHRDKPIREQAENIIHLFTLTNLGAPAAFKYFDTTIDRKRYTSTKEVLDATLIHQSITGLYETRIDLSQLGGDGGGGGEAAAKGGAVLGLEHLPRPPEISQFPLNPERLQALQHLVRKALEAGHIEPYTGPGNNPVFPVKKANGTWRFIHDLRATNSLTIDLSSSSPGPPDLSSLPTTLAHLQTIDLKDAFFQIPLPKQFQPYFAFTVPQQCNYGPGTRYAWRVLPQGFKNSPTLFEMQLAHILQPIRQAFPQCTILQYMDDILLASPSHADLQLLSEATMASLISHGLPVSENKTQQTPGTIKFLGQIISPNHLTYDAVPKVPIRSRWALPELQALLGEIQWVSKGTPTLRQPLHSLYCALQRHTDPRDQIYLNPSQVQSLVQLRQALSQNCRSRLVQTLPLLGAIMLTLTGTTTVVFQSKQQWPLVWLHAPLPHTSQCPWGQLLASAVLLLDKYTLQSYGLLCQTIHHNISTQTFNQFIQTSDHPSVPILLHHSHRFKNLGAQTGELWNTFLKTTAPLAPVKALMPVFTLSPVIINTAPCLFSDGSTSQAAYILWDKHILSQRSFPLPPPHKSAQRAELLGLLHGLSSARSWRCLNIFLDSKYLYHYLRTLALGTFQGRSSQAPFQALLPRLLSRKVVYLHHVRSHTNLPDPISRLNALTDALLITPVLQLAGKRTADGSEFEKRTADGSEFESPKKKAKVE

SEQ ID NO: 1491 - protein, 2027 aa, synthetic construct
  source 1..2027: note = Description of Artificial Sequence: Synthetic polypeptide
MPAAKRVKLDGGDKKYSIGLDIGTNSVGWAVITDEYKVPSKKFKVLGNTDRHSIKKNLIGALLFDSGETAEATRLKRTARRRYTRRKNRICYLQEIFSNEMAKVDDSFFHRLEESFLVEEDKKHERHPIFGNIVDEVAYHEKYPTIYHLRKKLVDSTDKADLRLIYLALAHMIKFRGHFLIEGDLNPDNSDVDKLFIQLVQTYNQLFEENPINASGVDAKAILSARLSKSRRLENLIAQLPGEKKNGLFGNLIALSLGLTPNFKSNFDLAEDAKLQLSKDTYDDDLDNLLAQIGDQYADLFLAAKNLSDAILLSDILRVNTEITKAPLSASMIKRYDEHHQDLTLLKALVRQQLPEKYKEIFFDQSKNGYAGYIDGGASQEEFYKFIKPILEKMDGTEELLVKLNREDLLRKQRTFDNGSIPHQIHLGELHAILRRQEDFYPFLKDNREKIEKILTFRIPYYVGPLARGNSRFAWMTRKSEETITPWNFEEVVDKGASAQSFIERMTNFDKNLPNEKVLPKHSLLYEYFTVYNELTKVKYVTEGMRKPAFLSGEQKKAIVDLLFKTNRKVTVKQLKEDYFKKIECFDSVEISGVEDRFNASLGTYHDLLKIIKDKDFLDNEENEDILEDIVLTLTLFEDREMIEERLKTYAHLFDDKVMKQLKRRRYTGWGRLSRKLINGIRDKQSGKTILDFLKSDGFANRNFMQLIHDDSLTFKEDIQKAQVSGQGDSLHEHIANLAGSPAIKKGILQTVKVVDELVKVMGRHKPENIVIEMARENQTTQKGQKNSRERMKRIEEGIKELGSQILKEHPVENTQLQNEKLYLYYLQNGRDMYVDQELDINRLSDYDVDHIVPQSFLKDDSIDNKVLTRSDKARGKSDNVPSEEVVKKMKNYWRQLLNAKLITQRKFDNLTKAERGGLSELDKAGFIKRQLVETRQITKHVAQILDSRMNTKYDENDKLIREVKVITLKSKLVSDFRKDFQFYKVREINNYHHAHDAYLNAVVGTALIKKYPKLESEFVYGDYKVYDVRKMIAKSEQEIGKATAKYFFYSNIMNFFKTEITLANGEIRKRPLIETNGETGEIVWDKGRDFATVRKVLSMPQVNIVKKTEVQTGGFSKESILPKRNSDKLIARKKDWDPKKYGGFDSPTVAYSVLVVAKVEKGKSKKLKSVKELLGITIMERSSFEKNPIDFLEAKGYKEVKKDLIIKLPKYSLFELENGRKRMLASAGELQKGNELALPSKYVNFLYLASHYEKLKGSPEDNEQKQLFVEQHKHYLDEIIEQISEFSKRVILADANLDKVLSAYNKHRDKPIREQAENIIHLFTLTNLGAPAAFKYFDTTIDRKRYTSTKEVLDATLIHQSITGLYETRIDLSQLGGDGGGGGGSGGGGSGGGGSGGGGSGGGGSGGAVLGLEHLPRPPEISQFPLNPERLQALQHLVRKALEAGHIEPYTGPGNNPVFPVKKANGTWRFIHDLRATNSLTIDLSSSSPGPPDLSSLPTTLAHLQTIDLKDAFFQIPLPKQFQPYFAFTVPQQCNYGPGTRYAWRVLPQGFKNSPTLFEMQLAHILQPIRQAFPQCTILQYMDDILLASPSHADLQLLSEATMASLISHGLPVSENKTQQTPGTIKFLGQIISPNHLTYDAVPKVPIRSRWALPELQALLGEIQWVSKGTPTLRQPLHSLYCALQRHTDPRDQIYLNPSQVQSLVQLRQALSQNCRSRLVQTLPLLGAIMLTLTGTTTVVFQSKQQWPLVWLHAPLPHTSQCPWGQLLASAVLLLDKYTLQSYGLLCQTIHHNISTQTFNQFIQTSDHPSVPILLHHSHRFKNLGAQTGELWNTFLKTTAPLAPVKALMPVFTLSPVIINTAPCLFSDGSTSQAAYILWDKHILSQRSFPLPPPHKSAQRAELLGLLHGLSSARSWRCLNIFLDSKYLYHYLRTLALGTFQGRSSQAPFQALLPRLLSRKVVYLHHVRSHTNLPDPISRLNALTDALLITPVLQLAGKRTADGSEFEKRTADGSEFESPKKKAKVE

SEQ ID NO: 1492 - protein, 2011 aa, synthetic construct
  source 1..2011: note = Description of Artificial Sequence: Synthetic polypeptide
MPAAKRVKLDGGDKKYSIGLDIGTNSVGWAVITDEYKVPSKKFKVLGNTDRHSIKKNLIGALLFDSGETAEATRLKRTARRRYTRRKNRICYLQEIFSNEMAKVDDSFFHRLEESFLVEEDKKHERHPIFGNIVDEVAYHEKYPTIYHLRKKLVDSTDKADLRLIYLALAHMIKFRGHFLIEGDLNPDNSDVDKLFIQLVQTYNQLFEENPINASGVDAKAILSARLSKSRRLENLIAQLPGEKKNGLFGNLIALSLGLTPNFKSNFDLAEDAKLQLSKDTYDDDLDNLLAQIGDQYADLFLAAKNLSDAILLSDILRVNTEITKAPLSASMIKRYDEHHQDLTLLKALVRQQLPEKYKEIFFDQSKNGYAGYIDGGASQEEFYKFIKPILEKMDGTEELLVKLNREDLLRKQRTFDNGSIPHQIHLGELHAILRRQEDFYPFLKDNREKIEKILTFRIPYYVGPLARGNSRFAWMTRKSEETITPWNFEEVVDKGASAQSFIERMTNFDKNLPNEKVLPKHSLLYEYFTVYNELTKVKYVTEGMRKPAFLSGEQKKAIVDLLFKTNRKVTVKQLKEDYFKKIECFDSVEISGVEDRFNASLGTYHDLLKIIKDKDFLDNEENEDILEDIVLTLTLFEDREMIEERLKTYAHLFDDKVMKQLKRRRYTGWGRLSRKLINGIRDKQSGKTILDFLKSDGFANRNFMQLIHDDSLTFKEDIQKAQVSGQGDSLHEHIANLAGSPAIKKGILQTVKVVDELVKVMGRHKPENIVIEMARENQTTQKGQKNSRERMKRIEEGIKELGSQILKEHPVENTQLQNEKLYLYYLQNGRDMYVDQELDINRLSDYDVDHIVPQSFLKDDSIDNKVLTRSDKARGKSDNVPSEEVVKKMKNYWRQLLNAKLITQRKFDNLTKAERGGLSELDKAGFIKRQLVETRQITKHVAQILDSRMNTKYDENDKLIREVKVITLKSKLVSDFRKDFQFYKVREINNYHHAHDAYLNAVVGTALIKKYPKLESEFVYGDYKVYDVRKMIAKSEQEIGKATAKYFFYSNIMNFFKTEITLANGEIRKRPLIETNGETGEIVWDKGRDFATVRKVLSMPQVNIVKKTEVQTGGFSKESILPKRNSDKLIARKKDWDPKKYGGFDSPTVAYSVLVVAKVEKGKSKKLKSVKELLGITIMERSSFEKNPIDFLEAKGYKEVKKDLIIKLPKYSLFELENGRKRMLASAGELQKGNELALPSKYVNFLYLASHYEKLKGSPEDNEQKQLFVEQHKHYLDEIIEQISEFSKRVILADANLDKVLSAYNKHRDKPIREQAENIIHLFTLTNLGAPAAFKYFDTTIDRKRYTSTKEVLDATLIHQSITGLYETRIDLSQLGGDGGGGGGGSPAPGGAVLGLEHLPRPPEISQFPLNPERLQALQHLVRKALEAGHIEPYTGPGNNPVFPVKKANGTWRFIHDLRATNSLTIDLSSSSPGPPDLSSLPTTLAHLQTIDLKDAFFQIPLPKQFQPYFAFTVPQQCNYGPGTRYAWRVLPQGFKNSPTLFQMQLAHILQPIRQAFPQCTILQYMDDILLASPSHADLQLLSEATMASLISHGLPVSENKTQQTPGTIKFLGQIISPNHLTYDAVPKVPIRSRWALPELQALLGEIQWVSKGTPTLRQPLHSLYCALQPHTDPRDQIYLNPSQVQSLVQLRQALSQNCRSRLVQTLPLLGAIMLTLTGTTTVVFQSKQQWPLVWLHAPLPHTSQCPWGQLLASAVLLLDKYTLQSYGLLCQTIHHNISTQTFNQFIQTSDHPSVPILLHHSHRFKNLGAQTGELWNTFLKTTAPLAPVKALMPVFTLSPVIINTAPCLFSDGSTSQAAYILWDKHILSQRSFPLPPPHKSAQRAELLGLLHGLSSARSWRCLNIFLDSKYLYHYLRTLALGTFQGRSSQAPFQALLPRLLSRKVVYLHHVRSHTNLPDPISRLNALTDALLITPVLQLAGKRTADGSEFEKRTADGSEFESPKKKAKVE

SEQ ID NO: 1493 - protein, 2008 aa, synthetic construct
  source 1..2008: note = Description of Artificial Sequence: Synthetic polypeptide
MPAAKRVKLDGGDKKYSIGLDIGTNSVGWAVITDEYKVPSKKFKVLGNTDRHSIKKNLIGALLFDSGETAEATRLKRTARRRYTRRKNRICYLQEIFSNEMAKVDDSFFHRLEESFLVEEDKKHERHPIFGNIVDEVAYHEKYPTIYHLRKKLVDSTDKADLRLIYLALAHMIKFRGHFLIEGDLNPDNSDVDKLFIQLVQTYNQLFEENPINASGVDAKAILSARLSKSRRLENLIAQLPGEKKNGLFGNLIALSLGLTPNFKSNFDLAEDAKLQLSKDTYDDDLDNLLAQIGDQYADLFLAAKNLSDAILLSDILRVNTEITKAPLSASMIKRYDEHHQDLTLLKALVRQQLPEKYKEIFFDQSKNGYAGYIDGGASQEEFYKFIKPILEKMDGTEELLVKLNREDLLRKQRTFDNGSIPHQIHLGELHAILRRQEDFYPFLKDNREKIEKILTFRIPYYVGPLARGNSRFAWMTRKSEETITPWNFEEVVDKGASAQSFIERMTNFDKNLPNEKVLPKHSLLYEYFTVYNELTKVKYVTEGMRKPAFLSGEQKKAIVDLLFKTNRKVTVKQLKEDYFKKIECFDSVEISGVEDRFNASLGTYHDLLKIIKDKDFLDNEENEDILEDIVLTLTLFEDREMIEERLKTYAHLFDDKVMKQLKRRRYTGWGRLSRKLINGIRDKQSGKTILDFLKSDGFANRNFMQLIHDDSLTFKEDIQKAQVSGQGDSLHEHIANLAGSPAIKKGILQTVKVVDELVKVMGRHKPENIVIEMARENQTTQKGQKNSRERMKRIEEGIKELGSQILKEHPVENTQLQNEKLYLYYLQNGRDMYVDQELDINRLSDYDVDHIVPQSFLKDDSIDNKVLTRSDKARGKSDNVPSEEVVKKMKNYWRQLLNAKLITQRKFDNLTKAERGGLSELDKAGFIKRQLVETRQITKHVAQILDSRMNTKYDENDKLIREVKVITLKSKLVSDFRKDFQFYKVREINNYHHAHDAYLNAVVGTALIKKYPKLESEFVYGDYKVYDVRKMIAKSEQEIGKATAKYFFYSNIMNFFKTEITLANGEIRKRPLIETNGETGEIVWDKGRDFATVRKVLSMPQVNIVKKTEVQTGGFSKESILPKRNSDKLIARKKDWDPKKYGGFDSPTVAYSVLVVAKVEKGKSKKLKSVKELLGITIMERSSFEKNPIDFLEAKGYKEVKKDLIIKLPKYSLFELENGRKRMLASAGELQKGNELALPSKYVNFLYLASHYEKLKGSPEDNEQKQLFVEQHKHYLDEIIEQISEFSKRVILADANLDKVLSAYNKHRDKPIREQAENIIHLFTLTNLGAPAAFKYFDTTIDRKRYTSTKEVLDATLIHQSITGLYETRIDLSQLGGDGGPAPGGSGGAVLGLEHLPRPPEISQFPLNPERLQALQHLVRKALEAGHIEPYTGPGNNPVFPVKKANGTWRFIHDLRATNSLTIDLSSSSPGPPDLSSLPTTLAHLQTIDLKDAFFQIPLPKQFQPYFAFTVPQQCNYGPGTRYAWRVLPQGFKNSPTLFQMQLAHILQPIRQAFPQCTILQYMDDILLASPSHADLQLLSEATMASLISHGLPVSENKTQQTPGTIKFLGQIISPNHLTYDAVPKVPIRSRWALPELQALLGEIQWVSKGTPTLRQPLHSLYCALQPHTDPRDQIYLNPSQVQSLVQLRQALSQNCRSRLVQTLPLLGAIMLTLTGTTTVVFQSKQQWPLVWLHAPLPHTSQCPWGQLLASAVLLLDKYTLQSYGLLCQTIHHNISTQTFNQFIQTSDHPSVPILLHHSHRFKNLGAQTGELWNTFLKTTAPLAPVKALMPVFTLSPVIINTAPCLFSDGSTSQAAYILWDKHILSQRSFPLPPPHKSAQRAELLGLLHGLSSARSWRCLNIFLDSKYLYHYLRTLALGTFQGRSSQAPFQALLPRLLSRKVVYLHHVRSHTNLPDPISRLNALTDALLITPVLQLAGKRTADGSEFEKRTADGSEFESPKKKAKVE

SEQ ID NO: 1494 - protein, 2011 aa, synthetic construct
  source 1..2011: note = Description of Artificial Sequence: Synthetic polypeptide
MPAAKRVKLDGGDKKYSIGLDIGTNSVGWAVITDEYKVPSKKFKVLGNTDRHSIKKNLIGALLFDSGETAEATRLKRTARRRYTRRKNRICYLQEIFSNEMAKVDDSFFHRLEESFLVEEDKKHERHPIFGNIVDEVAYHEKYPTIYHLRKKLVDSTDKADLRLIYLALAHMIKFRGHFLIEGDLNPDNSDVDKLFIQLVQTYNQLFEENPINASGVDAKAILSARLSKSRRLENLIAQLPGEKKNGLFGNLIALSLGLTPNFKSNFDLAEDAKLQLSKDTYDDDLDNLLAQIGDQYADLFLAAKNLSDAILLSDILRVNTEITKAPLSASMIKRYDEHHQDLTLLKALVRQQLPEKYKEIFFDQSKNGYAGYIDGGASQEEFYKFIKPILEKMDGTEELLVKLNREDLLRKQRTFDNGSIPHQIHLGELHAILRRQEDFYPFLKDNREKIEKILTFRIPYYVGPLARGNSRFAWMTRKSEETITPWNFEEVVDKGASAQSFIERMTNFDKNLPNEKVLPKHSLLYEYFTVYNELTKVKYVTEGMRKPAFLSGEQKKAIVDLLFKTNRKVTVKQLKEDYFKKIECFDSVEISGVEDRFNASLGTYHDLLKIIKDKDFLDNEENEDILEDIVLTLTLFEDREMIEERLKTYAHLFDDKVMKQLKRRRYTGWGRLSRKLINGIRDKQSGKTILDFLKSDGFANRNFMQLIHDDSLTFKEDIQKAQVSGQGDSLHEHIANLAGSPAIKKGILQTVKVVDELVKVMGRHKPENIVIEMARENQTTQKGQKNSRERMKRIEEGIKELGSQILKEHPVENTQLQNEKLYLYYLQNGRDMYVDQELDINRLSDYDVDHIVPQSFLKDDSIDNKVLTRSDKARGKSDNVPSEEVVKKMKNYWRQLLNAKLITQRKFDNLTKAERGGLSELDKAGFIKRQLVETRQITKHVAQILDSRMNTKYDENDKLIREVKVITLKSKLVSDFRKDFQFYKVREINNYHHAHDAYLNAVVGTALIKKYPKLESEFVYGDYKVYDVRKMIAKSEQEIGKATAKYFFYSNIMNFFKTEITLANGEIRKRPLIETNGETGEIVWDKGRDFATVRKVLSMPQVNIVKKTEVQTGGFSKESILPKRNSDKLIARKKDWDPKKYGGFDSPTVAYSVLVVAKVEKGKSKKLKSVKELLGITIMERSSFEKNPIDFLEAKGYKEVKKDLIIKLPKYSLFELENGRKRMLASAGELQKGNELALPSKYVNFLYLASHYEKLKGSPEDNEQKQLFVEQHKHYLDEIIEQISEFSKRVILADANLDKVLSAYNKHRDKPIREQAENIIHLFTLTNLGAPAAFKYFDTTIDRKRYTSTKEVLDATLIHQSITGLYETRIDLSQLGGDGGGGGPAPGGSGGAVLGLEHLPRPPEISQFPLNPERLQALQHLVRKALEAGHIEPYTGPGNNPVFPVKKANGTWRFIHDLRATNSLTIDLSSSSPGPPDLSSLPTTLAHLQTIDLKDAFFQIPLPKQFQPYFAFTVPQQCNYGPGTRYAWRVLPQGFKNSPTLFQMQLAHILQPIRQAFPQCTILQYMDDILLASPSHADLQLLSEATMASLISHGLPVSENKTQQTPGTIKFLGQIISPNHLTYDAVPKVPIRSRWALPELQALLGEIQWVSKGTPTLRQPLHSLYCALQPHTDPRDQIYLNPSQVQSLVQLRQALSQNCRSRLVQTLPLLGAIMLTLTGTTTVVFQSKQQWPLVWLHAPLPHTSQCPWGQLLASAVLLLDKYTLQSYGLLCQTIHHNISTQTFNQFIQTSDHPSVPILLHHSHRFKNLGAQTGELWNTFLKTTAPLAPVKALMPVFTLSPVIINTAPCLFSDGSTSQAAYILWDKHILSQRSFPLPPPHKSAQRAELLGLLHGLSSARSWRCLNIFLDSKYLYHYLRTLALGTFQGRSSQAPFQALLPRLLSRKVVYLHHVRSHTNLPDPISRLNALTDALLITPVLQLAGKRTADGSEFEKRTADGSEFESPKKKAKVE

SEQ ID NO: 1495 - protein, 2017 aa, synthetic construct
  source 1..2017: note = Description of Artificial Sequence: Synthetic polypeptide
MPAAKRVKLDGGDKKYSIGLDIGTNSVGWAVITDEYKVPSKKFKVLGNTDRHSIKKNLIGALLFDSGETAEATRLKRTARRRYTRRKNRICYLQEIFSNEMAKVDDSFFHRLEESFLVEEDKKHERHPIFGNIVDEVAYHEKYPTIYHLRKKLVDSTDKADLRLIYLALAHMIKFRGHFLIEGDLNPDNSDVDKLFIQLVQTYNQLFEENPINASGVDAKAILSARLSKSRRLENLIAQLPGEKKNGLFGNLIALSLGLTPNFKSNFDLAEDAKLQLSKDTYDDDLDNLLAQIGDQYADLFLAAKNLSDAILLSDILRVNTEITKAPLSASMIKRYDEHHQDLTLLKALVRQQLPEKYKEIFFDQSKNGYAGYIDGGASQEEFYKFIKPILEKMDGTEELLVKLNREDLLRKQRTFDNGSIPHQIHLGELHAILRRQEDFYPFLKDNREKIEKILTFRIPYYVGPLARGNSRFAWMTRKSEETITPWNFEEVVDKGASAQSFIERMTNFDKNLPNEKVLPKHSLLYEYFTVYNELTKVKYVTEGMRKPAFLSGEQKKAIVDLLFKTNRKVTVKQLKEDYFKKIECFDSVEISGVEDRFNASLGTYHDLLKIIKDKDFLDNEENEDILEDIVLTLTLFEDREMIEERLKTYAHLFDDKVMKQLKRRRYTGWGRLSRKLINGIRDKQSGKTILDFLKSDGFANRNFMQLIHDDSLTFKEDIQKAQVSGQGDSLHEHIANLAGSPAIKKGILQTVKVVDELVKVMGRHKPENIVIEMARENQTTQKGQKNSRERMKRIEEGIKELGSQILKEHPVENTQLQNEKLYLYYLQNGRDMYVDQELDINRLSDYDVDHIVPQSFLKDDSIDNKVLTRSDKARGKSDNVPSEEVVKKMKNYWRQLLNAKLITQRKFDNLTKAERGGLSELDKAGFIKRQLVETRQITKHVAQILDSRMNTKYDENDKLIREVKVITLKSKLVSDFRKDFQFYKVREINNYHHAHDAYLNAVVGTALIKKYPKLESEFVYGDYKVYDVRKMIAKSEQEIGKATAKYFFYSNIMNFFKTEITLANGEIRKRPLIETNGETGEIVWDKGRDFATVRKVLSMPQVNIVKKTEVQTGGFSKESILPKRNSDKLIARKKDWDPKKYGGFDSPTVAYSVLVVAKVEKGKSKKLKSVKELLGITIMERSSFEKNPIDFLEAKGYKEVKKDLIIKLPKYSLFELENGRKRMLASAGELQKGNELALPSKYVNFLYLASHYEKLKGSPEDNEQKQLFVEQHKHYLDEIIEQISEFSKRVILADANLDKVLSAYNKHRDKPIREQAENIIHLFTLTNLGAPAAFKYFDTTIDRKRYTSTKEVLDATLIHQSITGLYETRIDLSQLGGDGGGSSGSSGSSGSSGSSGGAVLGLEHLPRPPEISQFPLNPERLQALQHLVRKALEAGHIEPYTGPGNNPVFPVKKANGTWRFIHDLRATNSLTIDLSSSSPGPPDLSSLPTTLAHLQTIDLKDAFFQIPLPKQFQPYFAFTVPQQCNYGPGTRYAWRVLPQGFKNSPTLFQMQLAHILQPIRQAFPQCTILQYMDDILLASPSHADLQLLSEATMASLISHGLPVSENKTQQTPGTIKFLGQIISPNHLTYDAVPKVPIRSRWALPELQALLGEIQWVSKGTPTLRQPLHSLYCALQPHTDPRDQIYLNPSQVQSLVQLRQALSQNCRSRLVQTLPLLGAIMLTLTGTTTVVFQSKQQWPLVWLHAPLPHTSQCPWGQLLASAVLLLDKYTLQSYGLLCQTIHHNISTQTFNQFIQTSDHPSVPILLHHSHRFKNLGAQTGELWNTFLKTTAPLAPVKALMPVFTLSPVIINTAPCLFSDGSTSQAAYILWDKHILSQRSFPLPPPHKSAQRAELLGLLHGLSSARSWRCLNIFLDSKYLYHYLRTLALGTFQGRSSQAPFQALLPRLLSRKVVYLHHVRSHTNLPDPISRLNALTDALLITPVLQLAGKRTADGSEFEKRTADGSEFESPKKKAKVE

SEQ ID NO: 1496 - protein, 2002 aa, synthetic construct
  source 1..2002: note = Description of Artificial Sequence: Synthetic polypeptide
MPAAKRVKLDGGDKKYSIGLDIGTNSVGWAVITDEYKVPSKKFKVLGNTDRHSIKKNLIGALLFDSGETAEATRLKRTARRRYTRRKNRICYLQEIFSNEMAKVDDSFFHRLEESFLVEEDKKHERHPIFGNIVDEVAYHEKYPTIYHLRKKLVDSTDKADLRLIYLALAHMIKFRGHFLIEGDLNPDNSDVDKLFIQLVQTYNQLFEENPINASGVDAKAILSARLSKSRRLENLIAQLPGEKKNGLFGNLIALSLGLTPNFKSNFDLAEDAKLQLSKDTYDDDLDNLLAQIGDQYADLFLAAKNLSDAILLSDILRVNTEITKAPLSASMIKRYDEHHQDLTLLKALVRQQLPEKYKEIFFDQSKNGYAGYIDGGASQEEFYKFIKPILEKMDGTEELLVKLNREDLLRKQRTFDNGSIPHQIHLGELHAILRRQEDFYPFLKDNREKIEKILTFRIPYYVGPLARGNSRFAWMTRKSEETITPWNFEEVVDKGASAQSFIERMTNFDKNLPNEKVLPKHSLLYEYFTVYNELTKVKYVTEGMRKPAFLSGEQKKAIVDLLFKTNRKVTVKQLKEDYFKKIECFDSVEISGVEDRFNASLGTYHDLLKIIKDKDFLDNEENEDILEDIVLTLTLFEDREMIEERLKTYAHLFDDKVMKQLKRRRYTGWGRLSRKLINGIRDKQSGKTILDFLKSDGFANRNFMQLIHDDSLTFKEDIQKAQVSGQGDSLHEHIANLAGSPAIKKGILQTVKVVDELVKVMGRHKPENIVIEMARENQTTQKGQKNSRERMKRIEEGIKELGSQILKEHPVENTQLQNEKLYLYYLQNGRDMYVDQELDINRLSDYDVDHIVPQSFLKDDSIDNKVLTRSDKARGKSDNVPSEEVVKKMKNYWRQLLNAKLITQRKFDNLTKAERGGLSELDKAGFIKRQLVETRQITKHVAQILDSRMNTKYDENDKLIREVKVITLKSKLVSDFRKDFQFYKVREINNYHHAHDAYLNAVVGTALIKKYPKLESEFVYGDYKVYDVRKMIAKSEQEIGKATAKYFFYSNIMNFFKTEITLANGEIRKRPLIETNGETGEIVWDKGRDFATVRKVLSMPQVNIVKKTEVQTGGFSKESILPKRNSDKLIARKKDWDPKKYGGFDSPTVAYSVLVVAKVEKGKSKKLKSVKELLGITIMERSSFEKNPIDFLEAKGYKEVKKDLIIKLPKYSLFELENGRKRMLASAGELQKGNELALPSKYVNFLYLASHYEKLKGSPEDNEQKQLFVEQHKHYLDEIIEQISEFSKRVILADANLDKVLSAYNKHRDKPIREQAENIIHLFTLTNLGAPAAFKYFDTTIDRKRYTSTKEVLDATLIHQSITGLYETRIDLSQLGGDGGEAAAKGGGLEHLPRPPEISQFPLNPERLQALQHLVRKALEAGHIEPYTGPGNNPVFPVKKANGTWRFIHDLRATNSLTVDLSSSSPGPPDLSSLPTTLAHLQTIDLKDAFFQIPLPKQFQPYFAFTVPQQCNYGPGTRYAWKVLPQGFKNSPTLFEMQLASILQPIRQAFPQCVILQYMDDILLASPSPEDLQQLSEATMASLISHGLPVSQDKTQQTPGTIKFLGQIISPNHITYDAVPTVPIRSRWALPELQALLGEIQWVSKGTPTLRQPLHSLYCALQGHTDPRDQIYLNPSQVQSLMQLQQALSQNCRSRLAQTLPLLGAIMLTLTGTTTVVFQSKQQWPLVWLHAPLPHTSQCPWGQLLASAVLLLDKYTLQSYGLLCQTIHHNISIQTFNQFIQTSDHPSVPILLHHSHRFKNLGAQTGELWNTFLKTAAPLAPVKALTPVFTLSPIIINTAPCLFSDGSTSQAAYILWDKHILSQRSFPLPPPHKSAQQAELLGLLHGLSSARSWHCLNIFLDSKYLYHYLRTLALGTFQGKSSQAPFQALLPRLLAHKVIYLHHVRSHTNLPDPISKLNALTDALLITPILAGKRTADGSEFEKRTADGSEFESPKKKAKVE

SEQ ID NO: 1497 - protein, 2015 aa, synthetic construct
  source 1..2015: note = Description of Artificial Sequence: Synthetic polypeptide
MPAAKRVKLDGGDKKYSIGLDIGTNSVGWAVITDEYKVPSKKFKVLGNTDRHSIKKNLIGALLFDSGETAEATRLKRTARRRYTRRKNRICYLQEIFSNEMAKVDDSFFHRLEESFLVEEDKKHERHPIFGNIVDEVAYHEKYPTIYHLRKKLVDSTDKADLRLIYLALAHMIKFRGHFLIEGDLNPDNSDVDKLFIQLVQTYNQLFEENPINASGVDAKAILSARLSKSRRLENLIAQLPGEKKNGLFGNLIALSLGLTPNFKSNFDLAEDAKLQLSKDTYDDDLDNLLAQIGDQYADLFLAAKNLSDAILLSDILRVNTEITKAPLSASMIKRYDEHHQDLTLLKALVRQQLPEKYKEIFFDQSKNGYAGYIDGGASQEEFYKFIKPILEKMDGTEELLVKLNREDLLRKQRTFDNGSIPHQIHLGELHAILRRQEDFYPFLKDNREKIEKILTFRIPYYVGPLARGNSRFAWMTRKSEETITPWNFEEVVDKGASAQSFIERMTNFDKNLPNEKVLPKHSLLYEYFTVYNELTKVKYVTEGMRKPAFLSGEQKKAIVDLLFKTNRKVTVKQLKEDYFKKIECFDSVEISGVEDRFNASLGTYHDLLKIIKDKDFLDNEENEDILEDIVLTLTLFEDREMIEERLKTYAHLFDDKVMKQLKRRRYTGWGRLSRKLINGIRDKQSGKTILDFLKSDGFANRNFMQLIHDDSLTFKEDIQKAQVSGQGDSLHEHIANLAGSPAIKKGILQTVKVVDELVKVMGRHKPENIVIEMARENQTTQKGQKNSRERMKRIEEGIKELGSQILKEHPVENTQLQNEKLYLYYLQNGRDMYVDQELDINRLSDYDVDHIVPQSFLKDDSIDNKVLTRSDKARGKSDNVPSEEVVKKMKNYWRQLLNAKLITQRKFDNLTKAERGGLSELDKAGFIKRQLVETRQITKHVAQILDSRMNTKYDENDKLIREVKVITLKSKLVSDFRKDFQFYKVREINNYHHAHDAYLNAVVGTALIKKYPKLESEFVYGDYKVYDVRKMIAKSEQEIGKATAKYFFYSNIMNFFKTEITLANGEIRKRPLIETNGETGEIVWDKGRDFATVRKVLSMPQVNIVKKTEVQTGGFSKESILPKRNSDKLIARKKDWDPKKYGGFDSPTVAYSVLVVAKVEKGKSKKLKSVKELLGITIMERSSFEKNPIDFLEAKGYKEVKKDLIIKLPKYSLFELENGRKRMLASAGELQKGNELALPSKYVNFLYLASHYEKLKGSPEDNEQKQLFVEQHKHYLDEIIEQISEFSKRVILADANLDKVLSAYNKHRDKPIREQAENIIHLFTLTNLGAPAAFKYFDTTIDRKRYTSTKEVLDATLIHQSITGLYETRIDLSQLGGDGGGSSGSSGSSGSSGSSGSSGGGLEHLPRPPEISQFPLNPERLQALQHLVRKALEAGHIEPYTGPGNNPVFPVKKANGTWRFIHDLRATNSLTVDLSSSSPGPPDLSSLPTTLAHLQTIDLKDAFFQIPLPKQFQPYFAFTVPQQCNYGPGTRYAWKVLPQGFKNSPTLFEMQLASILQPIRQAFPQCVILQYMDDILLASPSPEDLQQLSEATMASLISHGLPVSQDKTQQTPGTIKFLGQIISPNHITYDAVPTVPIRSRWALPELQALLGEIQWVSKGTPTLRQPLHSLYCALQGHTDPRDQIYLNPSQVQSLMQLQQALSQNCRSRLAQTLPLLGAIMLTLTGTTTVVFQSKQQWPLVWLHAPLPHTSQCPWGQLLASAVLLLDKYTLQSYGLLCQTIHHNISIQTFNQFIQTSDHPSVPILLHHSHRFKNLGAQTGELWNTFLKTAAPLAPVKALTPVFTLSPIIINTAPCLFSDGSTSQAAYILWDKHILSQRSFPLPPPHKSAQQAELLGLLHGLSSARSWHCLNIFLDSKYLYHYLRTLALGTFQGKSSQAPFQALLPRLLAHKVIYLHHVRSHTNLPDPISKLNALTDALLITPILAGKRTADGSEFEKRTADGSEFESPKKKAKVE

SEQ ID NO: 1498 - protein, 2008 aa, synthetic construct
  source 1..2008: note = Description of Artificial Sequence: Synthetic polypeptide
MPAAKRVKLDGGDKKYSIGLDIGTNSVGWAVITDEYKVPSKKFKVLGNTDRHSIKKNLIGALLFDSGETAEATRLKRTARRRYTRRKNRICYLQEIFSNEMAKVDDSFFHRLEESFLVEEDKKHERHPIFGNIVDEVAYHEKYPTIYHLRKKLVDSTDKADLRLIYLALAHMIKFRGHFLIEGDLNPDNSDVDKLFIQLVQTYNQLFEENPINASGVDAKAILSARLSKSRRLENLIAQLPGEKKNGLFGNLIALSLGLTPNFKSNFDLAEDAKLQLSKDTYDDDLDNLLAQIGDQYADLFLAAKNLSDAILLSDILRVNTEITKAPLSASMIKRYDEHHQDLTLLKALVRQQLPEKYKEIFFDQSKNGYAGYIDGGASQEEFYKFIKPILEKMDGTEELLVKLNREDLLRKQRTFDNGSIPHQIHLGELHAILRRQEDFYPFLKDNREKIEKILTFRIPYYVGPLARGNSRFAWMTRKSEETITPWNFEEVVDKGASAQSFIERMTNFDKNLPNEKVLPKHSLLYEYFTVYNELTKVKYVTEGMRKPAFLSGEQKKAIVDLLFKTNRKVTVKQLKEDYFKKIECFDSVEISGVEDRFNASLGTYHDLLKIIKDKDFLDNEENEDILEDIVLTLTLFEDREMIEERLKTYAHLFDDKVMKQLKRRRYTGWGRLSRKLINGIRDKQSGKTILDFLKSDGFANRNFMQLIHDDSLTFKEDIQKAQVSGQGDSLHEHIANLAGSPAIKKGILQTVKVVDELVKVMGRHKPENIVIEMARENQTTQKGQKNSRERMKRIEEGIKELGSQILKEHPVENTQLQNEKLYLYYLQNGRDMYVDQELDINRLSDYDVDHIVPQSFLKDDSIDNKVLTRSDKARGKSDNVPSEEVVKKMKNYWRQLLNAKLITQRKFDNLTKAERGGLSELDKAGFIKRQLVETRQITKHVAQILDSRMNTKYDENDKLIREVKVITLKSKLVSDFRKDFQFYKVREINNYHHAHDAYLNAVVGTALIKKYPKLESEFVYGDYKVYDVRKMIAKSEQEIGKATAKYFFYSNIMNFFKTEITLANGEIRKRPLIETNGETGEIVWDKGRDFATVRKVLSMPQVNIVKKTEVQTGGFSKESILPKRNSDKLIARKKDWDPKKYGGFDSPTVAYSVLVVAKVEKGKSKKLKSVKELLGITIMERSSFEKNPIDFLEAKGYKEVKKDLIIKLPKYSLFELENGRKRMLASAGELQKGNELALPSKYVNFLYLASHYEKLKGSPEDNEQKQLFVEQHKHYLDEIIEQISEFSKRVILADANLDKVLSAYNKHRDKPIREQAENIIHLFTLTNLGAPAAFKYFDTTIDRKRYTSTKEVLDATLIHQSITGLYETRIDLSQLGGDGGEAAAKGGGGGSGGGLEHLPRPPEISQFPLNPERLQALQHLVRKALEAGHIEPYTGPGNNPVFPVKKANGTWRFIHDLRATNSLTVDLSSSSPGPPDLSSLPTTLAHLQTIDLKDAFFQIPLPKQFQPYFAFTVPQQCNYGPGTRYAWKVLPQGFKNSPTLFEMQLASILQPIRQAFPQCVILQYMDDILLASPSPEDLQQLSEATMASLISHGLPVSQDKTQQTPGTIKFLGQIISPNHITYDAVPTVPIRSRWALPELQALLGEIQWVSKGTPTLRQPLHSLYCALQGHTDPRDQIYLNPSQVQSLMQLQQALSQNCRSRLAQTLPLLGAIMLTLTGTTTVVFQSKQQWPLVWLHAPLPHTSQCPWGQLLASAVLLLDKYTLQSYGLLCQTIHHNISIQTFNQFIQTSDHPSVPILLHHSHRFKNLGAQTGELWNTFLKTAAPLAPVKALTPVFTLSPIIINTAPCLFSDGSTSQAAYILWDKHILSQRSFPLPPPHKSAQQAELLGLLHGLSSARSWHCLNIFLDSKYLYHYLRTLALGTFQGKSSQAPFQALLPRLLAHKVIYLHHVRSHTNLPDPISKLNALTDALLITPILAGKRTADGSEFEKRTADGSEFESPKKKAKVE

SEQ ID NO: 1499 - protein, 2008 aa, synthetic construct
  source 1..2008: note = Description of Artificial Sequence: Synthetic polypeptide
MPAAKRVKLDGGDKKYSIGLDIGTNSVGWAVITDEYKVPSKKFKVLGNTDRHSIKKNLIGALLFDSGETAEATRLKRTARRRYTRRKNRICYLQEIFSNEMAKVDDSFFHRLEESFLVEEDKKHERHPIFGNIVDEVAYHEKYPTIYHLRKKLVDSTDKADLRLIYLALAHMIKFRGHFLIEGDLNPDNSDVDKLFIQLVQTYNQLFEENPINASGVDAKAILSARLSKSRRLENLIAQLPGEKKNGLFGNLIALSLGLTPNFKSNFDLAEDAKLQLSKDTYDDDLDNLLAQIGDQYADLFLAAKNLSDAILLSDILRVNTEITKAPLSASMIKRYDEHHQDLTLLKALVRQQLPEKYKEIFFDQSKNGYAGYIDGGASQEEFYKFIKPILEKMDGTEELLVKLNREDLLRKQRTFDNGSIPHQIHLGELHAILRRQEDFYPFLKDNREKIEKILTFRIPYYVGPLARGNSRFAWMTRKSEETITPWNFEEVVDKGASAQSFIERMTNFDKNLPNEKVLPKHSLLYEYFTVYNELTKVKYVTEGMRKPAFLSGEQKKAIVDLLFKTNRKVTVKQLKEDYFKKIECFDSVEISGVEDRFNASLGTYHDLLKIIKDKDFLDNEENEDILEDIVLTLTLFEDREMIEERLKTYAHLFDDKVMKQLKRRRYTGWGRLSRKLINGIRDKQSGKTILDFLKSDGFANRNFMQLIHDDSLTFKEDIQKAQVSGQGDSLHEHIANLAGSPAIKKGILQTVKVVDELVKVMGRHKPENIVIEMARENQTTQKGQKNSRERMKRIEEGIKELGSQILKEHPVENTQLQNEKLYLYYLQNGRDMYVDQELDINRLSDYDVDHIVPQSFLKDDSIDNKVLTRSDKARGKSDNVPSEEVVKKMKNYWRQLLNAKLITQRKFDNLTKAERGGLSELDKAGFIKRQLVETRQITKHVAQILDSRMNTKYDENDKLIREVKVITLKSKLVSDFRKDFQFYKVREINNYHHAHDAYLNAVVGTALIKKYPKLESEFVYGDYKVYDVRKMIAKSEQEIGKATAKYFFYSNIMNFFKTEITLANGEIRKRPLIETNGETGEIVWDKGRDFATVRKVLSMPQVNIVKKTEVQTGGFSKESILPKRNSDKLIARKKDWDPKKYGGFDSPTVAYSVLVVAKVEKGKSKKLKSVKELLGITIMERSSFEKNPIDFLEAKGYKEVKKDLIIKLPKYSLFELENGRKRMLASAGELQKGNELALPSKYVNFLYLASHYEKLKGSPEDNEQKQLFVEQHKHYLDEIIEQISEFSKRVILADANLDKVLSAYNKHRDKPIREQAENIIHLFTLTNLGAPAAFKYFDTTIDRKRYTSTKEVLDATLIHQSITGLYETRIDLSQLGGDGGEAAAKGGSGGGGGGLEHLPRPPEISQFPLNPERLQALQHLVRKALEAGHIEPYTGPGNNPVFPVKKANGTWRFIHDLRATNSLTVDLSSSSPGPPDLSSLPTTLAHLQTIDLKDAFFQIPLPKQFQPYFAFTVPQQCNYGPGTRYAWKVLPQGFKNSPTLFEMQLASILQPIRQAFPQCVILQYMDDILLASPSPEDLQQLSEATMASLISHGLPVSQDKTQQTPGTIKFLGQIISPNHITYDAVPTVPIRSRWALPELQALLGEIQWVSKGTPTLRQPLHSLYCALQGHTDPRDQIYLNPSQVQSLMQLQQALSQNCRSRLAQTLPLLGAIMLTLTGTTTVVFQSKQQWPLVWLHAPLPHTSQCPWGQLLASAVLLLDKYTLQSYGLLCQTIHHNISIQTFNQFIQTSDHPSVPILLHHSHRFKNLGAQTGELWNTFLKTAAPLAPVKALTPVFTLSPIIINTAPCLFSDGSTSQAAYILWDKHILSQRSFPLPPPHKSAQQAELLGLLHGLSSARSWHCLNIFLDSKYLYHYLRTLALGTFQGKSSQAPFQALLPRLLAHKVIYLHHVRSHTNLPDPISKLNALTDALLITPILAGKRTADGSEFEKRTADGSEFESPKKKAKVE

SEQ ID NO: 1500 - protein, 2008 aa, synthetic construct
  source 1..2008: note = Description of Artificial Sequence: Synthetic polypeptide
MPAAKRVKLDGGDKKYSIGLDIGTNSVGWAVITDEYKVPSKKFKVLGNTDRHSIKKNLIGALLFDSGETAEATRLKRTARRRYTRRKNRICYLQEIFSNEMAKVDDSFFHRLEESFLVEEDKKHERHPIFGNIVDEVAYHEKYPTIYHLRKKLVDSTDKADLRLIYLALAHMIKFRGHFLIEGDLNPDNSDVDKLFIQLVQTYNQLFEENPINASGVDAKAILSARLSKSRRLENLIAQLPGEKKNGLFGNLIALSLGLTPNFKSNFDLAEDAKLQLSKDTYDDDLDNLLAQIGDQYADLFLAAKNLSDAILLSDILRVNTEITKAPLSASMIKRYDEHHQDLTLLKALVRQQLPEKYKEIFFDQSKNGYAGYIDGGASQEEFYKFIKPILEKMDGTEELLVKLNREDLLRKQRTFDNGSIPHQIHLGELHAILRRQEDFYPFLKDNREKIEKILTFRIPYYVGPLARGNSRFAWMTRKSEETITPWNFEEVVDKGASAQSFIERMTNFDKNLPNEKVLPKHSLLYEYFTVYNELTKVKYVTEGMRKPAFLSGEQKKAIVDLLFKTNRKVTVKQLKEDYFKKIECFDSVEISGVEDRFNASLGTYHDLLKIIKDKDFLDNEENEDILEDIVLTLTLFEDREMIEERLKTYAHLFDDKVMKQLKRRRYTGWGRLSRKLINGIRDKQSGKTILDFLKSDGFANRNFMQLIHDDSLTFKEDIQKAQVSGQGDSLHEHIANLAGSPAIKKGILQTVKVVDELVKVMGRHKPENIVIEMARENQTTQKGQKNSRERMKRIEEGIKELGSQILKEHPVENTQLQNEKLYLYYLQNGRDMYVDQELDINRLSDYDVDHIVPQSFLKDDSIDNKVLTRSDKARGKSDNVPSEEVVKKMKNYWRQLLNAKLITQRKFDNLTKAERGGLSELDKAGFIKRQLVETRQITKHVAQILDSRMNTKYDENDKLIREVKVITLKSKLVSDFRKDFQFYKVREINNYHHAHDAYLNAVVGTALIKKYPKLESEFVYGDYKVYDVRKMIAKSEQEIGKATAKYFFYSNIMNFFKTEITLANGEIRKRPLIETNGETGEIVWDKGRDFATVRKVLSMPQVNIVKKTEVQTGGFSKESILPKRNSDKLIARKKDWDPKKYGGFDSPTVAYSVLVVAKVEKGKSKKLKSVKELLGITIMERSSFEKNPIDFLEAKGYKEVKKDLIIKLPKYSLFELENGRKRMLASAGELQKGNELALPSKYVNFLYLASHYEKLKGSPEDNEQKQLFVEQHKHYLDEIIEQISEFSKRVILADANLDKVLSAYNKHRDKPIREQAENIIHLFTLTNLGAPAAFKYFDTTIDRKRYTSTKEVLDATLIHQSITGLYETRIDLSQLGGDGGPAPAPAPAPAPGGGLEHLPRPPEISQFPLNPERLQALQHLVRKALEAGHIEPYTGPGNNPVFPVKKANGTWRFIHDLRATNSLTVDLSSSSPGPPDLSSLPTTLAHLQTIDLKDAFFQIPLPKQFQPYFAFTVPQQCNYGPGTRYAWKVLPQGFKNSPTLFQMQLASILQPIRQAFPQCVILQYMDDILLASPSPEDLQQLSEATMASLISHGLPVSQDKTQQTPGTIKFLGQIISPNHITYDAVPTVPIRSRWALPELQALLGEIQWVSKGTPTLRQPLHSLYCALQGHTDPRDQIYLNPSQVQSLMQLQQALSQNCRSRLAQTLPLLGAIMLTLTGTTTVVFQSKQQWPLVWLHAPLPHTSQCPWGQLLASAVLLLDKYTLQSYGLLCQTIHHNISIQTFNQFIQTSDHPSVPILLHHSHRFKNLGAQTGELWNTFLKTAAPLAPVKALTPVFTLSPIIINTAPCLFSDGSTSQAAYILWDKHILSQRSFPLPPPHKSAQQAELLGLLHGLSSARSWHCLNIFLDSKYLYHYLRTLAWGTFQGKSSQAPFQALLPRLLAHKVIYLHHVRSHTNLPDPISKLNALTDALLITPILAGKRTADGSEFEKRTADGSEFESPKKKAKVE

SEQ ID NO: 1501 - protein, 2006 aa, synthetic construct
  source 1..2006: note = Description of Artificial Sequence: Synthetic polypeptide
MPAAKRVKLDGGDKKYSIGLDIGTNSVGWAVITDEYKVPSKKFKVLGNTDRHSIKKNLIGALLFDSGETAEATRLKRTARRRYTRRKNRICYLQEIFSNEMAKVDDSFFHRLEESFLVEEDKKHERHPIFGNIVDEVAYHEKYPTIYHLRKKLVDSTDKADLRLIYLALAHMIKFRGHFLIEGDLNPDNSDVDKLFIQLVQTYNQLFEENPINASGVDAKAILSARLSKSRRLENLIAQLPGEKKNGLFGNLIALSLGLTPNFKSNFDLAEDAKLQLSKDTYDDDLDNLLAQIGDQYADLFLAAKNLSDAILLSDILRVNTEITKAPLSASMIKRYDEHHQDLTLLKALVRQQLPEKYKEIFFDQSKNGYAGYIDGGASQEEFYKFIKPILEKMDGTEELLVKLNREDLLRKQRTFDNGSIPHQIHLGELHAILRRQEDFYPFLKDNREKIEKILTFRIPYYVGPLARGNSRFAWMTRKSEETITPWNFEEVVDKGASAQSFIERMTNFDKNLPNEKVLPKHSLLYEYFTVYNELTKVKYVTEGMRKPAFLSGEQKKAIVDLLFKTNRKVTVKQLKEDYFKKIECFDSVEISGVEDRFNASLGTYHDLLKIIKDKDFLDNEENEDILEDIVLTLTLFEDREMIEERLKTYAHLFDDKVMKQLKRRRYTGWGRLSRKLINGIRDKQSGKTILDFLKSDGFANRNFMQLIHDDSLTFKEDIQKAQVSGQGDSLHEHIANLAGSPAIKKGILQTVKVVDELVKVMGRHKPENIVIEMARENQTTQKGQKNSRERMKRIEEGIKELGSQILKEHPVENTQLQNEKLYLYYLQNGRDMYVDQELDINRLSDYDVDHIVPQSFLKDDSIDNKVLTRSDKARGKSDNVPSEEVVKKMKNYWRQLLNAKLITQRKFDNLTKAERGGLSELDKAGFIKRQLVETRQITKHVAQILDSRMNTKYDENDKLIREVKVITLKSKLVSDFRKDFQFYKVREINNYHHAHDAYLNAVVGTALIKKYPKLESEFVYGDYKVYDVRKMIAKSEQEIGKATAKYFFYSNIMNFFKTEITLANGEIRKRPLIETNGETGEIVWDKGRDFATVRKVLSMPQVNIVKKTEVQTGGFSKESILPKRNSDKLIARKKDWDPKKYGGFDSPTVAYSVLVVAKVEKGKSKKLKSVKELLGITIMERSSFEKNPIDFLEAKGYKEVKKDLIIKLPKYSLFELENGRKRMLASAGELQKGNELALPSKYVNFLYLASHYEKLKGSPEDNEQKQLFVEQHKHYLDEIIEQISEFSKRVILADANLDKVLSAYNKHRDKPIREQAENIIHLFTLTNLGAPAAFKYFDTTIDRKRYTSTKEVLDATLIHQSITGLYETRIDLSQLGGDGGGGGGGSPAPGGGLEHLPRPPEISQFPLNPERLQALQHLVRKALEAGHIEPYTGPGNNPVFPVKKANGTWRFIHDLRATNSLTVDLSSSSPGPPDLSSLPTTLAHLQTIDLKDAFFQIPLPKQFQPYFAFTVPQQCNYGPGTRYAWKVLPQGFKNSPTLFQMQLASILQPIRQAFPQCVILQYMDDILLASPSPEDLQQLSEATMASLISHGLPVSQDKTQQTPGTIKFLGQIISPNHITYDAVPTVPIRSRWALPELQALLGEIQWVSKGTPTLRQPLHSLYCALQGHTDPRDQIYLNPSQVQSLMQLQQALSQNCRSRLAQTLPLLGAIMLTLTGTTTVVFQSKQQWPLVWLHAPLPHTSQCPWGQLLASAVLLLDKYTLQSYGLLCQTIHHNISIQTFNQFIQTSDHPSVPILLHHSHRFKNLGAQTGELWNTFLKTAAPLAPVKALTPVFTLSPIIINTAPCLFSDGSTSQAAYILWDKHILSQRSFPLPPPHKSAQQAELLGLLHGLSSARSWHCLNIFLDSKYLYHYLRTLAWGTFQGKSSQAPFQALLPRLLAHKVIYLHHVRSHTNLPDPISKLNALTDALLITPILAGKRTADGSEFEKRTADGSEFESPKKKAKVE

SEQ ID NO: 1502 - protein, 2012 aa, synthetic construct
  source 1..2012: note = Description of Artificial Sequence: Synthetic polypeptide
MPAAKRVKLDGGDKKYSIGLDIGTNSVGWAVITDEYKVPSKKFKVLGNTDRHSIKKNLIGALLFDSGETAEATRLKRTARRRYTRRKNRICYLQEIFSNEMAKVDDSFFHRLEESFLVEEDKKHERHPIFGNIVDEVAYHEKYPTIYHLRKKLVDSTDKADLRLIYLALAHMIKFRGHFLIEGDLNPDNSDVDKLFIQLVQTYNQLFEENPINASGVDAKAILSARLSKSRRLENLIAQLPGEKKNGLFGNLIALSLGLTPNFKSNFDLAEDAKLQLSKDTYDDDLDNLLAQIGDQYADLFLAAKNLSDAILLSDILRVNTEITKAPLSASMIKRYDEHHQDLTLLKALVRQQLPEKYKEIFFDQSKNGYAGYIDGGASQEEFYKFIKPILEKMDGTEELLVKLNREDLLRKQRTFDNGSIPHQIHLGELHAILRRQEDFYPFLKDNREKIEKILTFRIPYYVGPLARGNSRFAWMTRKSEETITPWNFEEVVDKGASAQSFIERMTNFDKNLPNEKVLPKHSLLYEYFTVYNELTKVKYVTEGMRKPAFLSGEQKKAIVDLLFKTNRKVTVKQLKEDYFKKIECFDSVEISGVEDRFNASLGTYHDLLKIIKDKDFLDNEENEDILEDIVLTLTLFEDREMIEERLKTYAHLFDDKVMKQLKRRRYTGWGRLSRKLINGIRDKQSGKTILDFLKSDGFANRNFMQLIHDDSLTFKEDIQKAQVSGQGDSLHEHIANLAGSPAIKKGILQTVKVVDELVKVMGRHKPENIVIEMARENQTTQKGQKNSRERMKRIEEGIKELGSQILKEHPVENTQLQNEKLYLYYLQNGRDMYVDQELDINRLSDYDVDHIVPQSFLKDDSIDNKVLTRSDKARGKSDNVPSEEVVKKMKNYWRQLLNAKLITQRKFDNLTKAERGGLSELDKAGFIKRQLVETRQITKHVAQILDSRMNTKYDENDKLIREVKVITLKSKLVSDFRKDFQFYKVREINNYHHAHDAYLNAVVGTALIKKYPKLESEFVYGDYKVYDVRKMIAKSEQEIGKATAKYFFYSNIMNFFKTEITLANGEIRKRPLIETNGETGEIVWDKGRDFATVRKVLSMPQVNIVKKTEVQTGGFSKESILPKRNSDKLIARKKDWDPKKYGGFDSPTVAYSVLVVAKVEKGKSKKLKSVKELLGITIMERSSFEKNPIDFLEAKGYKEVKKDLIIKLPKYSLFELENGRKRMLASAGELQKGNELALPSKYVNFLYLASHYEKLKGSPEDNEQKQLFVEQHKHYLDEIIEQISEFSKRVILADANLDKVLSAYNKHRDKPIREQAENIIHLFTLTNLGAPAAFKYFDTTIDRKRYTSTKEVLDATLIHQSITGLYETRIDLSQLGGDGGGGSGGSGGSGGSGGSGGGLEHLPRPPEISQFPLNPERLQALQHLVRKALEAGHIEPYTGPGNNPVFPVKKANGTWRFIHDLRATNSLTVDLSSSSPGPPDLSSLPTTLAHLQTIDLKDAFFQIPLPKQFQPYFAFTVPQQCNYGPGTRYAWKVLPQGFKNSPTLFQMQLASILQPIRQAFPQCVILQYMDDILLASPSPEDLQQLSEATMASLISHGLPVSQDKTQQTPGTIKFLGQIISPNHITYDAVPTVPIRSRWALPELQALLGEIQWVSKGTPTLRQPLHSLYCALQGHTDPRDQIYLNPSQVQSLMQLQQALSQNCRSRLAQTLPLLGAIMLTLTGTTTVVFQSKQQWPLVWLHAPLPHTSQCPWGQLLASAVLLLDKYTLQSYGLLCQTIHHNISIQTFNQFIQTSDHPSVPILLHHSHRFKNLGAQTGELWNTFLKTAAPLAPVKALTPVFTLSPIIINTAPCLFSDGSTSQAAYILWDKHILSQRSFPLPPPHKSAQQAELLGLLHGLSSARSWHCLNIFLDSKYLYHYLRTLAWGTFQGKSSQAPFQALLPRLLAHKVIYLHHVRSHTNLPDPISKLNALTDALLITPILAGKRTADGSEFEKRTADGSEFESPKKKAKVE

SEQ ID NO: 1503 - protein, 2015 aa, synthetic construct
  source 1..2015: note = Description of Artificial Sequence: Synthetic polypeptide
MPAAKRVKLDGGDKKYSIGLDIGTNSVGWAVITDEYKVPSKKFKVLGNTDRHSIKKNLIGALLFDSGETAEATRLKRTARRRYTRRKNRICYLQEIFSNEMAKVDDSFFHRLEESFLVEEDKKHERHPIFGNIVDEVAYHEKYPTIYHLRKKLVDSTDKADLRLIYLALAHMIKFRGHFLIEGDLNPDNSDVDKLFIQLVQTYNQLFEENPINASGVDAKAILSARLSKSRRLENLIAQLPGEKKNGLFGNLIALSLGLTPNFKSNFDLAEDAKLQLSKDTYDDDLDNLLAQIGDQYADLFLAAKNLSDAILLSDILRVNTEITKAPLSASMIKRYDEHHQDLTLLKALVRQQLPEKYKEIFFDQSKNGYAGYIDGGASQEEFYKFIKPILEKMDGTEELLVKLNREDLLRKQRTFDNGSIPHQIHLGELHAILRRQEDFYPFLKDNREKIEKILTFRIPYYVGPLARGNSRFAWMTRKSEETITPWNFEEVVDKGASAQSFIERMTNFDKNLPNEKVLPKHSLLYEYFTVYNELTKVKYVTEGMRKPAFLSGEQKKAIVDLLFKTNRKVTVKQLKEDYFKKIECFDSVEISGVEDRFNASLGTYHDLLKIIKDKDFLDNEENEDILEDIVLTLTLFEDREMIEERLKTYAHLFDDKVMKQLKRRRYTGWGRLSRKLINGIRDKQSGKTILDFLKSDGFANRNFMQLIHDDSLTFKEDIQKAQVSGQGDSLHEHIANLAGSPAIKKGILQTVKVVDELVKVMGRHKPENIVIEMARENQTTQKGQKNSRERMKRIEEGIKELGSQILKEHPVENTQLQNEKLYLYYLQNGRDMYVDQELDINRLSDYDVDHIVPQSFLKDDSIDNKVLTRSDKARGKSDNVPSEEVVKKMKNYWRQLLNAKLITQRKFDNLTKAERGGLSELDKAGFIKRQLVETRQITKHVAQILDSRMNTKYDENDKLIREVKVITLKSKLVSDFRKDFQFYKVREINNYHHAHDAYLNAVVGTALIKKYPKLESEFVYGDYKVYDVRKMIAKSEQEIGKATAKYFFYSNIMNFFKTEITLANGEIRKRPLIETNGETGEIVWDKGRDFATVRKVLSMPQVNIVKKTEVQTGGFSKESILPKRNSDKLIARKKDWDPKKYGGFDSPTVAYSVLVVAKVEKGKSKKLKSVKELLGITIMERSSFEKNPIDFLEAKGYKEVKKDLIIKLPKYSLFELENGRKRMLASAGELQKGNELALPSKYVNFLYLASHYEKLKGSPEDNEQKQLFVEQHKHYLDEIIEQISEFSKRVILADANLDKVLSAYNKHRDKPIREQAENIIHLFTLTNLGAPAAFKYFDTTIDRKRYTSTKEVLDATLIHQSITGLYETRIDLSQLGGDGGGGSGGSGGSGGSGGSGGSGGGLEHLPRPPEISQFPLNPERLQALQHLVRKALEAGHIEPYTGPGNNPVFPVKKANGTWRFIHDLRATNSLTVDLSSSSPGPPDLSSPPTTLAHLQTIDLKDAFFQIPLPKQFQPYFAFTVPQQCNYGPGTRYAWKVLPQGFKNSPTLFQMQLASILQPIRQAFPQCVILQYMDDILLASPSPEDLQQLSEATMASLISHGLPVSQDKTQQTPGTIKFLGQIISPNHITYDAVPTVPIRSRWALPELQALLGEIQWVSKGTPTLRQPLHSLYCALQGHTDPRDQIYLNPSQVQSLMQLQQALSQNCRSRLAQTLPLLGAIMLTLTGTTTVVFQSKQQWPLVWLHAPLPHTSQCPWGQLLASAVLLLDKYTLQSYGLLCQTIHHNISIQTFNQFIQTSDHPSVPILLHHSHRFKNLGAQTGELWNTFLKTAAPLAPVKALTPVFTLSPIIINTAPCLFSDGSTSQAAYILWDKHILSQRSFPLPPPHKSAQQAELLGLLHGLSSARSWHCLNIFLDSKYLYHYLRTLAWGTFQGKSSQAPFQALLPRLLAHKVIYLHHVRSHTNLPDPISKLNALTDALLITPILAGKRTADGSEFEKRTADGSEFESPKKKAKVE

SEQ ID NO: 1504 - protein, 2099 aa, synthetic construct
  source 1..2099: note = Description of Artificial Sequence: Synthetic polypeptide
MPAAKRVKLDGGDKKYSIGLDIGTNSVGWAVITDEYKVPSKKFKVLGNTDRHSIKKNLIGALLFDSGETAEATRLKRTARRRYTRRKNRICYLQEIFSNEMAKVDDSFFHRLEESFLVEEDKKHERHPIFGNIVDEVAYHEKYPTIYHLRKKLVDSTDKADLRLIYLALAHMIKFRGHFLIEGDLNPDNSDVDKLFIQLVQTYNQLFEENPINASGVDAKAILSARLSKSRRLENLIAQLPGEKKNGLFGNLIALSLGLTPNFKSNFDLAEDAKLQLSKDTYDDDLDNLLAQIGDQYADLFLAAKNLSDAILLSDILRVNTEITKAPLSASMIKRYDEHHQDLTLLKALVRQQLPEKYKEIFFDQSKNGYAGYIDGGASQEEFYKFIKPILEKMDGTEELLVKLNREDLLRKQRTFDNGSIPHQIHLGELHAILRRQEDFYPFLKDNREKIEKILTFRIPYYVGPLARGNSRFAWMTRKSEETITPWNFEEVVDKGASAQSFIERMTNFDKNLPNEKVLPKHSLLYEYFTVYNELTKVKYVTEGMRKPAFLSGEQKKAIVDLLFKTNRKVTVKQLKEDYFKKIECFDSVEISGVEDRFNASLGTYHDLLKIIKDKDFLDNEENEDILEDIVLTLTLFEDREMIEERLKTYAHLFDDKVMKQLKRRRYTGWGRLSRKLINGIRDKQSGKTILDFLKSDGFANRNFMQLIHDDSLTFKEDIQKAQVSGQGDSLHEHIANLAGSPAIKKGILQTVKVVDELVKVMGRHKPENIVIEMARENQTTQKGQKNSRERMKRIEEGIKELGSQILKEHPVENTQLQNEKLYLYYLQNGRDMYVDQELDINRLSDYDVDHIVPQSFLKDDSIDNKVLTRSDKARGKSDNVPSEEVVKKMKNYWRQLLNAKLITQRKFDNLTKAERGGLSELDKAGFIKRQLVETRQITKHVAQILDSRMNTKYDENDKLIREVKVITLKSKLVSDFRKDFQFYKVREINNYHHAHDAYLNAVVGTALIKKYPKLESEFVYGDYKVYDVRKMIAKSEQEIGKATAKYFFYSNIMNFFKTEITLANGEIRKRPLIETNGETGEIVWDKGRDFATVRKVLSMPQVNIVKKTEVQTGGFSKESILPKRNSDKLIARKKDWDPKKYGGFDSPTVAYSVLVVAKVEKGKSKKLKSVKELLGITIMERSSFEKNPIDFLEAKGYKEVKKDLIIKLPKYSLFELENGRKRMLASAGELQKGNELALPSKYVNFLYLASHYEKLKGSPEDNEQKQLFVEQHKHYLDEIIEQISEFSKRVILADANLDKVLSAYNKHRDKPIREQAENIIHLFTLTNLGAPAAFKYFDTTIDRKRYTSTKEVLDATLIHQSITGLYETRIDLSQLGGDGGEAAAKPAPGGTVSLQDEHRLFDIPVTTSLPDVWLQDFPQAWAETGGLGRAKCQAPIIIDLKPTAVPVSIKQYPMSLEAHMGIRQHIIKFLELGVLRPCRSPWNTPLLPVKKPGTQDYRPVQDLREINKRTVDIHPTVPNPYNLLSTLKPDYSWYTVLDLKDAFFCLPLAPQSQELFAFEWKDPERGISGQLTWTRLPQGFKNSPTLFDEALHRDLTDFRTQHPEVTLLQYVDDLLLAAPTKKACTQGTRHLLQELGEKGYRASAKKAQICQTKVTYLGYILSEGKRWLTPGRIETVARIPPPRNPREVREFLGTAGFCRLWIPGFAELAAPLYALTKESTPFTWQTEHQLAFEALKKALLSAPALGLPDTSKPFTLFLDERQGIAKGVLTQKLGPWKRPVAYLSKKLDPVAAGWPPCLRIMAATAMLVKDSAKLTLGQPLTVITPHTLEAIVRQPPDRWITNARLTHYQALLLDTDRVQFGPPVTLNPATLLPVPENQPSPHDCRQVLAETHGTREDLKDQELPDADHTWYTDGSSYLDSGTRRAGAAVVDGHNTIWAQSLPPGTSAQKAELIALTKALELSKGKKANIYTDSRYAFATAHTHGSIYERRGLLTSEGKEIKNKAEIIALLKALFLPQEVAIIHCPGHQKGQDPVAVGNRQADRVARQAAMAEVLTLATEPDNTSHITAGKRTADGSEFEKRTADGSEFESPKKKAKVE

SEQ ID NO: 1505 - protein, 2100 aa, synthetic construct
  source 1..2100: note = Description of Artificial Sequence: Synthetic polypeptide
MPAAKRVKLDGGDKKYSIGLDIGTNSVGWAVITDEYKVPSKKFKVLGNTDRHSIKKNLIGALLFDSGETAEATRLKRTARRRYTRRKNRICYLQEIFSNEMAKVDDSFFHRLEESFLVEEDKKHERHPIFGNIVDEVAYHEKYPTIYHLRKKLVDSTDKADLRLIYLALAHMIKFRGHFLIEGDLNPDNSDVDKLFIQLVQTYNQLFEENPINASGVDAKAILSARLSKSRRLENLIAQLPGEKKNGLFGNLIALSLGLTPNFKSNFDLAEDAKLQLSKDTYDDDLDNLLAQIGDQYADLFLAAKNLSDAILLSDILRVNTEITKAPLSASMIKRYDEHHQDLTLLKALVRQQLPEKYKEIFFDQSKNGYAGYIDGGASQEEFYKFIKPILEKMDGTEELLVKLNREDLLRKQRTFDNGSIPHQIHLGELHAILRRQEDFYPFLKDNREKIEKILTFRIPYYVGPLARGNSRFAWMTRKSEETITPWNFEEVVDKGASAQSFIERMTNFDKNLPNEKVLPKHSLLYEYFTVYNELTKVKYVTEGMRKPAFLSGEQKKAIVDLLFKTNRKVTVKQLKEDYFKKIECFDSVEISGVEDRFNASLGTYHDLLKIIKDKDFLDNEENEDILEDIVLTLTLFEDREMIEERLKTYAHLFDDKVMKQLKRRRYTGWGRLSRKLINGIRDKQSGKTILDFLKSDGFANRNFMQLIHDDSLTFKEDIQKAQVSGQGDSLHEHIANLAGSPAIKKGILQTVKVVDELVKVMGRHKPENIVIEMARENQTTQKGQKNSRERMKRIEEGIKELGSQILKEHPVENTQLQNEKLYLYYLQNGRDMYVDQELDINRLSDYDVDHIVPQSFLKDDSIDNKVLTRSDKARGKSDNVPSEEVVKKMKNYWRQLLNAKLITQRKFDNLTKAERGGLSELDKAGFIKRQLVETRQITKHVAQILDSRMNTKYDENDKLIREVKVITLKSKLVSDFRKDFQFYKVREINNYHHAHDAYLNAVVGTALIKKYPKLESEFVYGDYKVYDVRKMIAKSEQEIGKATAKYFFYSNIMNFFKTEITLANGEIRKRPLIETNGETGEIVWDKGRDFATVRKVLSMPQVNIVKKTEVQTGGFSKESILPKRNSDKLIARKKDWDPKKYGGFDSPTVAYSVLVVAKVEKGKSKKLKSVKELLGITIMERSSFEKNPIDFLEAKGYKEVKKDLIIKLPKYSLFELENGRKRMLASAGELQKGNELALPSKYVNFLYLASHYEKLKGSPEDNEQKQLFVEQHKHYLDEIIEQISEFSKRVILADANLDKVLSAYNKHRDKPIREQAENIIHLFTLTNLGAPAAFKYFDTTIDRKRYTSTKEVLDATLIHQSITGLYETRIDLSQLGGDGGGGGGSSPAPGGTVSLQDEHRLFDIPVTTSLPDVWLQDFPQAWAETGGLGRAKCQAPIIIDLKPTAVPVSIKQYPMSLEAHMGIRQHIIKFLELGVLRPCRSPWNTPLLPVKKPGTQDYRPVQDLREINKRTVDIHPTVPNPYNLLSTLKPDYSWYTVLDLKDAFFCLPLAPQSQELFAFEWKDPERGISGQLTWTRLPQGFKNSPTLFDEALHRDLTDFRTQHPEVTLLQYVDDLLLAAPTKKACTQGTRHLLQELGEKGYRASAKKAQICQTKVTYLGYILSEGKRWLTPGRIETVARIPPPRNPREVREFLGTAGFCRLWIPGFAELAAPLYALTKESTPFTWQTEHQLAFEALKKALLSAPALGLPDTSKPFTLFLDERQGIAKGVLTQKLGPWKRPVAYLSKKLDPVAAGWPPCLRIMAATAMLVKDSAKLTLGQPLTVITPHTLEAIVRQPPDRWITNARLTHYQALLLDTDRVQFGPPVTLNPATLLPVPENQPSPHDCRQVLAETHGTREDLKDQELPDADHTWYTDGSSYLDSGTRRAGAAVVDGHNTIWAQSLPPGTSAQKAELIALTKALELSKGKKANIYTDSRYAFATAHTHGSIYERRGLLTSEGKEIKNKAEIIALLKALFLPQEVAIIHCPGHQKGQDPVAVGNRQADRVARQAAMAEVLTLATEPDNTSHITAGKRTADGSEFEKRTADGSEFESPKKKAKVE

SEQ ID NO: 1506 - protein, 2100 aa, synthetic construct
  source 1..2100: note = Description of Artificial Sequence: Synthetic polypeptide
MPAAKRVKLDGGDKKYSIGLDIGTNSVGWAVITDEYKVPSKKFKVLGNTDRHSIKKNLIGALLFDSGETAEATRLKRTARRRYTRRKNRICYLQEIFSNEMAKVDDSFFHRLEESFLVEEDKKHERHPIFGNIVDEVAYHEKYPTIYHLRKKLVDSTDKADLRLIYLALAHMIKFRGHFLIEGDLNPDNSDVDKLFIQLVQTYNQLFEENPINASGVDAKAILSARLSKSRRLENLIAQLPGEKKNGLFGNLIALSLGLTPNFKSNFDLAEDAKLQLSKDTYDDDLDNLLAQIGDQYADLFLAAKNLSDAILLSDILRVNTEITKAPLSASMIKRYDEHHQDLTLLKALVRQQLPEKYKEIFFDQSKNGYAGYIDGGASQEEFYKFIKPILEKMDGTEELLVKLNREDLLRKQRTFDNGSIPHQIHLGELHAILRRQEDFYPFLKDNREKIEKILTFRIPYYVGPLARGNSRFAWMTRKSEETITPWNFEEVVDKGASAQSFIERMTNFDKNLPNEKVLPKHSLLYEYFTVYNELTKVKYVTEGMRKPAFLSGEQKKAIVDLLFKTNRKVTVKQLKEDYFKKIECFDSVEISGVEDRFNASLGTYHDLLKIIKDKDFLDNEENEDILEDIVLTLTLFEDREMIEERLKTYAHLFDDKVMKQLKRRRYTGWGRLSRKLINGIRDKQSGKTILDFLKSDGFANRNFMQLIHDDSLTFKEDIQKAQVSGQGDSLHEHIANLAGSPAIKKGILQTVKVVDELVKVMGRHKPENIVIEMARENQTTQKGQKNSRERMKRIEEGIKELGSQILKEHPVENTQLQNEKLYLYYLQNGRDMYVDQELDINRLSDYDVDHIVPQSFLKDDSIDNKVLTRSDKARGKSDNVPSEEVVKKMKNYWRQLLNAKLITQRKFDNLTKAERGGLSELDKAGFIKRQLVETRQITKHVAQILDSRMNTKYDENDKLIREVKVITLKSKLVSDFRKDFQFYKVREINNYHHAHDAYLNAVVGTALIKKYPKLESEFVYGDYKVYDVRKMIAKSEQEIGKATAKYFFYSNIMNFFKTEITLANGEIRKRPLIETNGETGEIVWDKGRDFATVRKVLSMPQVNIVKKTEVQTGGFSKESILPKRNSDKLIARKKDWDPKKYGGFDSPTVAYSVLVVAKVEKGKSKKLKSVKELLGITIMERSSFEKNPIDFLEAKGYKEVKKDLIIKLPKYSLFELENGRKRMLASAGELQKGNELALPSKYVNFLYLASHYEKLKGSPEDNEQKQLFVEQHKHYLDEIIEQISEFSKRVILADANLDKVLSAYNKHRDKPIREQAENIIHLFTLTNLGAPAAFKYFDTTIDRKRYTSTKEVLDATLIHQSITGLYETRIDLSQLGGDGGPAPGGSGGGGGTVSLQDEHRLFDIPVTTSLPDVWLQDFPQAWAETGGLGRAKCQAPIIIDLKPTAVPVSIKQYPMSLEAHMGIRQHIIKFLELGVLRPCRSPWNTPLLPVKKPGTQDYRPVQDLREINKRTVDIHPTVPNPYNLLSTLKPDYSWYTVLDLKDAFFCLPLAPQSQELFAFEWKDPERGISGQLTWTRLPQGFKNSPTLFDEALHRDLTDFRTQHPEVTLLQYVDDLLLAAPTKKACTQGTRHLLQELGEKGYRASAKKAQICQTKVTYLGYILSEGKRWLTPGRIETVARIPPPRNPREVREFLGTAGFCRLWIPGFAELAAPLYALTKESTPFTWQTEHQLAFEALKKALLSAPALGLPDTSKPFTLFLDERQGIAKGVLTQKLGPWKRPVAYLSKKLDPVAAGWPPCLRIMAATAMLVKDSAKLTLGQPLTVITPHTLEAIVRQPPDRWITNARLTHYQALLLDTDRVQFGPPVTLNPATLLPVPENQPSPHDCRQVLAETHGTREDLKDQELPDADHTWYTDGSSYLDSGTRRAGAAVVDGHNTIWAQSLPPGTSAQKAELIALTKALELSKGKKANIYTDSRYAFATAHTHGSIYERRGLLTSEGKEIKNKAEIIALLKALFLPQEVAIIHCPGHQKGQDPVAVGNRQADRVARQAAMAEVLTLATEPDNTSHITAGKRTADGSEFEKRTADGSEFESPKKKAKVE

SEQ ID NO: 1507 - protein, 2106 aa, synthetic construct
  source 1..2106: note = Description of Artificial Sequence: Synthetic polypeptide
MPAAKRVKLDGGDKKYSIGLDIGTNSVGWAVITDEYKVPSKKFKVLGNTDRHSIKKNLIGALLFDSGETAEATRLKRTARRRYTRRKNRICYLQEIFSNEMAKVDDSFFHRLEESFLVEEDKKHERHPIFGNIVDEVAYHEKYPTIYHLRKKLVDSTDKADLRLIYLALAHMIKFRGHFLIEGDLNPDNSDVDKLFIQLVQTYNQLFEENPINASGVDAKAILSARLSKSRRLENLIAQLPGEKKNGLFGNLIALSLGLTPNFKSNFDLAEDAKLQLSKDTYDDDLDNLLAQIGDQYADLFLAAKNLSDAILLSDILRVNTEITKAPLSASMIKRYDEHHQDLTLLKALVRQQLPEKYKEIFFDQSKNGYAGYIDGGASQEEFYKFIKPILEKMDGTEELLVKLNREDLLRKQRTFDNGSIPHQIHLGELHAILRRQEDFYPFLKDNREKIEKILTFRIPYYVGPLARGNSRFAWMTRKSEETITPWNFEEVVDKGASAQSFIERMTNFDKNLPNEKVLPKHSLLYEYFTVYNELTKVKYVTEGMRKPAFLSGEQKKAIVDLLFKTNRKVTVKQLKEDYFKKIECFDSVEISGVEDRFNASLGTYHDLLKIIKDKDFLDNEENEDILEDIVLTLTLFEDREMIEERLKTYAHLFDDKVMKQLKRRRYTGWGRLSRKLINGIRDKQSGKTILDFLKSDGFANRNFMQLIHDDSLTFKEDIQKAQVSGQGDSLHEHIANLAGSPAIKKGILQTVKVVDELVKVMGRHKPENIVIEMARENQTTQKGQKNSRERMKRIEEGIKELGSQILKEHPVENTQLQNEKLYLYYLQNGRDMYVDQELDINRLSDYDVDHIVPQSFLKDDSIDNKVLTRSDKARGKSDNVPSEEVVKKMKNYWRQLLNAKLITQRKFDNLTKAERGGLSELDKAGFIKRQLVETRQITKHVAQILDSRMNTKYDENDKLIREVKVITLKSKLVSDFRKDFQFYKVREINNYHHAHDAYLNAVVGTALIKKYPKLESEFVYGDYKVYDVRKMIAKSEQEIGKATAKYFFYSNIMNFFKTEITLANGEIRKRPLIETNGETGEIVWDKGRDFATVRKVLSMPQVNIVKKTEVQTGGFSKESILPKRNSDKLIARKKDWDPKKYGGFDSPTVAYSVLVVAKVEKGKSKKLKSVKELLGITIMERSSFEKNPIDFLEAKGYKEVKKDLIIKLPKYSLFELENGRKRMLASAGELQKGNELALPSKYVNFLYLASHYEKLKGSPEDNEQKQLFVEQHKHYLDEIIEQISEFSKRVILADANLDKVLSAYNKHRDKPIREQAENIIHLFTLTNLGAPAAFKYFDTTIDRKRYTSTKEVLDATLIHQSITGLYETRIDLSQLGGDGGGGSGGSGGSGGSGGSGGTVSLQDEHRLFDIPVTTSLPDVWLQDFPQAWAETGGLGRAKCQAPIIIDLKPTAVPVSIKQYPMSLEAHMGIRQHIIKFLELGVLRPCRSPWNTPLLPVKKPGTQDYRPVQDLREINKRTVDIHPTVPNPYNLLSTLKPDYSWYTVLDLKDAFFCLPLAPQSQELFAFEWKDPERGISGQLTWTRLPQGFKNSPTLFDEALHRDLTDFRTQHPEVTLLQYVDDLLLAAPTKKACTQGTRHLLQELGEKGYRASAKKAQICQTKVTYLGYILSEGKRWLTPGRIETVARIPPPRNPREVREFLGTAGFCRLWIPGFAELAAPLYALTKESTPFTWQTEHQLAFEALKKALLSAPALGLPDTSKPFTLFLDERQGIAKGVLTQKLGPWKRPVAYLSKKLDPVAAGWPPCLRIMAATAMLVKDSAKLTLGQPLTVITPHTLEAIVRQPPDRWITNARLTHYQALLLDTDRVQFGPPVTLNPATLLPVPENQPSPHDCRQVLAETHGTREDLKDQELPDADHTWYTDGSSYLDSGTRRAGAAVVDGHNTIWAQSLPPGTSAQKAELIALTKALELSKGKKANIYTDSRYAFATAHTHGSIYERRGLLTSEGKEIKNKAEIIALLKALFLPQEVAIIHCPGHQKGQDPVAVGNRQADRVARQAAMAEVLTLATEPDNTSHITAGKRTADGSEFEKRTADGSEFESPKKKAKVE

SEQ ID NO: 1508 - protein, 2100 aa, synthetic construct
  source 1..2100: note = Description of Artificial Sequence: Synthetic polypeptide
MPAAKRVKLDGGDKKYSIGLDIGTNSVGWAVITDEYKVPSKKFKVLGNTDRHSIKKNLIGALLFDSGETAEATRLKRTARRRYTRRKNRICYLQEIFSNEMAKVDDSFFHRLEESFLVEEDKKHERHPIFGNIVDEVAYHEKYPTIYHLRKKLVDSTDKADLRLIYLALAHMIKFRGHFLIEGDLNPDNSDVDKLFIQLVQTYNQLFEENPINASGVDAKAILSARLSKSRRLENLIAQLPGEKKNGLFGNLIALSLGLTPNFKSNFDLAEDAKLQLSKDTYDDDLDNLLAQIGDQYADLFLAAKNLSDAILLSDILRVNTEITKAPLSASMIKRYDEHHQDLTLLKALVRQQLPEKYKEIFFDQSKNGYAGYIDGGASQEEFYKFIKPILEKMDGTEELLVKLNREDLLRKQRTFDNGSIPHQIHLGELHAILRRQEDFYPFLKDNREKIEKILTFRIPYYVGPLARGNSRFAWMTRKSEETITPWNFEEVVDKGASAQSFIERMTNFDKNLPNEKVLPKHSLLYEYFTVYNELTKVKYVTEGMRKPAFLSGEQKKAIVDLLFKTNRKVTVKQLKEDYFKKIECFDSVEISGVEDRFNASLGTYHDLLKIIKDKDFLDNEENEDILEDIVLTLTLFEDREMIEERLKTYAHLFDDKVMKQLKRRRYTGWGRLSRKLINGIRDKQSGKTILDFLKSDGFANRNFMQLIHDDSLTFKEDIQKAQVSGQGDSLHEHIANLAGSPAIKKGILQTVKVVDELVKVMGRHKPENIVIEMARENQTTQKGQKNSRERMKRIEEGIKELGSQILKEHPVENTQLQNEKLYLYYLQNGRDMYVDQELDINRLSDYDVDHIVPQSFLKDDSIDNKVLTRSDKARGKSDNVPSEEVVKKMKNYWRQLLNAKLITQRKFDNLTKAERGGLSELDKAGFIKRQLVETRQITKHVAQILDSRMNTKYDENDKLIREVKVITLKSKLVSDFRKDFQFYKVREINNYHHAHDAYLNAVVGTALIKKYPKLESEFVYGDYKVYDVRKMIAKSEQEIGKATAKYFFYSNIMNFFKTEITLANGEIRKRPLIETNGETGEIVWDKGRDFATVRKVLSMPQVNIVKKTEVQTGGFSKESILPKRNSDKLIARKKDWDPKKYGGFDSPTVAYSVLVVAKVEKGKSKKLKSVKELLGITIMERSSFEKNPIDFLEAKGYKEVKKDLIIKLPKYSLFELENGRKRMLASAGELQKGNELALPSKYVNFLYLASHYEKLKGSPEDNEQKQLFVEQHKHYLDEIIEQISEFSKRVILADANLDKVLSAYNKHRDKPIREQAENIIHLFTLTNLGAPAAFKYFDTTIDRKRYTSTKEVLDATLIHQSITGLYETRIDLSQLGGDGGGSSGGSPAPGGTVSLQDEHRLFDIPVTTSLPDVWLQDFPQAWAETGGLGRAKCQAPIIIDLKPTAVPVSIKQYPMSLEAHMGIRQHIIKFLELGVLRPCRSPWNTPLLPVKKPGTQDYRPVQDLREINKRTVDIHPTVPNPYNLLSTLKPDYSWYTVLDLKDAFFCLPLAPQSQELFAFEWKDPERGISGQLTWTRLPQGFKNSPTLFDEALHRDLTDFRTQHPEVTLLQYVDDLLLAAPTKKACTQGTRHLLQELGEKGYRASAKKAQICQTKVTYLGYILSEGKRWLTPGRIETVARIPPPRNPREVREFLGTAGFCRLWIPGFAELAAPLYALTKESTPFTWQTEHQLAFEALKKALLSAPALGLPDTSKPFTLFLDERQGIAKGVLTQKLGPWKRPVAYLSKKLDPVAAGWPPCLRIMAATAMLVKDSAKLTLGQPLTVITPHTLEAIVRQPPDRWITNARLTHYQALLLDTDRVQFGPPVTLNPATLLPVPENQPSPHDCRQVLAETHGTREDLKDQELPDADHTWYTDGSSYLDSGTRRAGAAVVDGHNTIWAQSLPPGTSAQKAELIALTKALELSKGKKANIYTDSRYAFATAHTHGSIYERRGLLTSEGKEIKNKAEIIALLKALFLPQEVAIIHCPGHQKGQDPVAVGNRQADRVARQAAMAEVLTLATEPDNTSHITAGKRTADGSEFEKRTADGSEFESPKKKAKVE

SEQ ID NO: 1509 - protein, 2097 aa, synthetic construct
  source 1..2097: note = Description of Artificial Sequence: Synthetic polypeptide
MPAAKRVKLDGGDKKYSIGLDIGTNSVGWAVITDEYKVPSKKFKVLGNTDRHSIKKNLIGALLFDSGETAEATRLKRTARRRYTRRKNRICYLQEIFSNEMAKVDDSFFHRLEESFLVEEDKKHERHPIFGNIVDEVAYHEKYPTIYHLRKKLVDSTDKADLRLIYLALAHMIKFRGHFLIEGDLNPDNSDVDKLFIQLVQTYNQLFEENPINASGVDAKAILSARLSKSRRLENLIAQLPGEKKNGLFGNLIALSLGLTPNFKSNFDLAEDAKLQLSKDTYDDDLDNLLAQIGDQYADLFLAAKNLSDAILLSDILRVNTEITKAPLSASMIKRYDEHHQDLTLLKALVRQQLPEKYKEIFFDQSKNGYAGYIDGGASQEEFYKFIKPILEKMDGTEELLVKLNREDLLRKQRTFDNGSIPHQIHLGELHAILRRQEDFYPFLKDNREKIEKILTFRIPYYVGPLARGNSRFAWMTRKSEETITPWNFEEVVDKGASAQSFIERMTNFDKNLPNEKVLPKHSLLYEYFTVYNELTKVKYVTEGMRKPAFLSGEQKKAIVDLLFKTNRKVTVKQLKEDYFKKIECFDSVEISGVEDRFNASLGTYHDLLKIIKDKDFLDNEENEDILEDIVLTLTLFEDREMIEERLKTYAHLFDDKVMKQLKRRRYTGWGRLSRKLINGIRDKQSGKTILDFLKSDGFANRNFMQLIHDDSLTFKEDIQKAQVSGQGDSLHEHIANLAGSPAIKKGILQTVKVVDELVKVMGRHKPENIVIEMARENQTTQKGQKNSRERMKRIEEGIKELGSQILKEHPVENTQLQNEKLYLYYLQNGRDMYVDQELDINRLSDYDVDHIVPQSFLKDDSIDNKVLTRSDKARGKSDNVPSEEVVKKMKNYWRQLLNAKLITQRKFDNLTKAERGGLSELDKAGFIKRQLVETRQITKHVAQILDSRMNTKYDENDKLIREVKVITLKSKLVSDFRKDFQFYKVREINNYHHAHDAYLNAVVGTALIKKYPKLESEFVYGDYKVYDVRKMIAKSEQEIGKATAKYFFYSNIMNFFKTEITLANGEIRKRPLIETNGETGEIVWDKGRDFATVRKVLSMPQVNIVKKTEVQTGGFSKESILPKRNSDKLIARKKDWDPKKYGGFDSPTVAYSVLVVAKVEKGKSKKLKSVKELLGITIMERSSFEKNPIDFLEAKGYKEVKKDLIIKLPKYSLFELENGRKRMLASAGELQKGNELALPSKYVNFLYLASHYEKLKGSPEDNEQKQLFVEQHKHYLDEIIEQISEFSKRVILADANLDKVLSAYNKHRDKPIREQAENIIHLFTLTNLGAPAAFKYFDTTIDRKRYTSTKEVLDATLIHQSITGLYETRIDLSQLGGDGGPAPGSSGGTVSLQDEHRLFDIPVTTSLPDVWLQDFPQAWAETGGLGRAKCQAPIIIDLKPTAVPVSIKQYPMSLEAHMGIRQHIIKFLELGVLRPCRSPWNTPLLPVKKPGTQDYRPVQDLREINKRTVDIHPTVPNPYNLLSTLKPDYSWYTVLDLKDAFFCLPLAPQSQELFAFEWKDPERGISGQLTWTRLPQGFKNSPTLFDEALHRDLTDFRTQHPEVTLLQYVDDLLLAAPTKKACTQGTRHLLQELGEKGYRASAKKAQICQTKVTYLGYILSEGKRWLTPGRIETVARIPPPRNPREVREFLGTAGFCRLWIPGFAELAAPLYALTKESTPFTWQTEHQLAFEALKKALLSAPALGLPDTSKPFTLFLDERQGIAKGVLTQKLGPWKRPVAYLSKKLDPVAAGWPPCLRIMAATAMLVKDSAKLTLGQPLTVITPHTLEAIVRQPPDRWITNARLTHYQALLLDTDRVQFGPPVTLNPATLLPVPENQPSPHDCRQVLAETHGTREDLKDQELPDADHTWYTDGSSYLDSGTRRAGAAVVDGHNTIWAQSLPPGTSAQKAELIALTKALELSKGKKANIYTDSRYAFATAHTHGSIYERRGLLTSEGKEIKNKAEIIALLKALFLPQEVAIIHCPGHQKGQDPVAVGNRQADRVARQAAMAEVLTLATEPDNTSHITAGKRTADGSEFEKRTADGSEFESPKKKAKVE

SEQ ID NO: 1510 - protein, 2009 aa, synthetic construct
  source 1..2009: note = Description of Artificial Sequence: Synthetic polypeptide
MPAAKRVKLDGGDKKYSIGLDIGTNSVGWAVITDEYKVPSKKFKVLGNTDRHSIKKNLIGALLFDSGETAEATRLKRTARRRYTRRKNRICYLQEIFSNEMAKVDDSFFHRLEESFLVEEDKKHERHPIFGNIVDEVAYHEKYPTIYHLRKKLVDSTDKADLRLIYLALAHMIKFRGHFLIEGDLNPDNSDVDKLFIQLVQTYNQLFEENPINASGVDAKAILSARLSKSRRLENLIAQLPGEKKNGLFGNLIALSLGLTPNFKSNFDLAEDAKLQLSKDTYDDDLDNLLAQIGDQYADLFLAAKNLSDAILLSDILRVNTEITKAPLSASMIKRYDEHHQDLTLLKALVRQQLPEKYKEIFFDQSKNGYAGYIDGGASQEEFYKFIKPILEKMDGTEELLVKLNREDLLRKQRTFDNGSIPHQIHLGELHAILRRQEDFYPFLKDNREKIEKILTFRIPYYVGPLARGNSRFAWMTRKSEETITPWNFEEVVDKGASAQSFIERMTNFDKNLPNEKVLPKHSLLYEYFTVYNELTKVKYVTEGMRKPAFLSGEQKKAIVDLLFKTNRKVTVKQLKEDYFKKIECFDSVEISGVEDRFNASLGTYHDLLKIIKDKDFLDNEENEDILEDIVLTLTLFEDREMIEERLKTYAHLFDDKVMKQLKRRRYTGWGRLSRKLINGIRDKQSGKTILDFLKSDGFANRNFMQLIHDDSLTFKEDIQKAQVSGQGDSLHEHIANLAGSPAIKKGILQTVKVVDELVKVMGRHKPENIVIEMARENQTTQKGQKNSRERMKRIEEGIKELGSQILKEHPVENTQLQNEKLYLYYLQNGRDMYVDQELDINRLSDYDVDHIVPQSFLKDDSIDNKVLTRSDKARGKSDNVPSEEVVKKMKNYWRQLLNAKLITQRKFDNLTKAERGGLSELDKAGFIKRQLVETRQITKHVAQILDSRMNTKYDENDKLIREVKVITLKSKLVSDFRKDFQFYKVREINNYHHAHDAYLNAVVGTALIKKYPKLESEFVYGDYKVYDVRKMIAKSEQEIGKATAKYFFYSNIMNFFKTEITLANGEIRKRPLIETNGETGEIVWDKGRDFATVRKVLSMPQVNIVKKTEVQTGGFSKESILPKRNSDKLIARKKDWDPKKYGGFDSPTVAYSVLVVAKVEKGKSKKLKSVKELLGITIMERSSFEKNPIDFLEAKGYKEVKKDLIIKLPKYSLFELENGRKRMLASAGELQKGNELALPSKYVNFLYLASHYEKLKGSPEDNEQKQLFVEQHKHYLDEIIEQISEFSKRVILADANLDKVLSAYNKHRDKPIREQAENIIHLFTLTNLGAPAAFKYFDTTIDRKRYTSTKEVLDATLIHQSITGLYETRIDLSQLGGDGGEAAAKGGGPAPGGGLEHLPPPPEVSQFPLNPERLQALTDLVSRALEAKHIEPYQGPGNNPIFPVKKPNGKWRFIHDLRATNSVTRDLASPSPGPPDLTSLPQGLPHLRTIDLTDAFFQIPLPTIFQPYFAFTLPQPNNYGPGTRYSWRVLPQGFKNSPTLFEQQLSHILTPVRKTFPNSLIIQYMDDILLASPAPGELAALTDKVTNALTKEGLPLSPEKTQATPGPIHFLGQVISQDCITYETLPSINVKSTWSLAELQSMLGELQWVSKGTPVLRSSLHQLYLALRGHRDPRDTIKLTSIQVQALRTIQKALTLNCRSRLVNQLPILALIMLRPTGTTAVLFQTKQKWPLVWLHTPHPATSLRPWGQLLANAVIILDKYSLQHYGQVCKSFHHNISNQALTYYLHTSDQSSVAILLQHSHRFHNLGAQPSGPWRSLLQMPQIFQNIDVLRPPFTISPVVINHAPCLFSDGSASKAAFIIWDRQVIHQQVLSLPSTCSAQAGELFGLLAGLQKSQPWVALNIFLDSKFLIGHLRRMALGAFPGPSTQCELHTQLLPLLQGKTVYVHHVRSHTLLQDPISRLNEATDALMLAPLLPLAGKRTADGSEFEKRTADGSEFESPKKKAKVE

SEQ ID NO: 1511 - protein, 2001 aa, synthetic construct
  source 1..2001: note = Description of Artificial Sequence: Synthetic polypeptide
MPAAKRVKLDGGDKKYSIGLDIGTNSVGWAVITDEYKVPSKKFKVLGNTDRHSIKKNLIGALLFDSGETAEATRLKRTARRRYTRRKNRICYLQEIFSNEMAKVDDSFFHRLEESFLVEEDKKHERHPIFGNIVDEVAYHEKYPTIYHLRKKLVDSTDKADLRLIYLALAHMIKFRGHFLIEGDLNPDNSDVDKLFIQLVQTYNQLFEENPINASGVDAKAILSARLSKSRRLENLIAQLPGEKKNGLFGNLIALSLGLTPNFKSNFDLAEDAKLQLSKDTYDDDLDNLLAQIGDQYADLFLAAKNLSDAILLSDILRVNTEITKAPLSASMIKRYDEHHQDLTLLKALVRQQLPEKYKEIFFDQSKNGYAGYIDGGASQEEFYKFIKPILEKMDGTEELLVKLNREDLLRKQRTFDNGSIPHQIHLGELHAILRRQEDFYPFLKDNREKIEKILTFRIPYYVGPLARGNSRFAWMTRKSEETITPWNFEEVVDKGASAQSFIERMTNFDKNLPNEKVLPKHSLLYEYFTVYNELTKVKYVTEGMRKPAFLSGEQKKAIVDLLFKTNRKVTVKQLKEDYFKKIECFDSVEISGVEDRFNASLGTYHDLLKIIKDKDFLDNEENEDILEDIVLTLTLFEDREMIEERLKTYAHLFDDKVMKQLKRRRYTGWGRLSRKLINGIRDKQSGKTILDFLKSDGFANRNFMQLIHDDSLTFKEDIQKAQVSGQGDSLHEHIANLAGSPAIKKGILQTVKVVDELVKVMGRHKPENIVIEMARENQTTQKGQKNSRERMKRIEEGIKELGSQILKEHPVENTQLQNEKLYLYYLQNGRDMYVDQELDINRLSDYDVDHIVPQSFLKDDSIDNKVLTRSDKARGKSDNVPSEEVVKKMKNYWRQLLNAKLITQRKFDNLTKAERGGLSELDKAGFIKRQLVETRQITKHVAQILDSRMNTKYDENDKLIREVKVITLKSKLVSDFRKDFQFYKVREINNYHHAHDAYLNAVVGTALIKKYPKLESEFVYGDYKVYDVRKMIAKSEQEIGKATAKYFFYSNIMNFFKTEITLANGEIRKRPLIETNGETGEIVWDKGRDFATVRKVLSMPQVNIVKKTEVQTGGFSKESILPKRNSDKLIARKKDWDPKKYGGFDSPTVAYSVLVVAKVEKGKSKKLKSVKELLGITIMERSSFEKNPIDFLEAKGYKEVKKDLIIKLPKYSLFELENGRKRMLASAGELQKGNELALPSKYVNFLYLASHYEKLKGSPEDNEQKQLFVEQHKHYLDEIIEQISEFSKRVILADANLDKVLSAYNKHRDKPIREQAENIIHLFTLTNLGAPAAFKYFDTTIDRKRYTSTKEVLDATLIHQSITGLYETRIDLSQLGGDGGGGSGGGLEHLPPPPEVSQFPLNPERLQALTDLVSRALEAKHIEPYQGPGNNPIFPVKKPNGKWRFIHDLRATNSVTRDLASPSPGPPDLTSLPQGLPHLRTIDLTDAFFQIPLPTIFQPYFAFTLPQPNNYGPGTRYSWRVLPQGFKNSPTLFQQQLSHILTPVRKTFPNSLIIQYMDDILLASPAPGELAALTDKVTNALTKEGLPLSPEKTQATPGPIHFLGQVISQDCITYETLPSINVKSTWSLAELQSMLGELQWVSKGTPVLRSSLHQLYLALRGHRDPRDTIKLTSIQVQALRTIQKALTLNCRSRLVNQLPILALIMLRPTGTTAVLFQTKQKWPLVWLHTPHPATSLRPWGQLLANAVIILDKYSLQHYGQVCKSFHHNISNQALTYYLHTSDQSSVAILLQHSHRFHNLGAQPSGPWRSLLQMPQIFQNIDVLRPPFTISPVVINHAPCLFSDGSASKAAFIIWDRQVIHQQVLSLPSTCSAQAGELFGLLAGLQKSQPWVALNIFLDSKFLIGHLRRMAWGAFPGPSTQCELHTQLLPLLQGKTVYVHHVRSHTLLQDPISRLNEATDALMLAPLLPLAGKRTADGSEFEKRTADGSEFESPKKKAKVE

SEQ ID NO: 1512 - protein, 2004 aa, synthetic construct
  source 1..2004: note = Description of Artificial Sequence: Synthetic polypeptide
MPAAKRVKLDGGDKKYSIGLDIGTNSVGWAVITDEYKVPSKKFKVLGNTDRHSIKKNLIGALLFDSGETAEATRLKRTARRRYTRRKNRICYLQEIFSNEMAKVDDSFFHRLEESFLVEEDKKHERHPIFGNIVDEVAYHEKYPTIYHLRKKLVDSTDKADLRLIYLALAHMIKFRGHFLIEGDLNPDNSDVDKLFIQLVQTYNQLFEENPINASGVDAKAILSARLSKSRRLENLIAQLPGEKKNGLFGNLIALSLGLTPNFKSNFDLAEDAKLQLSKDTYDDDLDNLLAQIGDQYADLFLAAKNLSDAILLSDILRVNTEITKAPLSASMIKRYDEHHQDLTLLKALVRQQLPEKYKEIFFDQSKNGYAGYIDGGASQEEFYKFIKPILEKMDGTEELLVKLNREDLLRKQRTFDNGSIPHQIHLGELHAILRRQEDFYPFLKDNREKIEKILTFRIPYYVGPLARGNSRFAWMTRKSEETITPWNFEEVVDKGASAQSFIERMTNFDKNLPNEKVLPKHSLLYEYFTVYNELTKVKYVTEGMRKPAFLSGEQKKAIVDLLFKTNRKVTVKQLKEDYFKKIECFDSVEISGVEDRFNASLGTYHDLLKIIKDKDFLDNEENEDILEDIVLTLTLFEDREMIEERLKTYAHLFDDKVMKQLKRRRYTGWGRLSRKLINGIRDKQSGKTILDFLKSDGFANRNFMQLIHDDSLTFKEDIQKAQVSGQGDSLHEHIANLAGSPAIKKGILQTVKVVDELVKVMGRHKPENIVIEMARENQTTQKGQKNSRERMKRIEEGIKELGSQILKEHPVENTQLQNEKLYLYYLQNGRDMYVDQELDINRLSDYDVDHIVPQSFLKDDSIDNKVLTRSDKARGKSDNVPSEEVVKKMKNYWRQLLNAKLITQRKFDNLTKAERGGLSELDKAGFIKRQLVETRQITKHVAQILDSRMNTKYDENDKLIREVKVITLKSKLVSDFRKDFQFYKVREINNYHHAHDAYLNAVVGTALIKKYPKLESEFVYGDYKVYDVRKMIAKSEQEIGKATAKYFFYSNIMNFFKTEITLANGEIRKRPLIETNGETGEIVWDKGRDFATVRKVLSMPQVNIVKKTEVQTGGFSKESILPKRNSDKLIARKKDWDPKKYGGFDSPTVAYSVLVVAKVEKGKSKKLKSVKELLGITIMERSSFEKNPIDFLEAKGYKEVKKDLIIKLPKYSLFELENGRKRMLASAGELQKGNELALPSKYVNFLYLASHYEKLKGSPEDNEQKQLFVEQHKHYLDEIIEQISEFSKRVILADANLDKVLSAYNKHRDKPIREQAENIIHLFTLTNLGAPAAFKYFDTTIDRKRYTSTKEVLDATLIHQSITGLYETRIDLSQLGGDGGGGSGGGGGGLEHLPPPPEVSQFPLNPERLQALTDLVSRALEAKHIEPYQGPGNNPIFPVKKPNGKWRFIHDLRATNSVTRDLASPSPGPPDLTSLPQGLPHLRTIDLTDAFFQIPLPTIFQPYFAFTLPQPNNYGPGTRYSWRVLPQGFKNSPTLFQQQLSHILTPVRKTFPNSLIIQYMDDILLASPAPGELAALTDKVTNALTKEGLPLSPEKTQATPGPIHFLGQVISQDCITYETLPSINVKSTWSLAELQSMLGELQWVSKGTPVLRSSLHQLYLALRGHRDPRDTIKLTSIQVQALRTIQKALTLNCRSRLVNQLPILALIMLRPTGTTAVLFQTKQKWPLVWLHTPHPATSLRPWGQLLANAVIILDKYSLQHYGQVCKSFHHNISNQALTYYLHTSDQSSVAILLQHSHRFHNLGAQPSGPWRSLLQMPQIFQNIDVLRPPFTISPVVINHAPCLFSDGSASKAAFIIWDRQVIHQQVLSLPSTCSAQAGELFGLLAGLQKSQPWVALNIFLDSKFLIGHLRRMAWGAFPGPSTQCELHTQLLPLLQGKTVYVHHVRSHTLLQDPISRLNEATDALMLAPLLPLAGKRTADGSEFEKRTADGSEFESPKKKAKVE

SEQ ID NO: 1513 - protein, 2007 aa, synthetic construct
  source 1..2007: note = Description of Artificial Sequence: Synthetic polypeptide
MPAAKRVKLDGGDKKYSIGLDIGTNSVGWAVITDEYKVPSKKFKVLGNTDRHSIKKNLIGALLFDSGETAEATRLKRTARRRYTRRKNRICYLQEIFSNEMAKVDDSFFHRLEESFLVEEDKKHERHPIFGNIVDEVAYHEKYPTIYHLRKKLVDSTDKADLRLIYLALAHMIKFRGHFLIEGDLNPDNSDVDKLFIQLVQTYNQLFEENPINASGVDAKAILSARLSKSRRLENLIAQLPGEKKNGLFGNLIALSLGLTPNFKSNFDLAEDAKLQLSKDTYDDDLDNLLAQIGDQYADLFLAAKNLSDAILLSDILRVNTEITKAPLSASMIKRYDEHHQDLTLLKALVRQQLPEKYKEIFFDQSKNGYAGYIDGGASQEEFYKFIKPILEKMDGTEELLVKLNREDLLRKQRTFDNGSIPHQIHLGELHAILRRQEDFYPFLKDNREKIEKILTFRIPYYVGPLARGNSRFAWMTRKSEETITPWNFEEVVDKGASAQSFIERMTNFDKNLPNEKVLPKHSLLYEYFTVYNELTKVKYVTEGMRKPAFLSGEQKKAIVDLLFKTNRKVTVKQLKEDYFKKIECFDSVEISGVEDRFNASLGTYHDLLKIIKDKDFLDNEENEDILEDIVLTLTLFEDREMIEERLKTYAHLFDDKVMKQLKRRRYTGWGRLSRKLINGIRDKQSGKTILDFLKSDGFANRNFMQLIHDDSLTFKEDIQKAQVSGQGDSLHEHIANLAGSPAIKKGILQTVKVVDELVKVMGRHKPENIVIEMARENQTTQKGQKNSRERMKRIEEGIKELGSQILKEHPVENTQLQNEKLYLYYLQNGRDMYVDQELDINRLSDYDVDHIVPQSFLKDDSIDNKVLTRSDKARGKSDNVPSEEVVKKMKNYWRQLLNAKLITQRKFDNLTKAERGGLSELDKAGFIKRQLVETRQITKHVAQILDSRMNTKYDENDKLIREVKVITLKSKLVSDFRKDFQFYKVREINNYHHAHDAYLNAVVGTALIKKYPKLESEFVYGDYKVYDVRKMIAKSEQEIGKATAKYFFYSNIMNFFKTEITLANGEIRKRPLIETNGETGEIVWDKGRDFATVRKVLSMPQVNIVKKTEVQTGGFSKESILPKRNSDKLIARKKDWDPKKYGGFDSPTVAYSVLVVAKVEKGKSKKLKSVKELLGITIMERSSFEKNPIDFLEAKGYKEVKKDLIIKLPKYSLFELENGRKRMLASAGELQKGNELALPSKYVNFLYLASHYEKLKGSPEDNEQKQLFVEQHKHYLDEIIEQISEFSKRVILADANLDKVLSAYNKHRDKPIREQAENIIHLFTLTNLGAPAAFKYFDTTIDRKRYTSTKEVLDATLIHQSITGLYETRIDLSQLGGDGGPAPGGGGSSGGGLEHLPPPPEVSQFPLNPERLQALTDLVSRALEAKHIEPYQGPGNNPIFPVKKPNGKWRFIHDLRATNSVTRDLASPSPGPPDLTSLPQGLPHLRTIDLTDAFFQIPLPTIFQPYFAFTLPQPNNYGPGTRYSWRVLPQGFKNSPTLFQQQLSHILTPVRKTFPNSLIIQYMDDILLASPAPGELAALTDKVTNALTKEGLPLSPEKTQATPGPIHFLGQVISQDCITYETLPSINVKSTWSLAELQSMLGELQWVSKGTPVLRSSLHQLYLALRGHRDPRDTIKLTSIQVQALRTIQKALTLNCRSRLVNQLPILALIMLRPTGTTAVLFQTKQKWPLVWLHTPHPATSLRPWGQLLANAVIILDKYSLQHYGQVCKSFHHNISNQALTYYLHTSDQSSVAILLQHSHRFHNLGAQPSGPWRSLLQMPQIFQNIDVLRPPFTISPVVINHAPCLFSDGSASKAAFIIWDRQVIHQQVLSLPSTCSAQAGELFGLLAGLQKSQPWVALNIFLDSKFLIGHLRRMAWGAFPGPSTQCELHTQLLPLLQGKTVYVHHVRSHTLLQDPISRLNEATDALMLAPLLPLAGKRTADGSEFEKRTADGSEFESPKKKAKVE

SEQ ID NO: 1514 - protein, 2007 aa, synthetic construct
  source 1..2007: note = Description of Artificial Sequence: Synthetic polypeptide
MPAAKRVKLDGGDKKYSIGLDIGTNSVGWAVITDEYKVPSKKFKVLGNTDRHSIKKNLIGALLFDSGETAEATRLKRTARRRYTRRKNRICYLQEIFSNEMAKVDDSFFHRLEESFLVEEDKKHERHPIFGNIVDEVAYHEKYPTIYHLRKKLVDSTDKADLRLIYLALAHMIKFRGHFLIEGDLNPDNSDVDKLFIQLVQTYNQLFEENPINASGVDAKAILSARLSKSRRLENLIAQLPGEKKNGLFGNLIALSLGLTPNFKSNFDLAEDAKLQLSKDTYDDDLDNLLAQIGDQYADLFLAAKNLSDAILLSDILRVNTEITKAPLSASMIKRYDEHHQDLTLLKALVRQQLPEKYKEIFFDQSKNGYAGYIDGGASQEEFYKFIKPILEKMDGTEELLVKLNREDLLRKQRTFDNGSIPHQIHLGELHAILRRQEDFYPFLKDNREKIEKILTFRIPYYVGPLARGNSRFAWMTRKSEETITPWNFEEVVDKGASAQSFIERMTNFDKNLPNEKVLPKHSLLYEYFTVYNELTKVKYVTEGMRKPAFLSGEQKKAIVDLLFKTNRKVTVKQLKEDYFKKIECFDSVEISGVEDRFNASLGTYHDLLKIIKDKDFLDNEENEDILEDIVLTLTLFEDREMIEERLKTYAHLFDDKVMKQLKRRRYTGWGRLSRKLINGIRDKQSGKTILDFLKSDGFANRNFMQLIHDDSLTFKEDIQKAQVSGQGDSLHEHIANLAGSPAIKKGILQTVKVVDELVKVMGRHKPENIVIEMARENQTTQKGQKNSRERMKRIEEGIKELGSQILKEHPVENTQLQNEKLYLYYLQNGRDMYVDQELDINRLSDYDVDHIVPQSFLKDDSIDNKVLTRSDKARGKSDNVPSEEVVKKMKNYWRQLLNAKLITQRKFDNLTKAERGGLSELDKAGFIKRQLVETRQITKHVAQILDSRMNTKYDENDKLIREVKVITLKSKLVSDFRKDFQFYKVREINNYHHAHDAYLNAVVGTALIKKYPKLESEFVYGDYKVYDVRKMIAKSEQEIGKATAKYFFYSNIMNFFKTEITLANGEIRKRPLIETNGETGEIVWDKGRDFATVRKVLSMPQVNIVKKTEVQTGGFSKESILPKRNSDKLIARKKDWDPKKYGGFDSPTVAYSVLVVAKVEKGKSKKLKSVKELLGITIMERSSFEKNPIDFLEAKGYKEVKKDLIIKLPKYSLFELENGRKRMLASAGELQKGNELALPSKYVNFLYLASHYEKLKGSPEDNEQKQLFVEQHKHYLDEIIEQISEFSKRVILADANLDKVLSAYNKHRDKPIREQAENIIHLFTLTNLGAPAAFKYFDTTIDRKRYTSTKEVLDATLIHQSITGLYETRIDLSQLGGDGGGGGPAPGSSGGGLEHLPPPPEVSQFPLNPERLQALTDLVSRALEAKHIEPYQGPGNNPIFPVKKPNGKWRFIHDLRATNSVTRDLASPSPGPPDLTSPPQGLPHLRTIDLTDAFFQIPLPTIFQPYFAFTLPQPNNYGPGTRYSWRVLPQGFKNSPTLFQQQLSHILTPVRKTFPNSLIIQYMDDILLASPAPGELAALTDKVTNALTKEGLPLSPEKTQATPGPIHFLGQVISQDCITYETLPSINVKSTWSLAELQSMLGELQWVSKGTPVLRSSLHQLYLALRGHRDPRDTIKLTSIQVQALRTIQKALTLNCRSRLVNQLPILALIMLRPTGTTAVLFQTKQKWPLVWLHTPHPATSLRPWGQLLANAVIILDKYSLQHYGQVCKSFHHNISNQALTYYLHTSDQSSVAILLQHSHRFHNLGAQPSGPWRSLLQMPQIFQNIDVLRPPFTISPVVINHAPCLFSDGSASKAAFIIWDRQVIHQQVLSLPSTCSAQAGELFGLLAGLQKSQPWVALNIFLDSKFLIGHLRRMAWGAFPGPSTQCELHTQLLPLLQGKTVYVHHVRSHTLLQDPISRLNEATDALMLAPLLPLAGKRTADGSEFEKRTADGSEFESPKKKAKVE

SEQ ID NO: 1515 - protein, 2007 aa, synthetic construct
  source 1..2007: note = Description of Artificial Sequence: Synthetic polypeptide
MPAAKRVKLDGGDKKYSIGLDIGTNSVGWAVITDEYKVPSKKFKVLGNTDRHSIKKNLIGALLFDSGETAEATRLKRTARRRYTRRKNRICYLQEIFSNEMAKVDDSFFHRLEESFLVEEDKKHERHPIFGNIVDEVAYHEKYPTIYHLRKKLVDSTDKADLRLIYLALAHMIKFRGHFLIEGDLNPDNSDVDKLFIQLVQTYNQLFEENPINASGVDAKAILSARLSKSRRLENLIAQLPGEKKNGLFGNLIALSLGLTPNFKSNFDLAEDAKLQLSKDTYDDDLDNLLAQIGDQYADLFLAAKNLSDAILLSDILRVNTEITKAPLSASMIKRYDEHHQDLTLLKALVRQQLPEKYKEIFFDQSKNGYAGYIDGGASQEEFYKFIKPILEKMDGTEELLVKLNREDLLRKQRTFDNGSIPHQIHLGELHAILRRQEDFYPFLKDNREKIEKILTFRIPYYVGPLARGNSRFAWMTRKSEETITPWNFEEVVDKGASAQSFIERMTNFDKNLPNEKVLPKHSLLYEYFTVYNELTKVKYVTEGMRKPAFLSGEQKKAIVDLLFKTNRKVTVKQLKEDYFKKIECFDSVEISGVEDRFNASLGTYHDLLKIIKDKDFLDNEENEDILEDIVLTLTLFEDREMIEERLKTYAHLFDDKVMKQLKRRRYTGWGRLSRKLINGIRDKQSGKTILDFLKSDGFANRNFMQLIHDDSLTFKEDIQKAQVSGQGDSLHEHIANLAGSPAIKKGILQTVKVVDELVKVMGRHKPENIVIEMARENQTTQKGQKNSRERMKRIEEGIKELGSQILKEHPVENTQLQNEKLYLYYLQNGRDMYVDQELDINRLSDYDVDHIVPQSFLKDDSIDNKVLTRSDKARGKSDNVPSEEVVKKMKNYWRQLLNAKLITQRKFDNLTKAERGGLSELDKAGFIKRQLVETRQITKHVAQILDSRMNTKYDENDKLIREVKVITLKSKLVSDFRKDFQFYKVREINNYHHAHDAYLNAVVGTALIKKYPKLESEFVYGDYKVYDVRKMIAKSEQEIGKATAKYFFYSNIMNFFKTEITLANGEIRKRPLIETNGETGEIVWDKGRDFATVRKVLSMPQVNIVKKTEVQTGGFSKESILPKRNSDKLIARKKDWDPKKYGGFDSPTVAYSVLVVAKVEKGKSKKLKSVKELLGITIMERSSFEKNPIDFLEAKGYKEVKKDLIIKLPKYSLFELENGRKRMLASAGELQKGNELALPSKYVNFLYLASHYEKLKGSPEDNEQKQLFVEQHKHYLDEIIEQISEFSKRVILADANLDKVLSAYNKHRDKPIREQAENIIHLFTLTNLGAPAAFKYFDTTIDRKRYTSTKEVLDATLIHQSITGLYETRIDLSQLGGDGGGSSGGGPAPGGGLEHLPPPPEVSQFPLNPERLQALTDLVSRALEAKHIEPYQGPGNNPIFPVKKPNGKWRFIHDLRATNSVTRDLASPSPGPPDLTSPPQGLPHLRTIDLTDAFFQIPLPTIFQPYFAFTLPQPNNYGPGTRYSWRVLPQGFKNSPTLFQQQLSHILTPVRKTFPNSLIIQYMDDILLASPAPGELAALTDKVTNALTKEGLPLSPEKTQATPGPIHFLGQVISQDCITYETLPSINVKSTWSLAELQSMLGELQWVSKGTPVLRSSLHQLYLALRGHRDPRDTIKLTSIQVQALRTIQKALTLNCRSRLVNQLPILALIMLRPTGTTAVLFQTKQKWPLVWLHTPHPATSLRPWGQLLANAVIILDKYSLQHYGQVCKSFHHNISNQALTYYLHTSDQSSVAILLQHSHRFHNLGAQPSGPWRSLLQMPQIFQNIDVLRPPFTISPVVINHAPCLFSDGSASKAAFIIWDRQVIHQQVLSLPSTCSAQAGELFGLLAGLQKSQPWVALNIFLDSKFLIGHLRRMAWGAFPGPSTQCELHTQLLPLLQGKTVYVHHVRSHTLLQDPISRLNEATDALMLAPLLPLAGKRTADGSEFEKRTADGSEFESPKKKAKVE

SEQ ID NO: 1516 - protein, 2006 aa, synthetic construct
  source 1..2006: note = Description of Artificial Sequence: Synthetic polypeptide
MPAAKRVKLDGGDKKYSIGLDIGTNSVGWAVITDEYKVPSKKFKVLGNTDRHSIKKNLIGALLFDSGETAEATRLKRTARRRYTRRKNRICYLQEIFSNEMAKVDDSFFHRLEESFLVEEDKKHERHPIFGNIVDEVAYHEKYPTIYHLRKKLVDSTDKADLRLIYLALAHMIKFRGHFLIEGDLNPDNSDVDKLFIQLVQTYNQLFEENPINASGVDAKAILSARLSKSRRLENLIAQLPGEKKNGLFGNLIALSLGLTPNFKSNFDLAEDAKLQLSKDTYDDDLDNLLAQIGDQYADLFLAAKNLSDAILLSDILRVNTEITKAPLSASMIKRYDEHHQDLTLLKALVRQQLPEKYKEIFFDQSKNGYAGYIDGGASQEEFYKFIKPILEKMDGTEELLVKLNREDLLRKQRTFDNGSIPHQIHLGELHAILRRQEDFYPFLKDNREKIEKILTFRIPYYVGPLARGNSRFAWMTRKSEETITPWNFEEVVDKGASAQSFIERMTNFDKNLPNEKVLPKHSLLYEYFTVYNELTKVKYVTEGMRKPAFLSGEQKKAIVDLLFKTNRKVTVKQLKEDYFKKIECFDSVEISGVEDRFNASLGTYHDLLKIIKDKDFLDNEENEDILEDIVLTLTLFEDREMIEERLKTYAHLFDDKVMKQLKRRRYTGWGRLSRKLINGIRDKQSGKTILDFLKSDGFANRNFMQLIHDDSLTFKEDIQKAQVSGQGDSLHEHIANLAGSPAIKKGILQTVKVVDELVKVMGRHKPENIVIEMARENQTTQKGQKNSRERMKRIEEGIKELGSQILKEHPVENTQLQNEKLYLYYLQNGRDMYVDQELDINRLSDYDVDHIVPQSFLKDDSIDNKVLTRSDKARGKSDNVPSEEVVKKMKNYWRQLLNAKLITQRKFDNLTKAERGGLSELDKAGFIKRQLVETRQITKHVAQILDSRMNTKYDENDKLIREVKVITLKSKLVSDFRKDFQFYKVREINNYHHAHDAYLNAVVGTALIKKYPKLESEFVYGDYKVYDVRKMIAKSEQEIGKATAKYFFYSNIMNFFKTEITLANGEIRKRPLIETNGETGEIVWDKGRDFATVRKVLSMPQVNIVKKTEVQTGGFSKESILPKRNSDKLIARKKDWDPKKYGGFDSPTVAYSVLVVAKVEKGKSKKLKSVKELLGITIMERSSFEKNPIDFLEAKGYKEVKKDLIIKLPKYSLFELENGRKRMLASAGELQKGNELALPSKYVNFLYLASHYEKLKGSPEDNEQKQLFVEQHKHYLDEIIEQISEFSKRVILADANLDKVLSAYNKHRDKPIREQAENIIHLFTLTNLGAPAAFKYFDTTIDRKRYTSTKEVLDATLIHQSITGLYETRIDLSQLGGDGGGGSEAAAKGGGLEHLPPPPEVSQFPLNPERLQALTDLVSRALEAKHIEPYQGPGNNPIFPVKKPNGKWRFIHDLRATNSVTRDLASPSPGPPDLTSPPQGLPHLRTIDLTDAFFQIPLPTIFQPYFAFTLPQPNNYGPGTRYSWRVLPQGFKNSPTLFQQQLSHILTPVRKTFPNSLIIQYMDDILLASPAPGELAALTDKVTNALTKEGLPLSPEKTQATPGPIHFLGQVISQDCITYETLPSINVKSTWSLAELQSMLGELQWVSKGTPVLRSSLHQLYLALRGHRDPRDTIKLTSIQVQALRTIQKALTLNCRSRLVNQLPILALIMLRPTGTTAVLFQTKQKWPLVWLHTPHPATSLRPWGQLLANAVIILDKYSLQHYGQVCKSFHHNISNQALTYYLHTSDQSSVAILLQHSHRFHNLGAQPSGPWRSLLQMPQIFQNIDVLRPPFTISPVVINHAPCLFSDGSASKAAFIIWDRQVIHQQVLSLPSTCSAQAGELFGLLAGLQKSQPWVALNIFLDSKFLIGHLRRMAWGAFPGPSTQCELHTQLLPLLQGKTVYVHHVRSHTLLQDPISRLNEATDALMLAPLLPLAGKRTADGSEFEKRTADGSEFESPKKKAKVE

SEQ ID NO: 1517 - protein, 2009 aa, synthetic construct
  source 1..2009: note = Description of Artificial Sequence: Synthetic polypeptide
MPAAKRVKLDGGDKKYSIGLDIGTNSVGWAVITDEYKVPSKKFKVLGNTDRHSIKKNLIGALLFDSGETAEATRLKRTARRRYTRRKNRICYLQEIFSNEMAKVDDSFFHRLEESFLVEEDKKHERHPIFGNIVDEVAYHEKYPTIYHLRKKLVDSTDKADLRLIYLALAHMIKFRGHFLIEGDLNPDNSDVDKLFIQLVQTYNQLFEENPINASGVDAKAILSARLSKSRRLENLIAQLPGEKKNGLFGNLIALSLGLTPNFKSNFDLAEDAKLQLSKDTYDDDLDNLLAQIGDQYADLFLAAKNLSDAILLSDILRVNTEITKAPLSASMIKRYDEHHQDLTLLKALVRQQLPEKYKEIFFDQSKNGYAGYIDGGASQEEFYKFIKPILEKMDGTEELLVKLNREDLLRKQRTFDNGSIPHQIHLGELHAILRRQEDFYPFLKDNREKIEKILTFRIPYYVGPLARGNSRFAWMTRKSEETITPWNFEEVVDKGASAQSFIERMTNFDKNLPNEKVLPKHSLLYEYFTVYNELTKVKYVTEGMRKPAFLSGEQKKAIVDLLFKTNRKVTVKQLKEDYFKKIECFDSVEISGVEDRFNASLGTYHDLLKIIKDKDFLDNEENEDILEDIVLTLTLFEDREMIEERLKTYAHLFDDKVMKQLKRRRYTGWGRLSRKLINGIRDKQSGKTILDFLKSDGFANRNFMQLIHDDSLTFKEDIQKAQVSGQGDSLHEHIANLAGSPAIKKGILQTVKVVDELVKVMGRHKPENIVIEMARENQTTQKGQKNSRERMKRIEEGIKELGSQILKEHPVENTQLQNEKLYLYYLQNGRDMYVDQELDINRLSDYDVDHIVPQSFLKDDSIDNKVLTRSDKARGKSDNVPSEEVVKKMKNYWRQLLNAKLITQRKFDNLTKAERGGLSELDKAGFIKRQLVETRQITKHVAQILDSRMNTKYDENDKLIREVKVITLKSKLVSDFRKDFQFYKVREINNYHHAHDAYLNAVVGTALIKKYPKLESEFVYGDYKVYDVRKMIAKSEQEIGKATAKYFFYSNIMNFFKTEITLANGEIRKRPLIETNGETGEIVWDKGRDFATVRKVLSMPQVNIVKKTEVQTGGFSKESILPKRNSDKLIARKKDWDPKKYGGFDSPTVAYSVLVVAKVEKGKSKKLKSVKELLGITIMERSSFEKNPIDFLEAKGYKEVKKDLIIKLPKYSLFELENGRKRMLASAGELQKGNELALPSKYVNFLYLASHYEKLKGSPEDNEQKQLFVEQHKHYLDEIIEQISEFSKRVILADANLDKVLSAYNKHRDKPIREQAENIIHLFTLTNLGAPAAFKYFDTTIDRKRYTSTKEVLDATLIHQSITGLYETRIDLSQLGGDGGPAPEAAAKGSSGGGLEHLPPPPEVSQFPLNPERLQALTDLVSRALEAKHIEPYQGPGNNPIFPVKKPNGKWRFIHDLRATNSVTRDLASPSPGPPDLTSPPQGLPHLRTIDLTDAFFQIPLPTIFQPYFAFTLPQPNNYGPGTRYSWRVLPQGFKNSPTLFQQQLSHILTPVRKTFPNSLIIQYMDDILLASPAPGELAALTDKVTNALTKEGLPLSPEKTQATPGPIHFLGQVISQDCITYETLPSINVKSTWSLAELQSMLGELQWVSKGTPVLRSSLHQLYLALRGHRDPRDTIKLTSIQVQALRTIQKALTLNCRSRLVNQLPILALIMLRPTGTTAVLFQTKQKWPLVWLHTPHPATSLRPWGQLLANAVIILDKYSLQHYGQVCKSFHHNISNQALTYYLHTSDQSSVAILLQHSHRFHNLGAQPSGPWRSLLQMPQIFQNIDVLRPPFTISPVVINHAPCLFSDGSASKAAFIIWDRQVIHQQVLSLPSTCSAQAGELFGLLAGLQKSQPWVALNIFLDSKFLIGHLRRMAWGAFPGPSTQCELHTQLLPLLQGKTVYVHHVRSHTLLQDPISRLNEATDALMLAPLLPLAGKRTADGSEFEKRTADGSEFESPKKKAKVE

SEQ ID NO: 1518 - protein, 2007 aa, synthetic construct
  source 1..2007: note = Description of Artificial Sequence: Synthetic polypeptide
MPAAKRVKLDGGDKKYSIGLDIGTNSVGWAVITDEYKVPSKKFKVLGNTDRHSIKKNLIGALLFDSGETAEATRLKRTARRRYTRRKNRICYLQEIFSNEMAKVDDSFFHRLEESFLVEEDKKHERHPIFGNIVDEVAYHEKYPTIYHLRKKLVDSTDKADLRLIYLALAHMIKFRGHFLIEGDLNPDNSDVDKLFIQLVQTYNQLFEENPINASGVDAKAILSARLSKSRRLENLIAQLPGEKKNGLFGNLIALSLGLTPNFKSNFDLAEDAKLQLSKDTYDDDLDNLLAQIGDQYADLFLAAKNLSDAILLSDILRVNTEITKAPLSASMIKRYDEHHQDLTLLKALVRQQLPEKYKEIFFDQSKNGYAGYIDGGASQEEFYKFIKPILEKMDGTEELLVKLNREDLLRKQRTFDNGSIPHQIHLGELHAILRRQEDFYPFLKDNREKIEKILTFRIPYYVGPLARGNSRFAWMTRKSEETITPWNFEEVVDKGASAQSFIERMTNFDKNLPNEKVLPKHSLLYEYFTVYNELTKVKYVTEGMRKPAFLSGEQKKAIVDLLFKTNRKVTVKQLKEDYFKKIECFDSVEISGVEDRFNASLGTYHDLLKIIKDKDFLDNEENEDILEDIVLTLTLFEDREMIEERLKTYAHLFDDKVMKQLKRRRYTGWGRLSRKLINGIRDKQSGKTILDFLKSDGFANRNFMQLIHDDSLTFKEDIQKAQVSGQGDSLHEHIANLAGSPAIKKGILQTVKVVDELVKVMGRHKPENIVIEMARENQTTQKGQKNSRERMKRIEEGIKELGSQILKEHPVENTQLQNEKLYLYYLQNGRDMYVDQELDINRLSDYDVDHIVPQSFLKDDSIDNKVLTRSDKARGKSDNVPSEEVVKKMKNYWRQLLNAKLITQRKFDNLTKAERGGLSELDKAGFIKRQLVETRQITKHVAQILDSRMNTKYDENDKLIREVKVITLKSKLVSDFRKDFQFYKVREINNYHHAHDAYLNAVVGTALIKKYPKLESEFVYGDYKVYDVRKMIAKSEQEIGKATAKYFFYSNIMNFFKTEITLANGEIRKRPLIETNGETGEIVWDKGRDFATVRKVLSMPQVNIVKKTEVQTGGFSKESILPKRNSDKLIARKKDWDPKKYGGFDSPTVAYSVLVVAKVEKGKSKKLKSVKELLGITIMERSSFEKNPIDFLEAKGYKEVKKDLIIKLPKYSLFELENGRKRMLASAGELQKGNELALPSKYVNFLYLASHYEKLKGSPEDNEQKQLFVEQHKHYLDEIIEQISEFSKRVILADANLDKVLSAYNKHRDKPIREQAENIIHLFTLTNLGAPAAFKYFDTTIDRKRYTSTKEVLDATLIHQSITGLYETRIDLSQLGGDGGGGGGSSGGSGGGLEHLPPPPEVSQFPLNPERLQALTDLVSRALEAKHIEPYQGPGNNPIFPVKKPNGKWRFIHDLRATNSLTRDLASPSPGPPDLTSLPQDLPHLRTIDLTDAFFQIPLPAVFQPYFAFTLPQPNNHGPGTRYSWRVLPQGFKNSPTLFEQQLSHILAPVRKAFPNSLIIQYMDDILLASPALRELTALTDKVTNALTKEGLPMSLEKTQATPGSIHFLGQVISPDCITYETLPSIHVKSIWSLAELQSMLGELQWVSKGTPVLRSSLHQLYLALRGHRDPRDTIELTSTQVQALKTIQKALALNCRSRLVSQLPILALIILRPTGTTAVLFQTKQKWPLVWLHTPHPATSLRPWGQLLANAIITLDKYSLQHYGQICKSFHHNISNQALTYYLHTSDQSSVAILLQHSHRFHNLGAQPSGPWRSLLQVPQIFQNIDVLRPPFIISPVVIDHAPCLFSDGATSKAAFILWDKQVIHQQVLPLPSTCSAQAGELFGLLAGLQKSKPWPALNIFLDSKFLIGHLRRMALGAFLGPSTQCDLHARLFPLLQGKTVYVHHVRSHTLLQDPISRLNEATDALMLAPLLPLAGKRTADGSEFEKRTADGSEFESPKKKAKVE

SEQ ID NO: 1519 - protein, 2007 aa, synthetic construct
  source 1..2007: note = Description of Artificial Sequence: Synthetic polypeptide
MPAAKRVKLDGGDKKYSIGLDIGTNSVGWAVITDEYKVPSKKFKVLGNTDRHSIKKNLIGALLFDSGETAEATRLKRTARRRYTRRKNRICYLQEIFSNEMAKVDDSFFHRLEESFLVEEDKKHERHPIFGNIVDEVAYHEKYPTIYHLRKKLVDSTDKADLRLIYLALAHMIKFRGHFLIEGDLNPDNSDVDKLFIQLVQTYNQLFEENPINASGVDAKAILSARLSKSRRLENLIAQLPGEKKNGLFGNLIALSLGLTPNFKSNFDLAEDAKLQLSKDTYDDDLDNLLAQIGDQYADLFLAAKNLSDAILLSDILRVNTEITKAPLSASMIKRYDEHHQDLTLLKALVRQQLPEKYKEIFFDQSKNGYAGYIDGGASQEEFYKFIKPILEKMDGTEELLVKLNREDLLRKQRTFDNGSIPHQIHLGELHAILRRQEDFYPFLKDNREKIEKILTFRIPYYVGPLARGNSRFAWMTRKSEETITPWNFEEVVDKGASAQSFIERMTNFDKNLPNEKVLPKHSLLYEYFTVYNELTKVKYVTEGMRKPAFLSGEQKKAIVDLLFKTNRKVTVKQLKEDYFKKIECFDSVEISGVEDRFNASLGTYHDLLKIIKDKDFLDNEENEDILEDIVLTLTLFEDREMIEERLKTYAHLFDDKVMKQLKRRRYTGWGRLSRKLINGIRDKQSGKTILDFLKSDGFANRNFMQLIHDDSLTFKEDIQKAQVSGQGDSLHEHIANLAGSPAIKKGILQTVKVVDELVKVMGRHKPENIVIEMARENQTTQKGQKNSRERMKRIEEGIKELGSQILKEHPVENTQLQNEKLYLYYLQNGRDMYVDQELDINRLSDYDVDHIVPQSFLKDDSIDNKVLTRSDKARGKSDNVPSEEVVKKMKNYWRQLLNAKLITQRKFDNLTKAERGGLSELDKAGFIKRQLVETRQITKHVAQILDSRMNTKYDENDKLIREVKVITLKSKLVSDFRKDFQFYKVREINNYHHAHDAYLNAVVGTALIKKYPKLESEFVYGDYKVYDVRKMIAKSEQEIGKATAKYFFYSNIMNFFKTEITLANGEIRKRPLIETNGETGEIVWDKGRDFATVRKVLSMPQVNIVKKTEVQTGGFSKESILPKRNSDKLIARKKDWDPKKYGGFDSPTVAYSVLVVAKVEKGKSKKLKSVKELLGITIMERSSFEKNPIDFLEAKGYKEVKKDLIIKLPKYSLFELENGRKRMLASAGELQKGNELALPSKYVNFLYLASHYEKLKGSPEDNEQKQLFVEQHKHYLDEIIEQISEFSKRVILADANLDKVLSAYNKHRDKPIREQAENIIHLFTLTNLGAPAAFKYFDTTIDRKRYTSTKEVLDATLIHQSITGLYETRIDLSQLGGDGGGGGGSSPAPGGGLEHLPPPPEVSQFPLNPERLQALTDLVSRALEAKHIEPYQGPGNNPIFPVKKPNGKWRFIHDLRATNSLTRDLASPSPGPPDLTSLPQDLPHLRTIDLTDAFFQIPLPAVFQPYFAFTLPQPNNHGPGTRYSWRVLPQGFKNSPTLFQQQLSHILAPVRKAFPNSLIIQYMDDILLASPALRELTALTDKVTNALTKEGLPMSLEKTQATPGSIHFLGQVISPDCITYETLPSIHVKSIWSLAELQSMLGELQWVSKGTPVLRSSLHQLYLALRGHRDPRDTIELTSTQVQALKTIQKALALNCRSRLVSQLPILALIILRPTGTTAVLFQTKQKWPLVWLHTPHPATSLRPWGQLLANAIITLDKYSLQHYGQICKSFHHNISNQALTYYLHTSDQSSVAILLQHSHRFHNLGAQPSGPWRSLLQVPQIFQNIDVLRPPFIISPVVIDHAPCLFSDGATSKAAFILWDKQVIHQQVLPLPSTCSAQAGELFGLLAGLQKSKPWPALNIFLDSKFLIGHLRRMAWGAFLGPSTQCDLHARLFPLLQGKTVYVHHVRSHTLLQDPISRLNEATDALMLAPLLPLAGKRTADGSEFEKRTADGSEFESPKKKAKVE

SEQ ID NO: 1520 - protein, 2009 aa, synthetic construct
  source 1..2009: note = Description of Artificial Sequence: Synthetic polypeptide
MPAAKRVKLDGGDKKYSIGLDIGTNSVGWAVITDEYKVPSKKFKVLGNTDRHSIKKNLIGALLFDSGETAEATRLKRTARRRYTRRKNRICYLQEIFSNEMAKVDDSFFHRLEESFLVEEDKKHERHPIFGNIVDEVAYHEKYPTIYHLRKKLVDSTDKADLRLIYLALAHMIKFRGHFLIEGDLNPDNSDVDKLFIQLVQTYNQLFEENPINASGVDAKAILSARLSKSRRLENLIAQLPGEKKNGLFGNLIALSLGLTPNFKSNFDLAEDAKLQLSKDTYDDDLDNLLAQIGDQYADLFLAAKNLSDAILLSDILRVNTEITKAPLSASMIKRYDEHHQDLTLLKALVRQQLPEKYKEIFFDQSKNGYAGYIDGGASQEEFYKFIKPILEKMDGTEELLVKLNREDLLRKQRTFDNGSIPHQIHLGELHAILRRQEDFYPFLKDNREKIEKILTFRIPYYVGPLARGNSRFAWMTRKSEETITPWNFEEVVDKGASAQSFIERMTNFDKNLPNEKVLPKHSLLYEYFTVYNELTKVKYVTEGMRKPAFLSGEQKKAIVDLLFKTNRKVTVKQLKEDYFKKIECFDSVEISGVEDRFNASLGTYHDLLKIIKDKDFLDNEENEDILEDIVLTLTLFEDREMIEERLKTYAHLFDDKVMKQLKRRRYTGWGRLSRKLINGIRDKQSGKTILDFLKSDGFANRNFMQLIHDDSLTFKEDIQKAQVSGQGDSLHEHIANLAGSPAIKKGILQTVKVVDELVKVMGRHKPENIVIEMARENQTTQKGQKNSRERMKRIEEGIKELGSQILKEHPVENTQLQNEKLYLYYLQNGRDMYVDQELDINRLSDYDVDHIVPQSFLKDDSIDNKVLTRSDKARGKSDNVPSEEVVKKMKNYWRQLLNAKLITQRKFDNLTKAERGGLSELDKAGFIKRQLVETRQITKHVAQILDSRMNTKYDENDKLIREVKVITLKSKLVSDFRKDFQFYKVREINNYHHAHDAYLNAVVGTALIKKYPKLESEFVYGDYKVYDVRKMIAKSEQEIGKATAKYFFYSNIMNFFKTEITLANGEIRKRPLIETNGETGEIVWDKGRDFATVRKVLSMPQVNIVKKTEVQTGGFSKESILPKRNSDKLIARKKDWDPKKYGGFDSPTVAYSVLVVAKVEKGKSKKLKSVKELLGITIMERSSFEKNPIDFLEAKGYKEVKKDLIIKLPKYSLFELENGRKRMLASAGELQKGNELALPSKYVNFLYLASHYEKLKGSPEDNEQKQLFVEQHKHYLDEIIEQISEFSKRVILADANLDKVLSAYNKHRDKPIREQAENIIHLFTLTNLGAPAAFKYFDTTIDRKRYTSTKEVLDATLIHQSITGLYETRIDLSQLGGDGGPAPEAAAKGGGGGGLEHLPPPPEVSQFPLNPERLQALTDLVSRALEAKHIEPYQGPGNNPIFPVKKPNGKWRFIHDLRATNSLTRDLASPSPGPPDLTSLPQDLPHLRTIDLTDAFFQIPLPAVFQPYFAFTLPQPNNHGPGTRYSWRVLPQGFKNSPTLFQQQLSHILAPVRKAFPNSLIIQYMDDILLASPALRELTALTDKVTNALTKEGLPMSLEKTQATPGSIHFLGQVISPDCITYETLPSIHVKSIWSLAELQSMLGELQWVSKGTPVLRSSLHQLYLALRGHRDPRDTIELTSTQVQALKTIQKALALNCRSRLVSQLPILALIILRPTGTTAVLFQTKQKWPLVWLHTPHPATSLRPWGQLLANAIITLDKYSLQHYGQICKSFHHNISNQALTYYLHTSDQSSVAILLQHSHRFHNLGAQPSGPWRSLLQVPQIFQNIDVLRPPFIISPVVIDHAPCLFSDGATSKAAFILWDKQVIHQQVLPLPSTCSAQAGELFGLLAGLQKSKPWPALNIFLDSKFLIGHLRRMAWGAFLGPSTQCDLHARLFPLLQGKTVYVHHVRSHTLLQDPISRLNEATDALMLAPLLPLAGKRTADGSEFEKRTADGSEFESPKKKAKVE

SEQ ID NO: 1521 - protein, 2023 aa, synthetic construct
  source 1..2023: note = Description of Artificial Sequence: Synthetic polypeptide
MPAAKRVKLDGGDKKYSIGLDIGTNSVGWAVITDEYKVPSKKFKVLGNTDRHSIKKNLIGALLFDSGETAEATRLKRTARRRYTRRKNRICYLQEIFSNEMAKVDDSFFHRLEESFLVEEDKKHERHPIFGNIVDEVAYHEKYPTIYHLRKKLVDSTDKADLRLIYLALAHMIKFRGHFLIEGDLNPDNSDVDKLFIQLVQTYNQLFEENPINASGVDAKAILSARLSKSRRLENLIAQLPGEKKNGLFGNLIALSLGLTPNFKSNFDLAEDAKLQLSKDTYDDDLDNLLAQIGDQYADLFLAAKNLSDAILLSDILRVNTEITKAPLSASMIKRYDEHHQDLTLLKALVRQQLPEKYKEIFFDQSKNGYAGYIDGGASQEEFYKFIKPILEKMDGTEELLVKLNREDLLRKQRTFDNGSIPHQIHLGELHAILRRQEDFYPFLKDNREKIEKILTFRIPYYVGPLARGNSRFAWMTRKSEETITPWNFEEVVDKGASAQSFIERMTNFDKNLPNEKVLPKHSLLYEYFTVYNELTKVKYVTEGMRKPAFLSGEQKKAIVDLLFKTNRKVTVKQLKEDYFKKIECFDSVEISGVEDRFNASLGTYHDLLKIIKDKDFLDNEENEDILEDIVLTLTLFEDREMIEERLKTYAHLFDDKVMKQLKRRRYTGWGRLSRKLINGIRDKQSGKTILDFLKSDGFANRNFMQLIHDDSLTFKEDIQKAQVSGQGDSLHEHIANLAGSPAIKKGILQTVKVVDELVKVMGRHKPENIVIEMARENQTTQKGQKNSRERMKRIEEGIKELGSQILKEHPVENTQLQNEKLYLYYLQNGRDMYVDQELDINRLSDYDVDHIVPQSFLKDDSIDNKVLTRSDKARGKSDNVPSEEVVKKMKNYWRQLLNAKLITQRKFDNLTKAERGGLSELDKAGFIKRQLVETRQITKHVAQILDSRMNTKYDENDKLIREVKVITLKSKLVSDFRKDFQFYKVREINNYHHAHDAYLNAVVGTALIKKYPKLESEFVYGDYKVYDVRKMIAKSEQEIGKATAKYFFYSNIMNFFKTEITLANGEIRKRPLIETNGETGEIVWDKGRDFATVRKVLSMPQVNIVKKTEVQTGGFSKESILPKRNSDKLIARKKDWDPKKYGGFDSPTVAYSVLVVAKVEKGKSKKLKSVKELLGITIMERSSFEKNPIDFLEAKGYKEVKKDLIIKLPKYSLFELENGRKRMLASAGELQKGNELALPSKYVNFLYLASHYEKLKGSPEDNEQKQLFVEQHKHYLDEIIEQISEFSKRVILADANLDKVLSAYNKHRDKPIREQAENIIHLFTLTNLGAPAAFKYFDTTIDRKRYTSTKEVLDATLIHQSITGLYETRIDLSQLGGDGGGGGGSGGGGSGGGGSGGGGSGGGGSGGGLEHLPPPPEVSQFPLNPERLQALTDLVSRALEAKHIEPYQGPGNNPIFPVKKPNGKWRFIHDLRATNSLTRDLASPSPGPPDLTSLPQDLPHLRTIDLTDAFFQIPLPAVFQPYFAFTLPQPNNHGPGTRYSWRVLPQGFKNSPTLFQQQLSHILAPVRKAFPNSLIIQYMDDILLASPALRELTALTDKVTNALTKEGLPMSLEKTQATPGSIHFLGQVISPDCITYETLPSIHVKSIWSLAELQSMLGELQWVSKGTPVLRSSLHQLYLALRGHRDPRDTIELTSTQVQALKTIQKALALNCRSRLVSQLPILALIILRPTGTTAVLFQTKQKWPLVWLHTPHPATSLRPWGQLLANAIITLDKYSLQHYGQICKSFHHNISNQALTYYLHTSDQSSVAILLQHSHRFHNLGAQPSGPWRSLLQVPQIFQNIDVLRPPFIISPVVIDHAPCLFSDGATSKAAFILWDKQVIHQQVLPLPSTCSAQAGELFGLLAGLQKSKPWPALNIFLDSKFLIGHLRRMAWGAFLGPSTQCDLHARLFPLLQGKTVYVHHVRSHTLLQDPISRLNEATDALMLAPLLPLAGKRTADGSEFEKRTADGSEFESPKKKAKVE

SEQ ID NO: 1522 - protein, 2006 aa, synthetic construct
  source 1..2006: note = Description of Artificial Sequence: Synthetic polypeptide
MPAAKRVKLDGGDKKYSIGLDIGTNSVGWAVITDEYKVPSKKFKVLGNTDRHSIKKNLIGALLFDSGETAEATRLKRTARRRYTRRKNRICYLQEIFSNEMAKVDDSFFHRLEESFLVEEDKKHERHPIFGNIVDEVAYHEKYPTIYHLRKKLVDSTDKADLRLIYLALAHMIKFRGHFLIEGDLNPDNSDVDKLFIQLVQTYNQLFEENPINASGVDAKAILSARLSKSRRLENLIAQLPGEKKNGLFGNLIALSLGLTPNFKSNFDLAEDAKLQLSKDTYDDDLDNLLAQIGDQYADLFLAAKNLSDAILLSDILRVNTEITKAPLSASMIKRYDEHHQDLTLLKALVRQQLPEKYKEIFFDQSKNGYAGYIDGGASQEEFYKFIKPILEKMDGTEELLVKLNREDLLRKQRTFDNGSIPHQIHLGELHAILRRQEDFYPFLKDNREKIEKILTFRIPYYVGPLARGNSRFAWMTRKSEETITPWNFEEVVDKGASAQSFIERMTNFDKNLPNEKVLPKHSLLYEYFTVYNELTKVKYVTEGMRKPAFLSGEQKKAIVDLLFKTNRKVTVKQLKEDYFKKIECFDSVEISGVEDRFNASLGTYHDLLKIIKDKDFLDNEENEDILEDIVLTLTLFEDREMIEERLKTYAHLFDDKVMKQLKRRRYTGWGRLSRKLINGIRDKQSGKTILDFLKSDGFANRNFMQLIHDDSLTFKEDIQKAQVSGQGDSLHEHIANLAGSPAIKKGILQTVKVVDELVKVMGRHKPENIVIEMARENQTTQKGQKNSRERMKRIEEGIKELGSQILKEHPVENTQLQNEKLYLYYLQNGRDMYVDQELDINRLSDYDVDHIVPQSFLKDDSIDNKVLTRSDKARGKSDNVPSEEVVKKMKNYWRQLLNAKLITQRKFDNLTKAERGGLSELDKAGFIKRQLVETRQITKHVAQILDSRMNTKYDENDKLIREVKVITLKSKLVSDFRKDFQFYKVREINNYHHAHDAYLNAVVGTALIKKYPKLESEFVYGDYKVYDVRKMIAKSEQEIGKATAKYFFYSNIMNFFKTEITLANGEIRKRPLIETNGETGEIVWDKGRDFATVRKVLSMPQVNIVKKTEVQTGGFSKESILPKRNSDKLIARKKDWDPKKYGGFDSPTVAYSVLVVAKVEKGKSKKLKSVKELLGITIMERSSFEKNPIDFLEAKGYKEVKKDLIIKLPKYSLFELENGRKRMLASAGELQKGNELALPSKYVNFLYLASHYEKLKGSPEDNEQKQLFVEQHKHYLDEIIEQISEFSKRVILADANLDKVLSAYNKHRDKPIREQAENIIHLFTLTNLGAPAAFKYFDTTIDRKRYTSTKEVLDATLIHQSITGLYETRIDLSQLGGDGGEAAAKGGSGGGLEHLPPPPEVSQFPLNPERLQALTDLVSRALEAKHIEPYQGPGNNPIFPVKKPNGKWRFIHDLRATNSLTRDLASPSPGPPDLTSLPQDLPHLRTIDLTDAFFQIPLPAVFQPYFAFTLPQPNNHGPGTRYSWRVLPQGFKNSPTLFQQQLSHILAPVRKAFPNSLIIQYMDDILLASPALRELTALTDKVTNALTKEGLPMSLEKTQATPGSIHFLGQVISPDCITYETLPSIHVKSIWSLAELQSMLGELQWVSKGTPVLRSSLHQLYLALRGHRDPRDTIELTSTQVQALKTIQKALALNCRSRLVSQLPILALIILRPTGTTAVLFQTKQKWPLVWLHTPHPATSLRPWGQLLANAIITLDKYSLQHYGQICKSFHHNISNQALTYYLHTSDQSSVAILLQHSHRFHNLGAQPSGPWRSLLQVPQIFQNIDVLRPPFIISPVVIDHAPCLFSDGATSKAAFILWDKQVIHQQVLPLPSTCSAQAGELFGLLAGLQKSKPWPALNIFLDSKFLIGHLRRMAWGAFLGPSTQCDLHARLFPLLQGKTVYVHHVRSHTLLQDPISRLNEATDALMLAPLLPLAGKRTADGSEFEKRTADGSEFESPKKKAKVE

SEQ ID NO: 1523 - protein, 2007 aa, synthetic construct
  source 1..2007: note = Description of Artificial Sequence: Synthetic polypeptide
MPAAKRVKLDGGDKKYSIGLDIGTNSVGWAVITDEYKVPSKKFKVLGNTDRHSIKKNLIGALLFDSGETAEATRLKRTARRRYTRRKNRICYLQEIFSNEMAKVDDSFFHRLEESFLVEEDKKHERHPIFGNIVDEVAYHEKYPTIYHLRKKLVDSTDKADLRLIYLALAHMIKFRGHFLIEGDLNPDNSDVDKLFIQLVQTYNQLFEENPINASGVDAKAILSARLSKSRRLENLIAQLPGEKKNGLFGNLIALSLGLTPNFKSNFDLAEDAKLQLSKDTYDDDLDNLLAQIGDQYADLFLAAKNLSDAILLSDILRVNTEITKAPLSASMIKRYDEHHQDLTLLKALVRQQLPEKYKEIFFDQSKNGYAGYIDGGASQEEFYKFIKPILEKMDGTEELLVKLNREDLLRKQRTFDNGSIPHQIHLGELHAILRRQEDFYPFLKDNREKIEKILTFRIPYYVGPLARGNSRFAWMTRKSEETITPWNFEEVVDKGASAQSFIERMTNFDKNLPNEKVLPKHSLLYEYFTVYNELTKVKYVTEGMRKPAFLSGEQKKAIVDLLFKTNRKVTVKQLKEDYFKKIECFDSVEISGVEDRFNASLGTYHDLLKIIKDKDFLDNEENEDILEDIVLTLTLFEDREMIEERLKTYAHLFDDKVMKQLKRRRYTGWGRLSRKLINGIRDKQSGKTILDFLKSDGFANRNFMQLIHDDSLTFKEDIQKAQVSGQGDSLHEHIANLAGSPAIKKGILQTVKVVDELVKVMGRHKPENIVIEMARENQTTQKGQKNSRERMKRIEEGIKELGSQILKEHPVENTQLQNEKLYLYYLQNGRDMYVDQELDINRLSDYDVDHIVPQSFLKDDSIDNKVLTRSDKARGKSDNVPSEEVVKKMKNYWRQLLNAKLITQRKFDNLTKAERGGLSELDKAGFIKRQLVETRQITKHVAQILDSRMNTKYDENDKLIREVKVITLKSKLVSDFRKDFQFYKVREINNYHHAHDAYLNAVVGTALIKKYPKLESEFVYGDYKVYDVRKMIAKSEQEIGKATAKYFFYSNIMNFFKTEITLANGEIRKRPLIETNGETGEIVWDKGRDFATVRKVLSMPQVNIVKKTEVQTGGFSKESILPKRNSDKLIARKKDWDPKKYGGFDSPTVAYSVLVVAKVEKGKSKKLKSVKELLGITIMERSSFEKNPIDFLEAKGYKEVKKDLIIKLPKYSLFELENGRKRMLASAGELQKGNELALPSKYVNFLYLASHYEKLKGSPEDNEQKQLFVEQHKHYLDEIIEQISEFSKRVILADANLDKVLSAYNKHRDKPIREQAENIIHLFTLTNLGAPAAFKYFDTTIDRKRYTSTKEVLDATLIHQSITGLYETRIDLSQLGGDGGGGGGSSGGSGGGLEHLPPPPEVSQFPLNPERLQALTDLVSRALEAKHIEPYQGPGNNPIFPVKKPNGKWRFIHDLRATNSLTRDLASPSPGPPDLTSLPQDLPHLRTIDLTDAFFQIPLPAVFQPYFAFTLPQPNNHGPGTRYSWRVLPQGFKNSPTLFQQQLSHILAPVRKAFPNSLIIQYMDDILLASPALRELTALTDKVTNALTKEGLPMSLEKTQATPGSIHFLGQVISPDCITYETLPSIHVKSIWSLAELQSMLGELQWVSKGTPVLRSSLHQLYLALRGHRDPRDTIELTSTQVQALKTIQKALALNCRSRLVSQLPILALIILRPTGTTAVLFQTKQKWPLVWLHTPHPATSLRPWGQLLANAIITLDKYSLQHYGQICKSFHHNISNQALTYYLHTSDQSSVAILLQHSHRFHNLGAQPSGPWRSLLQVPQIFQNIDVLRPPFIISPVVIDHAPCLFSDGATSKAAFILWDKQVIHQQVLPLPSTCSAQAGELFGLLAGLQKSKPWPALNIFLDSKFLIGHLRRMAWGAFLGPSTQCDLHARLFPLLQGKTVYVHHVRSHTLLQDPISRLNEATDALMLAPLLPLAGKRTADGSEFEKRTADGSEFESPKKKAKVE

SEQ ID NO: 1524 - protein, 2009 aa, synthetic construct
  source 1..2009: note = Description of Artificial Sequence: Synthetic polypeptide
MPAAKRVKLDGGDKKYSIGLDIGTNSVGWAVITDEYKVPSKKFKVLGNTDRHSIKKNLIGALLFDSGETAEATRLKRTARRRYTRRKNRICYLQEIFSNEMAKVDDSFFHRLEESFLVEEDKKHERHPIFGNIVDEVAYHEKYPTIYHLRKKLVDSTDKADLRLIYLALAHMIKFRGHFLIEGDLNPDNSDVDKLFIQLVQTYNQLFEENPINASGVDAKAILSARLSKSRRLENLIAQLPGEKKNGLFGNLIALSLGLTPNFKSNFDLAEDAKLQLSKDTYDDDLDNLLAQIGDQYADLFLAAKNLSDAILLSDILRVNTEITKAPLSASMIKRYDEHHQDLTLLKALVRQQLPEKYKEIFFDQSKNGYAGYIDGGASQEEFYKFIKPILEKMDGTEELLVKLNREDLLRKQRTFDNGSIPHQIHLGELHAILRRQEDFYPFLKDNREKIEKILTFRIPYYVGPLARGNSRFAWMTRKSEETITPWNFEEVVDKGASAQSFIERMTNFDKNLPNEKVLPKHSLLYEYFTVYNELTKVKYVTEGMRKPAFLSGEQKKAIVDLLFKTNRKVTVKQLKEDYFKKIECFDSVEISGVEDRFNASLGTYHDLLKIIKDKDFLDNEENEDILEDIVLTLTLFEDREMIEERLKTYAHLFDDKVMKQLKRRRYTGWGRLSRKLINGIRDKQSGKTILDFLKSDGFANRNFMQLIHDDSLTFKEDIQKAQVSGQGDSLHEHIANLAGSPAIKKGILQTVKVVDELVKVMGRHKPENIVIEMARENQTTQKGQKNSRERMKRIEEGIKELGSQILKEHPVENTQLQNEKLYLYYLQNGRDMYVDQELDINRLSDYDVDHIVPQSFLKDDSIDNKVLTRSDKARGKSDNVPSEEVVKKMKNYWRQLLNAKLITQRKFDNLTKAERGGLSELDKAGFIKRQLVETRQITKHVAQILDSRMNTKYDENDKLIREVKVITLKSKLVSDFRKDFQFYKVREINNYHHAHDAYLNAVVGTALIKKYPKLESEFVYGDYKVYDVRKMIAKSEQEIGKATAKYFFYSNIMNFFKTEITLANGEIRKRPLIETNGETGEIVWDKGRDFATVRKVLSMPQVNIVKKTEVQTGGFSKESILPKRNSDKLIARKKDWDPKKYGGFDSPTVAYSVLVVAKVEKGKSKKLKSVKELLGITIMERSSFEKNPIDFLEAKGYKEVKKDLIIKLPKYSLFELENGRKRMLASAGELQKGNELALPSKYVNFLYLASHYEKLKGSPEDNEQKQLFVEQHKHYLDEIIEQISEFSKRVILADANLDKVLSAYNKHRDKPIREQAENIIHLFTLTNLGAPAAFKYFDTTIDRKRYTSTKEVLDATLIHQSITGLYETRIDLSQLGGDGGEAAAKGGSGGGGGGLEHLPPPPEVSQFPLNPERLQALTDLVSRALEAKHIEPYQGPGNNPIFPVKKPNGKWRFIHDLRATNSLTRDLASPSPGPPDLTSLPQDLPHLRTIDLTDAFFQIPLPAVFQPYFAFTLPQPNNHGPGTRYSWRVLPQGFKNSPTLFQQQLSHILAPVRKAFPNSLIIQYMDDILLASPALRELTALTDKVTNALTKEGLPMSLEKTQATPGSIHFLGQVISPDCITYETLPSIHVKSIWSLAELQSMLGELQWVSKGTPVLRSSLHQLYLALRGHRDPRDTIELTSTQVQALKTIQKALALNCRSRLVSQLPILALIILRPTGTTAVLFQTKQKWPLVWLHTPHPATSLRPWGQLLANAIITLDKYSLQHYGQICKSFHHNISNQALTYYLHTSDQSSVAILLQHSHRFHNLGAQPSGPWRSLLQVPQIFQNIDVLRPPFIISPVVIDHAPCLFSDGATSKAAFILWDKQVIHQQVLPLPSTCSAQAGELFGLLAGLQKSKPWPALNIFLDSKFLIGHLRRMAWGAFLGPSTQCDLHARLFPLLQGKTVYVHHVRSHTLLQDPISRLNEATDALMLAPLLPLAGKRTADGSEFEKRTADGSEFESPKKKAKVE

SEQ ID NO: 1525 - protein, 2007 aa, synthetic construct
  source 1..2007: note = Description of Artificial Sequence: Synthetic polypeptide
MPAAKRVKLDGGDKKYSIGLDIGTNSVGWAVITDEYKVPSKKFKVLGNTDRHSIKKNLIGALLFDSGETAEATRLKRTARRRYTRRKNRICYLQEIFSNEMAKVDDSFFHRLEESFLVEEDKKHERHPIFGNIVDEVAYHEKYPTIYHLRKKLVDSTDKADLRLIYLALAHMIKFRGHFLIEGDLNPDNSDVDKLFIQLVQTYNQLFEENPINASGVDAKAILSARLSKSRRLENLIAQLPGEKKNGLFGNLIALSLGLTPNFKSNFDLAEDAKLQLSKDTYDDDLDNLLAQIGDQYADLFLAAKNLSDAILLSDILRVNTEITKAPLSASMIKRYDEHHQDLTLLKALVRQQLPEKYKEIFFDQSKNGYAGYIDGGASQEEFYKFIKPILEKMDGTEELLVKLNREDLLRKQRTFDNGSIPHQIHLGELHAILRRQEDFYPFLKDNREKIEKILTFRIPYYVGPLARGNSRFAWMTRKSEETITPWNFEEVVDKGASAQSFIERMTNFDKNLPNEKVLPKHSLLYEYFTVYNELTKVKYVTEGMRKPAFLSGEQKKAIVDLLFKTNRKVTVKQLKEDYFKKIECFDSVEISGVEDRFNASLGTYHDLLKIIKDKDFLDNEENEDILEDIVLTLTLFEDREMIEERLKTYAHLFDDKVMKQLKRRRYTGWGRLSRKLINGIRDKQSGKTILDFLKSDGFANRNFMQLIHDDSLTFKEDIQKAQVSGQGDSLHEHIANLAGSPAIKKGILQTVKVVDELVKVMGRHKPENIVIEMARENQTTQKGQKNSRERMKRIEEGIKELGSQILKEHPVENTQLQNEKLYLYYLQNGRDMYVDQELDINRLSDYDVDHIVPQSFLKDDSIDNKVLTRSDKARGKSDNVPSEEVVKKMKNYWRQLLNAKLITQRKFDNLTKAERGGLSELDKAGFIKRQLVETRQITKHVAQILDSRMNTKYDENDKLIREVKVITLKSKLVSDFRKDFQFYKVREINNYHHAHDAYLNAVVGTALIKKYPKLESEFVYGDYKVYDVRKMIAKSEQEIGKATAKYFFYSNIMNFFKTEITLANGEIRKRPLIETNGETGEIVWDKGRDFATVRKVLSMPQVNIVKKTEVQTGGFSKESILPKRNSDKLIARKKDWDPKKYGGFDSPTVAYSVLVVAKVEKGKSKKLKSVKELLGITIMERSSFEKNPIDFLEAKGYKEVKKDLIIKLPKYSLFELENGRKRMLASAGELQKGNELALPSKYVNFLYLASHYEKLKGSPEDNEQKQLFVEQHKHYLDEIIEQISEFSKRVILADANLDKVLSAYNKHRDKPIREQAENIIHLFTLTNLGAPAAFKYFDTTIDRKRYTSTKEVLDATLIHQSITGLYETRIDLSQLGGDGGGSSPAPGGGGGGLEHLPPPPEVSQFPLNPERLQALTDLVSRALEAKHIEPYQGPGNNPIFPVKKPNGKWRFIHDLRATNSLTRDLASPSPGPPDLTSLPQDLPHLRTIDLTDAFFQIPLPAVFQPYFAFTLPQPNNHGPGTRYSWRVLPQGFKNSPTLFQQQLSHILAPVRKAFPNSLIIQYMDDILLASPALRELTALTDKVTNALTKEGLPMSLEKTQATPGSIHFLGQVISPDCITYETLPSIHVKSIWSLAELQSMLGELQWVSKGTPVLRSSLHQLYLALRGHRDPRDTIELTSTQVQALKTIQKALALNCRSRLVSQLPILALIILRPTGTTAVLFQTKQKWPLVWLHTPHPATSLRPWGQLLANAIITLDKYSLQHYGQICKSFHHNISNQALTYYLHTSDQSSVAILLQHSHRFHNLGAQPSGPWRSLLQVPQIFQNIDVLRPPFIISPVVIDHAPCLFSDGATSKAAFILWDKQVIHQQVLPLPSTCSAQAGELFGLLAGLQKSKPWPALNIFLDSKFLIGHLRRMAWGAFLGPSTQCDLHARLFPLLQGKTVYVHHVRSHTLLQDPISRLNEATDALMLAPLLPLAGKRTADGSEFEKRTADGSEFESPKKKAKVE

SEQ ID NO: 1526 - protein, 2009 aa, synthetic construct
  source 1..2009: note = Description of Artificial Sequence: Synthetic polypeptide
MPAAKRVKLDGGDKKYSIGLDIGTNSVGWAVITDEYKVPSKKFKVLGNTDRHSIKKNLIGALLFDSGETAEATRLKRTARRRYTRRKNRICYLQEIFSNEMAKVDDSFFHRLEESFLVEEDKKHERHPIFGNIVDEVAYHEKYPTIYHLRKKLVDSTDKADLRLIYLALAHMIKFRGHFLIEGDLNPDNSDVDKLFIQLVQTYNQLFEENPINASGVDAKAILSARLSKSRRLENLIAQLPGEKKNGLFGNLIALSLGLTPNFKSNFDLAEDAKLQLSKDTYDDDLDNLLAQIGDQYADLFLAAKNLSDAILLSDILRVNTEITKAPLSASMIKRYDEHHQDLTLLKALVRQQLPEKYKEIFFDQSKNGYAGYIDGGASQEEFYKFIKPILEKMDGTEELLVKLNREDLLRKQRTFDNGSIPHQIHLGELHAILRRQEDFYPFLKDNREKIEKILTFRIPYYVGPLARGNSRFAWMTRKSEETITPWNFEEVVDKGASAQSFIERMTNFDKNLPNEKVLPKHSLLYEYFTVYNELTKVKYVTEGMRKPAFLSGEQKKAIVDLLFKTNRKVTVKQLKEDYFKKIECFDSVEISGVEDRFNASLGTYHDLLKIIKDKDFLDNEENEDILEDIVLTLTLFEDREMIEERLKTYAHLFDDKVMKQLKRRRYTGWGRLSRKLINGIRDKQSGKTILDFLKSDGFANRNFMQLIHDDSLTFKEDIQKAQVSGQGDSLHEHIANLAGSPAIKKGILQTVKVVDELVKVMGRHKPENIVIEMARENQTTQKGQKNSRERMKRIEEGIKELGSQILKEHPVENTQLQNEKLYLYYLQNGRDMYVDQELDINRLSDYDVDHIVPQSFLKDDSIDNKVLTRSDKARGKSDNVPSEEVVKKMKNYWRQLLNAKLITQRKFDNLTKAERGGLSELDKAGFIKRQLVETRQITKHVAQILDSRMNTKYDENDKLIREVKVITLKSKLVSDFRKDFQFYKVREINNYHHAHDAYLNAVVGTALIKKYPKLESEFVYGDYKVYDVRKMIAKSEQEIGKATAKYFFYSNIMNFFKTEITLANGEIRKRPLIETNGETGEIVWDKGRDFATVRKVLSMPQVNIVKKTEVQTGGFSKESILPKRNSDKLIARKKDWDPKKYGGFDSPTVAYSVLVVAKVEKGKSKKLKSVKELLGITIMERSSFEKNPIDFLEAKGYKEVKKDLIIKLPKYSLFELENGRKRMLASAGELQKGNELALPSKYVNFLYLASHYEKLKGSPEDNEQKQLFVEQHKHYLDEIIEQISEFSKRVILADANLDKVLSAYNKHRDKPIREQAENIIHLFTLTNLGAPAAFKYFDTTIDRKRYTSTKEVLDATLIHQSITGLYETRIDLSQLGGDGGEAAAKGGGGSSGGGLEHLPPPPEVSQFPLNPERLQALTDLVSRALEAKHIEPYQGPGNNPIFPVKKPNGKWRFIHDLRATNSLTRDLASPSPGPPDLTSLPQDLPHLRTIDLTDAFFQIPLPAVFQPYFAFTLPQPNNHGPGTRYSWRVLPQGFKNSPTLFQQQLSHILAPVRKAFPNSLIIQYMDDILLASPALRELTALTDKVTNALTKEGLPMSLEKTQATPGSIHFLGQVISPDCITYETLPSIHVKSIWSLAELQSMLGELQWVSKGTPVLRSSLHQLYLALRGHRDPRDTIELTSTQVQALKTIQKALALNCRSRLVSQLPILALIILRPTGTTAVLFQTKQKWPLVWLHTPHPATSLRPWGQLLANAIITLDKYSLQHYGQICKSFHHNISNQALTYYLHTSDQSSVAILLQHSHRFHNLGAQPSGPWRSLLQVPQIFQNIDVLRPPFIISPVVIDHAPCLFSDGATSKAAFILWDKQVIHQQVLPLPSTCSAQAGELFGLLAGLQKSKPWPALNIFLDSKFLIGHLRRMAWGAFLGPSTQCDLHARLFPLLQGKTVYVHHVRSHTLLQDPISRLNEATDALMLAPLLPLAGKRTADGSEFEKRTADGSEFESPKKKAKVE

SEQ ID NO: 1527 - protein, 2007 aa, synthetic construct
  source 1..2007: note = Description of Artificial Sequence: Synthetic polypeptide
MPAAKRVKLDGGDKKYSIGLDIGTNSVGWAVITDEYKVPSKKFKVLGNTDRHSIKKNLIGALLFDSGETAEATRLKRTARRRYTRRKNRICYLQEIFSNEMAKVDDSFFHRLEESFLVEEDKKHERHPIFGNIVDEVAYHEKYPTIYHLRKKLVDSTDKADLRLIYLALAHMIKFRGHFLIEGDLNPDNSDVDKLFIQLVQTYNQLFEENPINASGVDAKAILSARLSKSRRLENLIAQLPGEKKNGLFGNLIALSLGLTPNFKSNFDLAEDAKLQLSKDTYDDDLDNLLAQIGDQYADLFLAAKNLSDAILLSDILRVNTEITKAPLSASMIKRYDEHHQDLTLLKALVRQQLPEKYKEIFFDQSKNGYAGYIDGGASQEEFYKFIKPILEKMDGTEELLVKLNREDLLRKQRTFDNGSIPHQIHLGELHAILRRQEDFYPFLKDNREKIEKILTFRIPYYVGPLARGNSRFAWMTRKSEETITPWNFEEVVDKGASAQSFIERMTNFDKNLPNEKVLPKHSLLYEYFTVYNELTKVKYVTEGMRKPAFLSGEQKKAIVDLLFKTNRKVTVKQLKEDYFKKIECFDSVEISGVEDRFNASLGTYHDLLKIIKDKDFLDNEENEDILEDIVLTLTLFEDREMIEERLKTYAHLFDDKVMKQLKRRRYTGWGRLSRKLINGIRDKQSGKTILDFLKSDGFANRNFMQLIHDDSLTFKEDIQKAQVSGQGDSLHEHIANLAGSPAIKKGILQTVKVVDELVKVMGRHKPENIVIEMARENQTTQKGQKNSRERMKRIEEGIKELGSQILKEHPVENTQLQNEKLYLYYLQNGRDMYVDQELDINRLSDYDVDHIVPQSFLKDDSIDNKVLTRSDKARGKSDNVPSEEVVKKMKNYWRQLLNAKLITQRKFDNLTKAERGGLSELDKAGFIKRQLVETRQITKHVAQILDSRMNTKYDENDKLIREVKVITLKSKLVSDFRKDFQFYKVREINNYHHAHDAYLNAVVGTALIKKYPKLESEFVYGDYKVYDVRKMIAKSEQEIGKATAKYFFYSNIMNFFKTEITLANGEIRKRPLIETNGETGEIVWDKGRDFATVRKVLSMPQVNIVKKTEVQTGGFSKESILPKRNSDKLIARKKDWDPKKYGGFDSPTVAYSVLVVAKVEKGKSKKLKSVKELLGITIMERSSFEKNPIDFLEAKGYKEVKKDLIIKLPKYSLFELENGRKRMLASAGELQKGNELALPSKYVNFLYLASHYEKLKGSPEDNEQKQLFVEQHKHYLDEIIEQISEFSKRVILADANLDKVLSAYNKHRDKPIREQAENIIHLFTLTNLGAPAAFKYFDTTIDRKRYTSTKEVLDATLIHQSITGLYETRIDLSQLGGDGGPAPGGGGSSGGGLEHLPPPPEVSQFPLNPERLQALTDLVSRALEAKHIEPYQGPGNNPIFPVKKPNGKWRFIHDLRATNSLTRDLASPSPGPPDLTSPPQDLPHLRTIDLTDAFFQIPLPAVFQPYFAFTLPQPNNHGPGTRYSWRVLPQGFKNSPTLFQQQLSHILAPVRKAFPNSLIIQYMDDILLASPALRELTALTDKVTNALTKEGLPMSLEKTQATPGSIHFLGQVISPDCITYETLPSIHVKSIWSLAELQSMLGELQWVSKGTPVLRSSLHQLYLALRGHRDPRDTIELTSTQVQALKTIQKALALNCRSRLVSQLPILALIILRPTGTTAVLFQTKQKWPLVWLHTPHPATSLRPWGQLLANAIITLDKYSLQHYGQICKSFHHNISNQALTYYLHTSDQSSVAILLQHSHRFHNLGAQPSGPWRSLLQVPQIFQNIDVLRPPFIISPVVIDHAPCLFSDGATSKAAFILWDKQVIHQQVLPLPSTCSAQAGELFGLLAGLQKSKPWPALNIFLDSKFLIGHLRRMAWGAFLGPSTQCDLHARLFPLLQGKTVYVHHVRSHTLLQDPISRLNEATDALMLAPLLPLAGKRTADGSEFEKRTADGSEFESPKKKAKVE

SEQ ID NO: 1528 - protein, 2028 aa, synthetic construct
  source 1..2028: note = Description of Artificial Sequence: Synthetic polypeptide
MPAAKRVKLDGGDKKYSIGLDIGTNSVGWAVITDEYKVPSKKFKVLGNTDRHSIKKNLIGALLFDSGETAEATRLKRTARRRYTRRKNRICYLQEIFSNEMAKVDDSFFHRLEESFLVEEDKKHERHPIFGNIVDEVAYHEKYPTIYHLRKKLVDSTDKADLRLIYLALAHMIKFRGHFLIEGDLNPDNSDVDKLFIQLVQTYNQLFEENPINASGVDAKAILSARLSKSRRLENLIAQLPGEKKNGLFGNLIALSLGLTPNFKSNFDLAEDAKLQLSKDTYDDDLDNLLAQIGDQYADLFLAAKNLSDAILLSDILRVNTEITKAPLSASMIKRYDEHHQDLTLLKALVRQQLPEKYKEIFFDQSKNGYAGYIDGGASQEEFYKFIKPILEKMDGTEELLVKLNREDLLRKQRTFDNGSIPHQIHLGELHAILRRQEDFYPFLKDNREKIEKILTFRIPYYVGPLARGNSRFAWMTRKSEETITPWNFEEVVDKGASAQSFIERMTNFDKNLPNEKVLPKHSLLYEYFTVYNELTKVKYVTEGMRKPAFLSGEQKKAIVDLLFKTNRKVTVKQLKEDYFKKIECFDSVEISGVEDRFNASLGTYHDLLKIIKDKDFLDNEENEDILEDIVLTLTLFEDREMIEERLKTYAHLFDDKVMKQLKRRRYTGWGRLSRKLINGIRDKQSGKTILDFLKSDGFANRNFMQLIHDDSLTFKEDIQKAQVSGQGDSLHEHIANLAGSPAIKKGILQTVKVVDELVKVMGRHKPENIVIEMARENQTTQKGQKNSRERMKRIEEGIKELGSQILKEHPVENTQLQNEKLYLYYLQNGRDMYVDQELDINRLSDYDVDHIVPQSFLKDDSIDNKVLTRSDKARGKSDNVPSEEVVKKMKNYWRQLLNAKLITQRKFDNLTKAERGGLSELDKAGFIKRQLVETRQITKHVAQILDSRMNTKYDENDKLIREVKVITLKSKLVSDFRKDFQFYKVREINNYHHAHDAYLNAVVGTALIKKYPKLESEFVYGDYKVYDVRKMIAKSEQEIGKATAKYFFYSNIMNFFKTEITLANGEIRKRPLIETNGETGEIVWDKGRDFATVRKVLSMPQVNIVKKTEVQTGGFSKESILPKRNSDKLIARKKDWDPKKYGGFDSPTVAYSVLVVAKVEKGKSKKLKSVKELLGITIMERSSFEKNPIDFLEAKGYKEVKKDLIIKLPKYSLFELENGRKRMLASAGELQKGNELALPSKYVNFLYLASHYEKLKGSPEDNEQKQLFVEQHKHYLDEIIEQISEFSKRVILADANLDKVLSAYNKHRDKPIREQAENIIHLFTLTNLGAPAAFKYFDTTIDRKRYTSTKEVLDATLIHQSITGLYETRIDLSQLGGDGGGGGGSGGGGSGGGGSGGGGSGGGGSGGGGSGGGLEHLPPPPEVSQFPLNPERLQALTDLVSRALEAKHIEPYQGPGNNPIFPVKKPNGKWRFIHDLRATNSLTRDLASPSPGPPDLTSPPQDLPHLRTIDLTDAFFQIPLPAVFQPYFAFTLPQPNNHGPGTRYSWRVLPQGFKNSPTLFQQQLSHILAPVRKAFPNSLIIQYMDDILLASPALRELTALTDKVTNALTKEGLPMSLEKTQATPGSIHFLGQVISPDCITYETLPSIHVKSIWSLAELQSMLGELQWVSKGTPVLRSSLHQLYLALRGHRDPRDTIELTSTQVQALKTIQKALALNCRSRLVSQLPILALIILRPTGTTAVLFQTKQKWPLVWLHTPHPATSLRPWGQLLANAIITLDKYSLQHYGQICKSFHHNISNQALTYYLHTSDQSSVAILLQHSHRFHNLGAQPSGPWRSLLQVPQIFQNIDVLRPPFIISPVVIDHAPCLFSDGATSKAAFILWDKQVIHQQVLPLPSTCSAQAGELFGLLAGLQKSKPWPALNIFLDSKFLIGHLRRMAWGAFLGPSTQCDLHARLFPLLQGKTVYVHHVRSHTLLQDPISRLNEATDALMLAPLLPLAGKRTADGSEFEKRTADGSEFESPKKKAKVE

SEQ ID NO: 1529 - protein, 2007 aa, synthetic construct
  source 1..2007: note = Description of Artificial Sequence: Synthetic polypeptide
MPAAKRVKLDGGDKKYSIGLDIGTNSVGWAVITDEYKVPSKKFKVLGNTDRHSIKKNLIGALLFDSGETAEATRLKRTARRRYTRRKNRICYLQEIFSNEMAKVDDSFFHRLEESFLVEEDKKHERHPIFGNIVDEVAYHEKYPTIYHLRKKLVDSTDKADLRLIYLALAHMIKFRGHFLIEGDLNPDNSDVDKLFIQLVQTYNQLFEENPINASGVDAKAILSARLSKSRRLENLIAQLPGEKKNGLFGNLIALSLGLTPNFKSNFDLAEDAKLQLSKDTYDDDLDNLLAQIGDQYADLFLAAKNLSDAILLSDILRVNTEITKAPLSASMIKRYDEHHQDLTLLKALVRQQLPEKYKEIFFDQSKNGYAGYIDGGASQEEFYKFIKPILEKMDGTEELLVKLNREDLLRKQRTFDNGSIPHQIHLGELHAILRRQEDFYPFLKDNREKIEKILTFRIPYYVGPLARGNSRFAWMTRKSEETITPWNFEEVVDKGASAQSFIERMTNFDKNLPNEKVLPKHSLLYEYFTVYNELTKVKYVTEGMRKPAFLSGEQKKAIVDLLFKTNRKVTVKQLKEDYFKKIECFDSVEISGVEDRFNASLGTYHDLLKIIKDKDFLDNEENEDILEDIVLTLTLFEDREMIEERLKTYAHLFDDKVMKQLKRRRYTGWGRLSRKLINGIRDKQSGKTILDFLKSDGFANRNFMQLIHDDSLTFKEDIQKAQVSGQGDSLHEHIANLAGSPAIKKGILQTVKVVDELVKVMGRHKPENIVIEMARENQTTQKGQKNSRERMKRIEEGIKELGSQILKEHPVENTQLQNEKLYLYYLQNGRDMYVDQELDINRLSDYDVDHIVPQSFLKDDSIDNKVLTRSDKARGKSDNVPSEEVVKKMKNYWRQLLNAKLITQRKFDNLTKAERGGLSELDKAGFIKRQLVETRQITKHVAQILDSRMNTKYDENDKLIREVKVITLKSKLVSDFRKDFQFYKVREINNYHHAHDAYLNAVVGTALIKKYPKLESEFVYGDYKVYDVRKMIAKSEQEIGKATAKYFFYSNIMNFFKTEITLANGEIRKRPLIETNGETGEIVWDKGRDFATVRKVLSMPQVNIVKKTEVQTGGFSKESILPKRNSDKLIARKKDWDPKKYGGFDSPTVAYSVLVVAKVEKGKSKKLKSVKELLGITIMERSSFEKNPIDFLEAKGYKEVKKDLIIKLPKYSLFELENGRKRMLASAGELQKGNELALPSKYVNFLYLASHYEKLKGSPEDNEQKQLFVEQHKHYLDEIIEQISEFSKRVILADANLDKVLSAYNKHRDKPIREQAENIIHLFTLTNLGAPAAFKYFDTTIDRKRYTSTKEVLDATLIHQSITGLYETRIDLSQLGGDGGGGGGGSPAPGGGLEHLPPPPEVSQFPLNPERLQALTDLVSRALEAKHIEPYQGPGNNPIFPVKKPNGKWRFIHDLRATNSLTRDLASPSPGPPDLTSPPQDLPHLRTIDLTDAFFQIPLPAVFQPYFAFTLPQPNNHGPGTRYSWRVLPQGFKNSPTLFQQQLSHILAPVRKAFPNSLIIQYMDDILLASPALRELTALTDKVTNALTKEGLPMSLEKTQATPGSIHFLGQVISPDCITYETLPSIHVKSIWSLAELQSMLGELQWVSKGTPVLRSSLHQLYLALRGHRDPRDTIELTSTQVQALKTIQKALALNCRSRLVSQLPILALIILRPTGTTAVLFQTKQKWPLVWLHTPHPATSLRPWGQLLANAIITLDKYSLQHYGQICKSFHHNISNQALTYYLHTSDQSSVAILLQHSHRFHNLGAQPSGPWRSLLQVPQIFQNIDVLRPPFIISPVVIDHAPCLFSDGATSKAAFILWDKQVIHQQVLPLPSTCSAQAGELFGLLAGLQKSKPWPALNIFLDSKFLIGHLRRMAWGAFLGPSTQCDLHARLFPLLQGKTVYVHHVRSHTLLQDPISRLNEATDALMLAPLLPLAGKRTADGSEFEKRTADGSEFESPKKKAKVE

SEQ ID NO: 1530 - protein, 2004 aa, synthetic construct
  source 1..2004: note = Description of Artificial Sequence: Synthetic polypeptide
MPAAKRVKLDGGDKKYSIGLDIGTNSVGWAVITDEYKVPSKKFKVLGNTDRHSIKKNLIGALLFDSGETAEATRLKRTARRRYTRRKNRICYLQEIFSNEMAKVDDSFFHRLEESFLVEEDKKHERHPIFGNIVDEVAYHEKYPTIYHLRKKLVDSTDKADLRLIYLALAHMIKFRGHFLIEGDLNPDNSDVDKLFIQLVQTYNQLFEENPINASGVDAKAILSARLSKSRRLENLIAQLPGEKKNGLFGNLIALSLGLTPNFKSNFDLAEDAKLQLSKDTYDDDLDNLLAQIGDQYADLFLAAKNLSDAILLSDILRVNTEITKAPLSASMIKRYDEHHQDLTLLKALVRQQLPEKYKEIFFDQSKNGYAGYIDGGASQEEFYKFIKPILEKMDGTEELLVKLNREDLLRKQRTFDNGSIPHQIHLGELHAILRRQEDFYPFLKDNREKIEKILTFRIPYYVGPLARGNSRFAWMTRKSEETITPWNFEEVVDKGASAQSFIERMTNFDKNLPNEKVLPKHSLLYEYFTVYNELTKVKYVTEGMRKPAFLSGEQKKAIVDLLFKTNRKVTVKQLKEDYFKKIECFDSVEISGVEDRFNASLGTYHDLLKIIKDKDFLDNEENEDILEDIVLTLTLFEDREMIEERLKTYAHLFDDKVMKQLKRRRYTGWGRLSRKLINGIRDKQSGKTILDFLKSDGFANRNFMQLIHDDSLTFKEDIQKAQVSGQGDSLHEHIANLAGSPAIKKGILQTVKVVDELVKVMGRHKPENIVIEMARENQTTQKGQKNSRERMKRIEEGIKELGSQILKEHPVENTQLQNEKLYLYYLQNGRDMYVDQELDINRLSDYDVDHIVPQSFLKDDSIDNKVLTRSDKARGKSDNVPSEEVVKKMKNYWRQLLNAKLITQRKFDNLTKAERGGLSELDKAGFIKRQLVETRQITKHVAQILDSRMNTKYDENDKLIREVKVITLKSKLVSDFRKDFQFYKVREINNYHHAHDAYLNAVVGTALIKKYPKLESEFVYGDYKVYDVRKMIAKSEQEIGKATAKYFFYSNIMNFFKTEITLANGEIRKRPLIETNGETGEIVWDKGRDFATVRKVLSMPQVNIVKKTEVQTGGFSKESILPKRNSDKLIARKKDWDPKKYGGFDSPTVAYSVLVVAKVEKGKSKKLKSVKELLGITIMERSSFEKNPIDFLEAKGYKEVKKDLIIKLPKYSLFELENGRKRMLASAGELQKGNELALPSKYVNFLYLASHYEKLKGSPEDNEQKQLFVEQHKHYLDEIIEQISEFSKRVILADANLDKVLSAYNKHRDKPIREQAENIIHLFTLTNLGAPAAFKYFDTTIDRKRYTSTKEVLDATLIHQSITGLYETRIDLSQLGGDGGGGGPAPGGHLPPPPQVDQFPLNLPERLQALNDLVSKALEAGHIEPYSGPGNNPVFPVKKPNGKWRFIHDLRATNAITTTLTSPSPGPPDLTSLPTALPHLQTIDLTDAFFQIPLPKQYQPYFAFTIPQPCNYGPGTRYAWTVLPQGFKNSPTLFQQQLAAVLNPMRKMFPTSTIVQYMDDILLASPTNEELQQLSQLTLQALTTHGLPISQEKTQQTPGQIRFLGQVISPNHITYESTPTIPIKSQWTLTELQVILGEIQWVSKGTPILRKHLQSLYSALHPYRDPRACITLTPQQLHALHAIQQALQHNCRGRLNPALPLLGLISLSTSGTTSVIFQPKQNWPLAWLHTPHPPTSLCPWGHLLACTILTLDKYTLQHYGQLCQSFHHNMSKQALCDFLRNSPHPSVGILIHHMGRFHNLGSQPSGPWKTLLHLPTLLQEPRLLRPIFTLSPVVLDTAPCLFSDGSPQKAAYVLWDQTILQQDITPLPSHETHSAQKGELLALICGLRAAKPWPSLNIFLDSKYLIKYLHSLAIGAFLGTSAHQTLQAALPPLLQGKTIYLHHVRSHTNLPDPISTFNEYTDSLILAPLVPLAGKRTADGSEFEKRTADGSEFESPKKKAKVE

SEQ ID NO: 1531 - protein, 2009 aa, synthetic construct
  source 1..2009: note = Description of Artificial Sequence: Synthetic polypeptide
MPAAKRVKLDGGDKKYSIGLDIGTNSVGWAVITDEYKVPSKKFKVLGNTDRHSIKKNLIGALLFDSGETAEATRLKRTARRRYTRRKNRICYLQEIFSNEMAKVDDSFFHRLEESFLVEEDKKHERHPIFGNIVDEVAYHEKYPTIYHLRKKLVDSTDKADLRLIYLALAHMIKFRGHFLIEGDLNPDNSDVDKLFIQLVQTYNQLFEENPINASGVDAKAILSARLSKSRRLENLIAQLPGEKKNGLFGNLIALSLGLTPNFKSNFDLAEDAKLQLSKDTYDDDLDNLLAQIGDQYADLFLAAKNLSDAILLSDILRVNTEITKAPLSASMIKRYDEHHQDLTLLKALVRQQLPEKYKEIFFDQSKNGYAGYIDGGASQEEFYKFIKPILEKMDGTEELLVKLNREDLLRKQRTFDNGSIPHQIHLGELHAILRRQEDFYPFLKDNREKIEKILTFRIPYYVGPLARGNSRFAWMTRKSEETITPWNFEEVVDKGASAQSFIERMTNFDKNLPNEKVLPKHSLLYEYFTVYNELTKVKYVTEGMRKPAFLSGEQKKAIVDLLFKTNRKVTVKQLKEDYFKKIECFDSVEISGVEDRFNASLGTYHDLLKIIKDKDFLDNEENEDILEDIVLTLTLFEDREMIEERLKTYAHLFDDKVMKQLKRRRYTGWGRLSRKLINGIRDKQSGKTILDFLKSDGFANRNFMQLIHDDSLTFKEDIQKAQVSGQGDSLHEHIANLAGSPAIKKGILQTVKVVDELVKVMGRHKPENIVIEMARENQTTQKGQKNSRERMKRIEEGIKELGSQILKEHPVENTQLQNEKLYLYYLQNGRDMYVDQELDINRLSDYDVDHIVPQSFLKDDSIDNKVLTRSDKARGKSDNVPSEEVVKKMKNYWRQLLNAKLITQRKFDNLTKAERGGLSELDKAGFIKRQLVETRQITKHVAQILDSRMNTKYDENDKLIREVKVITLKSKLVSDFRKDFQFYKVREINNYHHAHDAYLNAVVGTALIKKYPKLESEFVYGDYKVYDVRKMIAKSEQEIGKATAKYFFYSNIMNFFKTEITLANGEIRKRPLIETNGETGEIVWDKGRDFATVRKVLSMPQVNIVKKTEVQTGGFSKESILPKRNSDKLIARKKDWDPKKYGGFDSPTVAYSVLVVAKVEKGKSKKLKSVKELLGITIMERSSFEKNPIDFLEAKGYKEVKKDLIIKLPKYSLFELENGRKRMLASAGELQKGNELALPSKYVNFLYLASHYEKLKGSPEDNEQKQLFVEQHKHYLDEIIEQISEFSKRVILADANLDKVLSAYNKHRDKPIREQAENIIHLFTLTNLGAPAAFKYFDTTIDRKRYTSTKEVLDATLIHQSITGLYETRIDLSQLGGDGGEAAAKGSSGGGGGHLPPPPQVDQFPLNLPERLQALNDLVSKALEAGHIEPYSGPGNNPVFPVKKPNGKWRFIHDLRATNAITTTLTSPSPGPPDLTSLPTALPHLQTIDLTDAFFQIPLPKQYQPYFAFTIPQPCNYGPGTRYAWTVLPQGFKNSPTLFQQQLAAVLNPMRKMFPTSTIVQYMDDILLASPTNEELQQLSQLTLQALTTHGLPISQEKTQQTPGQIRFLGQVISPNHITYESTPTIPIKSQWTLTELQVILGEIQWVSKGTPILRKHLQSLYSALHPYRDPRACITLTPQQLHALHAIQQALQHNCRGRLNPALPLLGLISLSTSGTTSVIFQPKQNWPLAWLHTPHPPTSLCPWGHLLACTILTLDKYTLQHYGQLCQSFHHNMSKQALCDFLRNSPHPSVGILIHHMGRFHNLGSQPSGPWKTLLHLPTLLQEPRLLRPIFTLSPVVLDTAPCLFSDGSPQKAAYVLWDQTILQQDITPLPSHETHSAQKGELLALICGLRAAKPWPSLNIFLDSKYLIKYLHSLAIGAFLGTSAHQTLQAALPPLLQGKTIYLHHVRSHTNLPDPISTFNEYTDSLILAPLVPLAGKRTADGSEFEKRTADGSEFESPKKKAKVE

SEQ ID NO: 1532 - protein, 2009 aa, synthetic construct
  source 1..2009: note = Description of Artificial Sequence: Synthetic polypeptide
MPAAKRVKLDGGDKKYSIGLDIGTNSVGWAVITDEYKVPSKKFKVLGNTDRHSIKKNLIGALLFDSGETAEATRLKRTARRRYTRRKNRICYLQEIFSNEMAKVDDSFFHRLEESFLVEEDKKHERHPIFGNIVDEVAYHEKYPTIYHLRKKLVDSTDKADLRLIYLALAHMIKFRGHFLIEGDLNPDNSDVDKLFIQLVQTYNQLFEENPINASGVDAKAILSARLSKSRRLENLIAQLPGEKKNGLFGNLIALSLGLTPNFKSNFDLAEDAKLQLSKDTYDDDLDNLLAQIGDQYADLFLAAKNLSDAILLSDILRVNTEITKAPLSASMIKRYDEHHQDLTLLKALVRQQLPEKYKEIFFDQSKNGYAGYIDGGASQEEFYKFIKPILEKMDGTEELLVKLNREDLLRKQRTFDNGSIPHQIHLGELHAILRRQEDFYPFLKDNREKIEKILTFRIPYYVGPLARGNSRFAWMTRKSEETITPWNFEEVVDKGASAQSFIERMTNFDKNLPNEKVLPKHSLLYEYFTVYNELTKVKYVTEGMRKPAFLSGEQKKAIVDLLFKTNRKVTVKQLKEDYFKKIECFDSVEISGVEDRFNASLGTYHDLLKIIKDKDFLDNEENEDILEDIVLTLTLFEDREMIEERLKTYAHLFDDKVMKQLKRRRYTGWGRLSRKLINGIRDKQSGKTILDFLKSDGFANRNFMQLIHDDSLTFKEDIQKAQVSGQGDSLHEHIANLAGSPAIKKGILQTVKVVDELVKVMGRHKPENIVIEMARENQTTQKGQKNSRERMKRIEEGIKELGSQILKEHPVENTQLQNEKLYLYYLQNGRDMYVDQELDINRLSDYDVDHIVPQSFLKDDSIDNKVLTRSDKARGKSDNVPSEEVVKKMKNYWRQLLNAKLITQRKFDNLTKAERGGLSELDKAGFIKRQLVETRQITKHVAQILDSRMNTKYDENDKLIREVKVITLKSKLVSDFRKDFQFYKVREINNYHHAHDAYLNAVVGTALIKKYPKLESEFVYGDYKVYDVRKMIAKSEQEIGKATAKYFFYSNIMNFFKTEITLANGEIRKRPLIETNGETGEIVWDKGRDFATVRKVLSMPQVNIVKKTEVQTGGFSKESILPKRNSDKLIARKKDWDPKKYGGFDSPTVAYSVLVVAKVEKGKSKKLKSVKELLGITIMERSSFEKNPIDFLEAKGYKEVKKDLIIKLPKYSLFELENGRKRMLASAGELQKGNELALPSKYVNFLYLASHYEKLKGSPEDNEQKQLFVEQHKHYLDEIIEQISEFSKRVILADANLDKVLSAYNKHRDKPIREQAENIIHLFTLTNLGAPAAFKYFDTTIDRKRYTSTKEVLDATLIHQSITGLYETRIDLSQLGGDGGEAAAKGGSPAPGGHLPPPPQVDQFPLNLPERLQALNDLVSKALEAGHIEPYSGPGNNPVFPVKKPNGKWRFIHDLRATNAITTTLTSPSPGPPDLTSLPTALPHLQTIDLTDAFFQIPLPKQYQPYFAFTIPQPCNYGPGTRYAWTVLPQGFKNSPTLFQQQLAAVLNPMRKMFPTSTIVQYMDDILLASPTNEELQQLSQLTLQALTTHGLPISQEKTQQTPGQIRFLGQVISPNHITYESTPTIPIKSQWTLTELQVILGEIQWVSKGTPILRKHLQSLYSALHPYRDPRACITLTPQQLHALHAIQQALQHNCRGRLNPALPLLGLISLSTSGTTSVIFQPKQNWPLAWLHTPHPPTSLCPWGHLLACTILTLDKYTLQHYGQLCQSFHHNMSKQALCDFLRNSPHPSVGILIHHMGRFHNLGSQPSGPWKTLLHLPTLLQEPRLLRPIFTLSPVVLDTAPCLFSDGSPQKAAYVLWDQTILQQDITPLPSHETHSAQKGELLALICGLRAAKPWPSLNIFLDSKYLIKYLHSLAIGAFLGTSAHQTLQAALPPLLQGKTIYLHHVRSHTNLPDPISTFNEYTDSLILAPLVPLAGKRTADGSEFEKRTADGSEFESPKKKAKVE

SEQ ID NO: 1533 - protein, 2031 aa, synthetic construct
  source 1..2031: note = Description of Artificial Sequence: Synthetic polypeptide
MPAAKRVKLDGGDKKYSIGLDIGTNSVGWAVITDEYKVPSKKFKVLGNTDRHSIKKNLIGALLFDSGETAEATRLKRTARRRYTRRKNRICYLQEIFSNEMAKVDDSFFHRLEESFLVEEDKKHERHPIFGNIVDEVAYHEKYPTIYHLRKKLVDSTDKADLRLIYLALAHMIKFRGHFLIEGDLNPDNSDVDKLFIQLVQTYNQLFEENPINASGVDAKAILSARLSKSRRLENLIAQLPGEKKNGLFGNLIALSLGLTPNFKSNFDLAEDAKLQLSKDTYDDDLDNLLAQIGDQYADLFLAAKNLSDAILLSDILRVNTEITKAPLSASMIKRYDEHHQDLTLLKALVRQQLPEKYKEIFFDQSKNGYAGYIDGGASQEEFYKFIKPILEKMDGTEELLVKLNREDLLRKQRTFDNGSIPHQIHLGELHAILRRQEDFYPFLKDNREKIEKILTFRIPYYVGPLARGNSRFAWMTRKSEETITPWNFEEVVDKGASAQSFIERMTNFDKNLPNEKVLPKHSLLYEYFTVYNELTKVKYVTEGMRKPAFLSGEQKKAIVDLLFKTNRKVTVKQLKEDYFKKIECFDSVEISGVEDRFNASLGTYHDLLKIIKDKDFLDNEENEDILEDIVLTLTLFEDREMIEERLKTYAHLFDDKVMKQLKRRRYTGWGRLSRKLINGIRDKQSGKTILDFLKSDGFANRNFMQLIHDDSLTFKEDIQKAQVSGQGDSLHEHIANLAGSPAIKKGILQTVKVVDELVKVMGRHKPENIVIEMARENQTTQKGQKNSRERMKRIEEGIKELGSQILKEHPVENTQLQNEKLYLYYLQNGRDMYVDQELDINRLSDYDVDHIVPQSFLKDDSIDNKVLTRSDKARGKSDNVPSEEVVKKMKNYWRQLLNAKLITQRKFDNLTKAERGGLSELDKAGFIKRQLVETRQITKHVAQILDSRMNTKYDENDKLIREVKVITLKSKLVSDFRKDFQFYKVREINNYHHAHDAYLNAVVGTALIKKYPKLESEFVYGDYKVYDVRKMIAKSEQEIGKATAKYFFYSNIMNFFKTEITLANGEIRKRPLIETNGETGEIVWDKGRDFATVRKVLSMPQVNIVKKTEVQTGGFSKESILPKRNSDKLIARKKDWDPKKYGGFDSPTVAYSVLVVAKVEKGKSKKLKSVKELLGITIMERSSFEKNPIDFLEAKGYKEVKKDLIIKLPKYSLFELENGRKRMLASAGELQKGNELALPSKYVNFLYLASHYEKLKGSPEDNEQKQLFVEQHKHYLDEIIEQISEFSKRVILADANLDKVLSAYNKHRDKPIREQAENIIHLFTLTNLGAPAAFKYFDTTIDRKRYTSTKEVLDATLIHQSITGLYETRIDLSQLGGDGGSGGSSGGSSGSETPGTSESATPESSGGSSGGSSGGHLPPPPQVDQFPLNLPERLQALNDLVSKALEAGHIEPYSGPGNNPVFPVKKPNGKWRFIHDLRATNAITTTLTSPSPGPPDLTSLPTALPHLQTIDLTDAFFQIPLPKQYQPYFAFTIPQPCNYGPGTRYAWTVLPQGFKNSPTLFQQQLAAVLNPMRKMFPTSTIVQYMDDILLASPTNEELQQLSQLTLQALTTHGLPISQEKTQQTPGQIRFLGQVISPNHITYESTPTIPIKSQWTLTELQVILGEIQWVSKGTPILRKHLQSLYSALHPYRDPRACITLTPQQLHALHAIQQALQHNCRGRLNPALPLLGLISLSTSGTTSVIFQPKQNWPLAWLHTPHPPTSLCPWGHLLACTILTLDKYTLQHYGQLCQSFHHNMSKQALCDFLRNSPHPSVGILIHHMGRFHNLGSQPSGPWKTLLHLPTLLQEPRLLRPIFTLSPVVLDTAPCLFSDGSPQKAAYVLWDQTILQQDITPLPSHETHSAQKGELLALICGLRAAKPWPSLNIFLDSKYLIKYLHSLAIGAFLGTSAHQTLQAALPPLLQGKTIYLHHVRSHTNLPDPISTFNEYTDSLILAPLVPLAGKRTADGSEFEKRTADGSEFESPKKKAKVE

SEQ ID NO: 1534 - protein, 2006 aa, synthetic construct
  source 1..2006: note = Description of Artificial Sequence: Synthetic polypeptide
MPAAKRVKLDGGDKKYSIGLDIGTNSVGWAVITDEYKVPSKKFKVLGNTDRHSIKKNLIGALLFDSGETAEATRLKRTARRRYTRRKNRICYLQEIFSNEMAKVDDSFFHRLEESFLVEEDKKHERHPIFGNIVDEVAYHEKYPTIYHLRKKLVDSTDKADLRLIYLALAHMIKFRGHFLIEGDLNPDNSDVDKLFIQLVQTYNQLFEENPINASGVDAKAILSARLSKSRRLENLIAQLPGEKKNGLFGNLIALSLGLTPNFKSNFDLAEDAKLQLSKDTYDDDLDNLLAQIGDQYADLFLAAKNLSDAILLSDILRVNTEITKAPLSASMIKRYDEHHQDLTLLKALVRQQLPEKYKEIFFDQSKNGYAGYIDGGASQEEFYKFIKPILEKMDGTEELLVKLNREDLLRKQRTFDNGSIPHQIHLGELHAILRRQEDFYPFLKDNREKIEKILTFRIPYYVGPLARGNSRFAWMTRKSEETITPWNFEEVVDKGASAQSFIERMTNFDKNLPNEKVLPKHSLLYEYFTVYNELTKVKYVTEGMRKPAFLSGEQKKAIVDLLFKTNRKVTVKQLKEDYFKKIECFDSVEISGVEDRFNASLGTYHDLLKIIKDKDFLDNEENEDILEDIVLTLTLFEDREMIEERLKTYAHLFDDKVMKQLKRRRYTGWGRLSRKLINGIRDKQSGKTILDFLKSDGFANRNFMQLIHDDSLTFKEDIQKAQVSGQGDSLHEHIANLAGSPAIKKGILQTVKVVDELVKVMGRHKPENIVIEMARENQTTQKGQKNSRERMKRIEEGIKELGSQILKEHPVENTQLQNEKLYLYYLQNGRDMYVDQELDINRLSDYDVDHIVPQSFLKDDSIDNKVLTRSDKARGKSDNVPSEEVVKKMKNYWRQLLNAKLITQRKFDNLTKAERGGLSELDKAGFIKRQLVETRQITKHVAQILDSRMNTKYDENDKLIREVKVITLKSKLVSDFRKDFQFYKVREINNYHHAHDAYLNAVVGTALIKKYPKLESEFVYGDYKVYDVRKMIAKSEQEIGKATAKYFFYSNIMNFFKTEITLANGEIRKRPLIETNGETGEIVWDKGRDFATVRKVLSMPQVNIVKKTEVQTGGFSKESILPKRNSDKLIARKKDWDPKKYGGFDSPTVAYSVLVVAKVEKGKSKKLKSVKELLGITIMERSSFEKNPIDFLEAKGYKEVKKDLIIKLPKYSLFELENGRKRMLASAGELQKGNELALPSKYVNFLYLASHYEKLKGSPEDNEQKQLFVEQHKHYLDEIIEQISEFSKRVILADANLDKVLSAYNKHRDKPIREQAENIIHLFTLTNLGAPAAFKYFDTTIDRKRYTSTKEVLDATLIHQSITGLYETRIDLSQLGGDGGPAPEAAAKGGHLPPPPQVDQFPLNLPERLQALNDLVSKALEAGHIEPYSGPGNNPVFPVKKPNGKWRFIHDLRATNAITTTLTSPSPGPPDLTSLPTALPHLQTIDLTDAFFQIPLPKQYQPYFAFTIPQPCNYGPGTRYAWTVLPQGFKNSPTLFQQQLAAVLNPMRKMFPTSTIVQYMDDILLASPTNEELQQLSQLTLQALTTHGLPISQEKTQQTPGQIRFLGQVISPNHITYESTPTIPIKSQWTLTELQVILGEIQWVSKGTPILRKHLQSLYSALHPYRDPRACITLTPQQLHALHAIQQALQHNCRGRLNPALPLLGLISLSTSGTTSVIFQPKQNWPLAWLHTPHPPTSLCPWGHLLACTILTLDKYTLQHYGQLCQSFHHNMSKQALCDFLRNSPHPSVGILIHHMGRFHNLGSQPSGPWKTLLHLPTLLQEPRLLRPIFTLSPVVLDTAPCLFSDGSPQKAAYVLWDQTILQQDITPLPSHETHSAQKGELLALICGLRAAKPWPSLNIFLDSKYLIKYLHSLAIGAFLGTSAHQTLQAALPPLLQGKTIYLHHVRSHTNLPDPISTFNEYTDSLILAPLVPLAGKRTADGSEFEKRTADGSEFESPKKKAKVE

SEQ ID NO: 1535 - protein, 2007 aa, synthetic construct
  source 1..2007: note = Description of Artificial Sequence: Synthetic polypeptide
MPAAKRVKLDGGDKKYSIGLDIGTNSVGWAVITDEYKVPSKKFKVLGNTDRHSIKKNLIGALLFDSGETAEATRLKRTARRRYTRRKNRICYLQEIFSNEMAKVDDSFFHRLEESFLVEEDKKHERHPIFGNIVDEVAYHEKYPTIYHLRKKLVDSTDKADLRLIYLALAHMIKFRGHFLIEGDLNPDNSDVDKLFIQLVQTYNQLFEENPINASGVDAKAILSARLSKSRRLENLIAQLPGEKKNGLFGNLIALSLGLTPNFKSNFDLAEDAKLQLSKDTYDDDLDNLLAQIGDQYADLFLAAKNLSDAILLSDILRVNTEITKAPLSASMIKRYDEHHQDLTLLKALVRQQLPEKYKEIFFDQSKNGYAGYIDGGASQEEFYKFIKPILEKMDGTEELLVKLNREDLLRKQRTFDNGSIPHQIHLGELHAILRRQEDFYPFLKDNREKIEKILTFRIPYYVGPLARGNSRFAWMTRKSEETITPWNFEEVVDKGASAQSFIERMTNFDKNLPNEKVLPKHSLLYEYFTVYNELTKVKYVTEGMRKPAFLSGEQKKAIVDLLFKTNRKVTVKQLKEDYFKKIECFDSVEISGVEDRFNASLGTYHDLLKIIKDKDFLDNEENEDILEDIVLTLTLFEDREMIEERLKTYAHLFDDKVMKQLKRRRYTGWGRLSRKLINGIRDKQSGKTILDFLKSDGFANRNFMQLIHDDSLTFKEDIQKAQVSGQGDSLHEHIANLAGSPAIKKGILQTVKVVDELVKVMGRHKPENIVIEMARENQTTQKGQKNSRERMKRIEEGIKELGSQILKEHPVENTQLQNEKLYLYYLQNGRDMYVDQELDINRLSDYDVDHIVPQSFLKDDSIDNKVLTRSDKARGKSDNVPSEEVVKKMKNYWRQLLNAKLITQRKFDNLTKAERGGLSELDKAGFIKRQLVETRQITKHVAQILDSRMNTKYDENDKLIREVKVITLKSKLVSDFRKDFQFYKVREINNYHHAHDAYLNAVVGTALIKKYPKLESEFVYGDYKVYDVRKMIAKSEQEIGKATAKYFFYSNIMNFFKTEITLANGEIRKRPLIETNGETGEIVWDKGRDFATVRKVLSMPQVNIVKKTEVQTGGFSKESILPKRNSDKLIARKKDWDPKKYGGFDSPTVAYSVLVVAKVEKGKSKKLKSVKELLGITIMERSSFEKNPIDFLEAKGYKEVKKDLIIKLPKYSLFELENGRKRMLASAGELQKGNELALPSKYVNFLYLASHYEKLKGSPEDNEQKQLFVEQHKHYLDEIIEQISEFSKRVILADANLDKVLSAYNKHRDKPIREQAENIIHLFTLTNLGAPAAFKYFDTTIDRKRYTSTKEVLDATLIHQSITGLYETRIDLSQLGGDGGGSSGGSGGGGGHLPPPPQVDQFPLNLPERLQALNDLVSKALEAGHIEPYSGPGNNPVFPVKKPNGKWRFIHDLRATNAITTTLTSPSPGPPDLTSLPTALPHLQTIDLTDAFFQIPLPKQYQPYFAFTIPQPCNYGPGTRYAWTVLPQGFKNSPTLFQQQLAAVLNPMRKMFPTSTIVQYMDDILLASPTNEELQQLSQLTLQALTTHGLPISQEKTQQTPGQIRFLGQVISPNHITYESTPTIPIKSQWTLTELQVILGEIQWVSKGTPILRKHLQSLYSALHPYRDPRACITLTPQQLHALHAIQQALQHNCRGRLNPALPLLGLISLSTSGTTSVIFQPKQNWPLAWLHTPHPPTSLCPWGHLLACTILTLDKYTLQHYGQLCQSFHHNMSKQALCDFLRNSPHPSVGILIHHMGRFHNLGSQPSGPWKTLLHLPTLLQEPRLLRPIFTLSPVVLDTAPCLFSDGSPQKAAYVLWDQTILQQDITPLPSHETHSAQKGELLALICGLRAAKPWPSLNIFLDSKYLIKYLHSLAIGAFLGTSAHQTLQAALPPLLQGKTIYLHHVRSHTNLPDPISTFNEYTDSLILAPLVPLAGKRTADGSEFEKRTADGSEFESPKKKAKVE

SEQ ID NO: 1536 - protein, 2007 aa, synthetic construct
  source 1..2007: note = Description of Artificial Sequence: Synthetic polypeptide
MPAAKRVKLDGGDKKYSIGLDIGTNSVGWAVITDEYKVPSKKFKVLGNTDRHSIKKNLIGALLFDSGETAEATRLKRTARRRYTRRKNRICYLQEIFSNEMAKVDDSFFHRLEESFLVEEDKKHERHPIFGNIVDEVAYHEKYPTIYHLRKKLVDSTDKADLRLIYLALAHMIKFRGHFLIEGDLNPDNSDVDKLFIQLVQTYNQLFEENPINASGVDAKAILSARLSKSRRLENLIAQLPGEKKNGLFGNLIALSLGLTPNFKSNFDLAEDAKLQLSKDTYDDDLDNLLAQIGDQYADLFLAAKNLSDAILLSDILRVNTEITKAPLSASMIKRYDEHHQDLTLLKALVRQQLPEKYKEIFFDQSKNGYAGYIDGGASQEEFYKFIKPILEKMDGTEELLVKLNREDLLRKQRTFDNGSIPHQIHLGELHAILRRQEDFYPFLKDNREKIEKILTFRIPYYVGPLARGNSRFAWMTRKSEETITPWNFEEVVDKGASAQSFIERMTNFDKNLPNEKVLPKHSLLYEYFTVYNELTKVKYVTEGMRKPAFLSGEQKKAIVDLLFKTNRKVTVKQLKEDYFKKIECFDSVEISGVEDRFNASLGTYHDLLKIIKDKDFLDNEENEDILEDIVLTLTLFEDREMIEERLKTYAHLFDDKVMKQLKRRRYTGWGRLSRKLINGIRDKQSGKTILDFLKSDGFANRNFMQLIHDDSLTFKEDIQKAQVSGQGDSLHEHIANLAGSPAIKKGILQTVKVVDELVKVMGRHKPENIVIEMARENQTTQKGQKNSRERMKRIEEGIKELGSQILKEHPVENTQLQNEKLYLYYLQNGRDMYVDQELDINRLSDYDVDHIVPQSFLKDDSIDNKVLTRSDKARGKSDNVPSEEVVKKMKNYWRQLLNAKLITQRKFDNLTKAERGGLSELDKAGFIKRQLVETRQITKHVAQILDSRMNTKYDENDKLIREVKVITLKSKLVSDFRKDFQFYKVREINNYHHAHDAYLNAVVGTALIKKYPKLESEFVYGDYKVYDVRKMIAKSEQEIGKATAKYFFYSNIMNFFKTEITLANGEIRKRPLIETNGETGEIVWDKGRDFATVRKVLSMPQVNIVKKTEVQTGGFSKESILPKRNSDKLIARKKDWDPKKYGGFDSPTVAYSVLVVAKVEKGKSKKLKSVKELLGITIMERSSFEKNPIDFLEAKGYKEVKKDLIIKLPKYSLFELENGRKRMLASAGELQKGNELALPSKYVNFLYLASHYEKLKGSPEDNEQKQLFVEQHKHYLDEIIEQISEFSKRVILADANLDKVLSAYNKHRDKPIREQAENIIHLFTLTNLGAPAAFKYFDTTIDRKRYTSTKEVLDATLIHQSITGLYETRIDLSQLGGDGGPAPAPAPAPGGHLPPPPQVDQFPLNLPERLQALNDLVSKALEAGHIEPYSGPGNNPVFPVKKPNGKWRFIHDLRATNAITTTLTSPSPGPPDLTSLPTALPHLQTIDLTDAFFQIPLPKQYQPYFAFTIPQPCNYGPGTRYAWTVLPQGFKNSPTLFQQQLAAVLNPMRKMFPTSTIVQYMDDILLASPTNEELQQLSQLTLQALTTHGLPISQEKTQQTPGQIRFLGQVISPNHITYESTPTIPIKSQWTLTELQVILGEIQWVSKGTPILRKHLQSLYSALHPYRDPRACITLTPQQLHALHAIQQALQHNCRGRLNPALPLLGLISLSTSGTTSVIFQPKQNWPLAWLHTPHPPTSLCPWGHLLACTILTLDKYTLQHYGQLCQSFHHNMSKQALCDFLRNSPHPSVGILIHHMGRFHNLGSQPSGPWKTLLHLPTLLQEPRLLRPIFTLSPVVLDTAPCLFSDGSPQKAAYVLWDQTILQQDITPLPSHETHSAQKGELLALICGLRAAKPWPSLNIFLDSKYLIKYLHSLAIGAFLGTSAHQTLQAALPPLLQGKTIYLHHVRSHTNLPDPISTFNEYTDSLILAPLVPLAGKRTADGSEFEKRTADGSEFESPKKKAKVE

SEQ ID NO: 1537 - protein, 2010 aa, synthetic construct
  source 1..2010: note = Description of Artificial Sequence: Synthetic polypeptide
MPAAKRVKLDGGDKKYSIGLDIGTNSVGWAVITDEYKVPSKKFKVLGNTDRHSIKKNLIGALLFDSGETAEATRLKRTARRRYTRRKNRICYLQEIFSNEMAKVDDSFFHRLEESFLVEEDKKHERHPIFGNIVDEVAYHEKYPTIYHLRKKLVDSTDKADLRLIYLALAHMIKFRGHFLIEGDLNPDNSDVDKLFIQLVQTYNQLFEENPINASGVDAKAILSARLSKSRRLENLIAQLPGEKKNGLFGNLIALSLGLTPNFKSNFDLAEDAKLQLSKDTYDDDLDNLLAQIGDQYADLFLAAKNLSDAILLSDILRVNTEITKAPLSASMIKRYDEHHQDLTLLKALVRQQLPEKYKEIFFDQSKNGYAGYIDGGASQEEFYKFIKPILEKMDGTEELLVKLNREDLLRKQRTFDNGSIPHQIHLGELHAILRRQEDFYPFLKDNREKIEKILTFRIPYYVGPLARGNSRFAWMTRKSEETITPWNFEEVVDKGASAQSFIERMTNFDKNLPNEKVLPKHSLLYEYFTVYNELTKVKYVTEGMRKPAFLSGEQKKAIVDLLFKTNRKVTVKQLKEDYFKKIECFDSVEISGVEDRFNASLGTYHDLLKIIKDKDFLDNEENEDILEDIVLTLTLFEDREMIEERLKTYAHLFDDKVMKQLKRRRYTGWGRLSRKLINGIRDKQSGKTILDFLKSDGFANRNFMQLIHDDSLTFKEDIQKAQVSGQGDSLHEHIANLAGSPAIKKGILQTVKVVDELVKVMGRHKPENIVIEMARENQTTQKGQKNSRERMKRIEEGIKELGSQILKEHPVENTQLQNEKLYLYYLQNGRDMYVDQELDINRLSDYDVDHIVPQSFLKDDSIDNKVLTRSDKARGKSDNVPSEEVVKKMKNYWRQLLNAKLITQRKFDNLTKAERGGLSELDKAGFIKRQLVETRQITKHVAQILDSRMNTKYDENDKLIREVKVITLKSKLVSDFRKDFQFYKVREINNYHHAHDAYLNAVVGTALIKKYPKLESEFVYGDYKVYDVRKMIAKSEQEIGKATAKYFFYSNIMNFFKTEITLANGEIRKRPLIETNGETGEIVWDKGRDFATVRKVLSMPQVNIVKKTEVQTGGFSKESILPKRNSDKLIARKKDWDPKKYGGFDSPTVAYSVLVVAKVEKGKSKKLKSVKELLGITIMERSSFEKNPIDFLEAKGYKEVKKDLIIKLPKYSLFELENGRKRMLASAGELQKGNELALPSKYVNFLYLASHYEKLKGSPEDNEQKQLFVEQHKHYLDEIIEQISEFSKRVILADANLDKVLSAYNKHRDKPIREQAENIIHLFTLTNLGAPAAFKYFDTTIDRKRYTSTKEVLDATLIHQSITGLYETRIDLSQLGGDGGEAAAKEAAAKEAAAKGGPLGTSDSPVTHADPIDWKSEEPVWVDQWPLTQEKLSAAQQLVQEQLRLGHIEPSTSAWNSPIFVIKKKSGKWRLLQDLRKVNETMMHMGALQPGLPTPSAIPDKSYIIVIDLKDCFYTIPLAPQDCKRFAFSLPSVNFKEPMQRYQWRVLPQGMTNSPTLCQKFVATAIAPVRQRFPQLYLVHYMDDILLAHTDEHLLYQAFSILKQHLSLNGLVIADEKIQTHFPYNYLGFSLYPRVYNTQLVKLQTDHLKTLNDFQKLLGDINWIRPYLKLPTYTLQPLFDILKGDSDPASPRTLSLEGRTALQSIEEAIRQQQITYCDYQRSWGLYILPTPRAPTGVLYQDKPLRWIYLSATPTKHLLPYYELVAKIIAKGRHEAIQYFGMEPPFICVPYALEQQDWLFQFSDNWSIAFANYPGQITHHYPSDKLLQFASSHAFIFPKIVRRQPIPEATLIFTDGSSNGTAALIINHQTYYAQTSFSSAQVVELFAVHQALLTVPTSFNLFTDSSYVVGALQMIETVPIIGTTSPEVLNLFTLIQQVLHCRQHPCFFGHIRAHSTLPGALVQGNHTADVLTKQVFFQSAGKRTADGSEFEKRTADGSEFESPKKKAKVE

SEQ ID NO: 1538 - protein, 2001 aa, synthetic construct
  source 1..2001: note = Description of Artificial Sequence: Synthetic polypeptide
MPAAKRVKLDGGDKKYSIGLDIGTNSVGWAVITDEYKVPSKKFKVLGNTDRHSIKKNLIGALLFDSGETAEATRLKRTARRRYTRRKNRICYLQEIFSNEMAKVDDSFFHRLEESFLVEEDKKHERHPIFGNIVDEVAYHEKYPTIYHLRKKLVDSTDKADLRLIYLALAHMIKFRGHFLIEGDLNPDNSDVDKLFIQLVQTYNQLFEENPINASGVDAKAILSARLSKSRRLENLIAQLPGEKKNGLFGNLIALSLGLTPNFKSNFDLAEDAKLQLSKDTYDDDLDNLLAQIGDQYADLFLAAKNLSDAILLSDILRVNTEITKAPLSASMIKRYDEHHQDLTLLKALVRQQLPEKYKEIFFDQSKNGYAGYIDGGASQEEFYKFIKPILEKMDGTEELLVKLNREDLLRKQRTFDNGSIPHQIHLGELHAILRRQEDFYPFLKDNREKIEKILTFRIPYYVGPLARGNSRFAWMTRKSEETITPWNFEEVVDKGASAQSFIERMTNFDKNLPNEKVLPKHSLLYEYFTVYNELTKVKYVTEGMRKPAFLSGEQKKAIVDLLFKTNRKVTVKQLKEDYFKKIECFDSVEISGVEDRFNASLGTYHDLLKIIKDKDFLDNEENEDILEDIVLTLTLFEDREMIEERLKTYAHLFDDKVMKQLKRRRYTGWGRLSRKLINGIRDKQSGKTILDFLKSDGFANRNFMQLIHDDSLTFKEDIQKAQVSGQGDSLHEHIANLAGSPAIKKGILQTVKVVDELVKVMGRHKPENIVIEMARENQTTQKGQKNSRERMKRIEEGIKELGSQILKEHPVENTQLQNEKLYLYYLQNGRDMYVDQELDINRLSDYDVDHIVPQSFLKDDSIDNKVLTRSDKARGKSDNVPSEEVVKKMKNYWRQLLNAKLITQRKFDNLTKAERGGLSELDKAGFIKRQLVETRQITKHVAQILDSRMNTKYDENDKLIREVKVITLKSKLVSDFRKDFQFYKVREINNYHHAHDAYLNAVVGTALIKKYPKLESEFVYGDYKVYDVRKMIAKSEQEIGKATAKYFFYSNIMNFFKTEITLANGEIRKRPLIETNGETGEIVWDKGRDFATVRKVLSMPQVNIVKKTEVQTGGFSKESILPKRNSDKLIARKKDWDPKKYGGFDSPTVAYSVLVVAKVEKGKSKKLKSVKELLGITIMERSSFEKNPIDFLEAKGYKEVKKDLIIKLPKYSLFELENGRKRMLASAGELQKGNELALPSKYVNFLYLASHYEKLKGSPEDNEQKQLFVEQHKHYLDEIIEQISEFSKRVILADANLDKVLSAYNKHRDKPIREQAENIIHLFTLTNLGAPAAFKYFDTTIDRKRYTSTKEVLDATLIHQSITGLYETRIDLSQLGGDGGGSSGGGGGPLGTSDSPVTHADPIDWKSEEPVWVDQWPLTQEKLSAAQQLVQEQLRLGHIEPSTSAWNSPIFVIKKKSGKWRLLQDLRKVNETMMHMGALQPGLPTPSAIPDKSYIIVIDLKDCFYTIPLAPQDCKRFAFSLPSVNFKEPMQRYQWRVLPQGMTNSPTLCQKFVATAIAPVRQRFPQLYLVHYMDDILLAHTDEHLLYQAFSILKQHLSLNGLVIADEKIQTHFPYNYLGFSLYPRVYNTQLVKLQTDHLKTLNDFQKLLGDINWIRPYLKLPTYTLQPLFDILKGDSDPASPRTLSLEGRTALQSIEEAIRQQQITYCDYQRSWGLYILPTPRAPTGVLYQDKPLRWIYLSATPTKHLLPYYELVAKIIAKGRHEAIQYFGMEPPFICVPYALEQQDWLFQFSDNWSIAFANYPGQITHHYPSDKLLQFASSHAFIFPKIVRRQPIPEATLIFTDGSSNGTAALIINHQTYYAQTSFSSAQVVELFAVHQALLTVPTSFNLFTDSSYVVGALQMIETVPIIGTTSPEVLNLFTLIQQVLHCRQHPCFFGHIRAHSTLPGALVQGNHTADVLTKQVFFQSAGKRTADGSEFEKRTADGSEFESPKKKAKVE

SEQ ID NO: 1539 - protein, 2106 aa, synthetic construct
  source 1..2106: note = Description of Artificial Sequence: Synthetic polypeptide
MPAAKRVKLDGGDKKYSIGLDIGTNSVGWAVITDEYKVPSKKFKVLGNTDRHSIKKNLIGALLFDSGETAEATRLKRTARRRYTRRKNRICYLQEIFSNEMAKVDDSFFHRLEESFLVEEDKKHERHPIFGNIVDEVAYHEKYPTIYHLRKKLVDSTDKADLRLIYLALAHMIKFRGHFLIEGDLNPDNSDVDKLFIQLVQTYNQLFEENPINASGVDAKAILSARLSKSRRLENLIAQLPGEKKNGLFGNLIALSLGLTPNFKSNFDLAEDAKLQLSKDTYDDDLDNLLAQIGDQYADLFLAAKNLSDAILLSDILRVNTEITKAPLSASMIKRYDEHHQDLTLLKALVRQQLPEKYKEIFFDQSKNGYAGYIDGGASQEEFYKFIKPILEKMDGTEELLVKLNREDLLRKQRTFDNGSIPHQIHLGELHAILRRQEDFYPFLKDNREKIEKILTFRIPYYVGPLARGNSRFAWMTRKSEETITPWNFEEVVDKGASAQSFIERMTNFDKNLPNEKVLPKHSLLYEYFTVYNELTKVKYVTEGMRKPAFLSGEQKKAIVDLLFKTNRKVTVKQLKEDYFKKIECFDSVEISGVEDRFNASLGTYHDLLKIIKDKDFLDNEENEDILEDIVLTLTLFEDREMIEERLKTYAHLFDDKVMKQLKRRRYTGWGRLSRKLINGIRDKQSGKTILDFLKSDGFANRNFMQLIHDDSLTFKEDIQKAQVSGQGDSLHEHIANLAGSPAIKKGILQTVKVVDELVKVMGRHKPENIVIEMARENQTTQKGQKNSRERMKRIEEGIKELGSQILKEHPVENTQLQNEKLYLYYLQNGRDMYVDQELDINRLSDYDVDHIVPQSFLKDDSIDNKVLTRSDKARGKSDNVPSEEVVKKMKNYWRQLLNAKLITQRKFDNLTKAERGGLSELDKAGFIKRQLVETRQITKHVAQILDSRMNTKYDENDKLIREVKVITLKSKLVSDFRKDFQFYKVREINNYHHAHDAYLNAVVGTALIKKYPKLESEFVYGDYKVYDVRKMIAKSEQEIGKATAKYFFYSNIMNFFKTEITLANGEIRKRPLIETNGETGEIVWDKGRDFATVRKVLSMPQVNIVKKTEVQTGGFSKESILPKRNSDKLIARKKDWDPKKYGGFDSPTVAYSVLVVAKVEKGKSKKLKSVKELLGITIMERSSFEKNPIDFLEAKGYKEVKKDLIIKLPKYSLFELENGRKRMLASAGELQKGNELALPSKYVNFLYLASHYEKLKGSPEDNEQKQLFVEQHKHYLDEIIEQISEFSKRVILADANLDKVLSAYNKHRDKPIREQAENIIHLFTLTNLGAPAAFKYFDTTIDRKRYTSTKEVLDATLIHQSITGLYETRIDLSQLGGDGGEAAAKGGGGSEAAAKGGTVSLQDEHRLFDIPVTTSLPDVWLQDFPQAWAETGGLGRAKCQAPIIIDLKPTAVPVSIKQYPMSLEAHMGIRQHIIKFLELGVLRPCRSPWNTPLLPVKKPGTQDYRPVQDLREINKRTVDIHPTVPNPYNLLSTLKPDYSWYTVLDLKDAFFCLPLAPQSQELFAFEWKDPERGISGQLTWTRLPQGFKNSPTLFNEALHRDLTDFRTQHPEVTLLQYVDDLLLAAPTKKACTQGTRHLLQELGEKGYRASAKKAQICQTKVTYLGYILSEGKRWLTPGRIETVARIPPPRNPREVREFLGTAGFCRLWIPGFAELAAPLYALTKPSTPFTWQTEHQLAFEALKKALLSAPALGLPDTSKPFTLFLDERQGIAKGVLTQKLGPWKRPVAYLSKKLDPVAAGWPPCLRIMAATAMLVKDSAKLTLGQPLTVITPHTLEAIVRQPPDRWITNARLTHYQALLLDTDRVQFGPPVTLNPATLLPVPENQPSPHDCRQVLAETHGTREDLKDQELPDADHTWYTDGSSYLDSGTRRAGAAVVDGHNTIWAQSLPPGTSAQKAELIALTKALELSKGKKANIYTDSRYAFATAHTHGSIYERRGWLTSEGKEIKNKAEIIALLKALFLPQEVAIIHCPGHQKGQDPVAVGNRQADRVARQAAMAEVLTLATEPDNTSHITAGKRTADGSEFEKRTADGSEFESPKKKAKVE

SEQ ID NO: 1540 - protein, 2102 aa, synthetic construct
  source 1..2102: note = Description of Artificial Sequence: Synthetic polypeptide
MPAAKRVKLDGGDKKYSIGLDIGTNSVGWAVITDEYKVPSKKFKVLGNTDRHSIKKNLIGALLFDSGETAEATRLKRTARRRYTRRKNRICYLQEIFSNEMAKVDDSFFHRLEESFLVEEDKKHERHPIFGNIVDEVAYHEKYPTIYHLRKKLVDSTDKADLRLIYLALAHMIKFRGHFLIEGDLNPDNSDVDKLFIQLVQTYNQLFEENPINASGVDAKAILSARLSKSRRLENLIAQLPGEKKNGLFGNLIALSLGLTPNFKSNFDLAEDAKLQLSKDTYDDDLDNLLAQIGDQYADLFLAAKNLSDAILLSDILRVNTEITKAPLSASMIKRYDEHHQDLTLLKALVRQQLPEKYKEIFFDQSKNGYAGYIDGGASQEEFYKFIKPILEKMDGTEELLVKLNREDLLRKQRTFDNGSIPHQIHLGELHAILRRQEDFYPFLKDNREKIEKILTFRIPYYVGPLARGNSRFAWMTRKSEETITPWNFEEVVDKGASAQSFIERMTNFDKNLPNEKVLPKHSLLYEYFTVYNELTKVKYVTEGMRKPAFLSGEQKKAIVDLLFKTNRKVTVKQLKEDYFKKIECFDSVEISGVEDRFNASLGTYHDLLKIIKDKDFLDNEENEDILEDIVLTLTLFEDREMIEERLKTYAHLFDDKVMKQLKRRRYTGWGRLSRKLINGIRDKQSGKTILDFLKSDGFANRNFMQLIHDDSLTFKEDIQKAQVSGQGDSLHEHIANLAGSPAIKKGILQTVKVVDELVKVMGRHKPENIVIEMARENQTTQKGQKNSRERMKRIEEGIKELGSQILKEHPVENTQLQNEKLYLYYLQNGRDMYVDQELDINRLSDYDVDHIVPQSFLKDDSIDNKVLTRSDKARGKSDNVPSEEVVKKMKNYWRQLLNAKLITQRKFDNLTKAERGGLSELDKAGFIKRQLVETRQITKHVAQILDSRMNTKYDENDKLIREVKVITLKSKLVSDFRKDFQFYKVREINNYHHAHDAYLNAVVGTALIKKYPKLESEFVYGDYKVYDVRKMIAKSEQEIGKATAKYFFYSNIMNFFKTEITLANGEIRKRPLIETNGETGEIVWDKGRDFATVRKVLSMPQVNIVKKTEVQTGGFSKESILPKRNSDKLIARKKDWDPKKYGGFDSPTVAYSVLVVAKVEKGKSKKLKSVKELLGITIMERSSFEKNPIDFLEAKGYKEVKKDLIIKLPKYSLFELENGRKRMLASAGELQKGNELALPSKYVNFLYLASHYEKLKGSPEDNEQKQLFVEQHKHYLDEIIEQISEFSKRVILADANLDKVLSAYNKHRDKPIREQAENIIHLFTLTNLGAPAAFKYFDTTIDRKRYTSTKEVLDATLIHQSITGLYETRIDLSQLGGDGGGGGGSSEAAAKGGTVSLQDEHRLFDIPVTTSLPDVWLQDFPQAWAETGGLGRAKCQAPIIIDLKPTAVPVSIKQYPMSLEAHMGIRQHIIKFLELGVLRPCRSPWNTPLLPVKKPGTQDYRPVQDLREINKRTVDIHPTVPNPYNLLSTLKPDYSWYTVLDLKDAFFCLPLAPQSQELFAFEWKDPERGISGQLTWTRLPQGFKNSPTLFNEALHRDLTDFRTQHPEVTLLQYVDDLLLAAPTKKACTQGTRHLLQELGEKGYRASAKKAQICQTKVTYLGYILSEGKRWLTPGRIETVARIPPPRNPREVREFLGTAGFCRLWIPGFAELAAPLYALTKPSTPFTWQTEHQLAFEALKKALLSAPALGLPDTSKPFTLFLDERQGIAKGVLTQKLGPWKRPVAYLSKKLDPVAAGWPPCLRIMAATAMLVKDSAKLTLGQPLTVITPHTLEAIVRQPPDRWITNARLTHYQALLLDTDRVQFGPPVTLNPATLLPVPENQPSPHDCRQVLAETHGTREDLKDQELPDADHTWYTDGSSYLDSGTRRAGAAVVDGHNTIWAQSLPPGTSAQKAELIALTKALELSKGKKANIYTDSRYAFATAHTHGSIYERRGWLTSEGKEIKNKAEIIALLKALFLPQEVAIIHCPGHQKGQDPVAVGNRQADRVARQAAMAEVLTLATEPDNTSHITAGKRTADGSEFEKRTADGSEFESPKKKAKVE

SEQ ID NO: 1541 - protein, 2094 aa, synthetic construct
  source 1..2094: note = Description of Artificial Sequence: Synthetic polypeptide
MPAAKRVKLDGGDKKYSIGLDIGTNSVGWAVITDEYKVPSKKFKVLGNTDRHSIKKNLIGALLFDSGETAEATRLKRTARRRYTRRKNRICYLQEIFSNEMAKVDDSFFHRLEESFLVEEDKKHERHPIFGNIVDEVAYHEKYPTIYHLRKKLVDSTDKADLRLIYLALAHMIKFRGHFLIEGDLNPDNSDVDKLFIQLVQTYNQLFEENPINASGVDAKAILSARLSKSRRLENLIAQLPGEKKNGLFGNLIALSLGLTPNFKSNFDLAEDAKLQLSKDTYDDDLDNLLAQIGDQYADLFLAAKNLSDAILLSDILRVNTEITKAPLSASMIKRYDEHHQDLTLLKALVRQQLPEKYKEIFFDQSKNGYAGYIDGGASQEEFYKFIKPILEKMDGTEELLVKLNREDLLRKQRTFDNGSIPHQIHLGELHAILRRQEDFYPFLKDNREKIEKILTFRIPYYVGPLARGNSRFAWMTRKSEETITPWNFEEVVDKGASAQSFIERMTNFDKNLPNEKVLPKHSLLYEYFTVYNELTKVKYVTEGMRKPAFLSGEQKKAIVDLLFKTNRKVTVKQLKEDYFKKIECFDSVEISGVEDRFNASLGTYHDLLKIIKDKDFLDNEENEDILEDIVLTLTLFEDREMIEERLKTYAHLFDDKVMKQLKRRRYTGWGRLSRKLINGIRDKQSGKTILDFLKSDGFANRNFMQLIHDDSLTFKEDIQKAQVSGQGDSLHEHIANLAGSPAIKKGILQTVKVVDELVKVMGRHKPENIVIEMARENQTTQKGQKNSRERMKRIEEGIKELGSQILKEHPVENTQLQNEKLYLYYLQNGRDMYVDQELDINRLSDYDVDHIVPQSFLKDDSIDNKVLTRSDKARGKSDNVPSEEVVKKMKNYWRQLLNAKLITQRKFDNLTKAERGGLSELDKAGFIKRQLVETRQITKHVAQILDSRMNTKYDENDKLIREVKVITLKSKLVSDFRKDFQFYKVREINNYHHAHDAYLNAVVGTALIKKYPKLESEFVYGDYKVYDVRKMIAKSEQEIGKATAKYFFYSNIMNFFKTEITLANGEIRKRPLIETNGETGEIVWDKGRDFATVRKVLSMPQVNIVKKTEVQTGGFSKESILPKRNSDKLIARKKDWDPKKYGGFDSPTVAYSVLVVAKVEKGKSKKLKSVKELLGITIMERSSFEKNPIDFLEAKGYKEVKKDLIIKLPKYSLFELENGRKRMLASAGELQKGNELALPSKYVNFLYLASHYEKLKGSPEDNEQKQLFVEQHKHYLDEIIEQISEFSKRVILADANLDKVLSAYNKHRDKPIREQAENIIHLFTLTNLGAPAAFKYFDTTIDRKRYTSTKEVLDATLIHQSITGLYETRIDLSQLGGDGGGGSGGTVSLQDEHRLFDIPVTTSLPDVWLQDFPQAWAETGGLGRAKCQAPIIIDLKPTAVPVSIKQYPMSLEAHMGIRQHIIKFLELGVLRPCRSPWNTPLLPVKKPGTQDYRPVQDLREINKRTVDIHPTVPNPYNLLSTLKPDYSWYTVLDLKDAFFCLPLAPQSQELFAFEWKDPERGISGQLTWTRLPQGFKNSPTLFNEALHRDLTDFRTQHPEVTLLQYVDDLLLAAPTKKACTQGTRHLLQELGEKGYRASAKKAQICQTKVTYLGYILSEGKRWLTPGRIETVARIPPPRNPREVREFLGTAGFCRLWIPGFAELAAPLYALTKPSTPFTWQTEHQLAFEALKKALLSAPALGLPDTSKPFTLFLDERQGIAKGVLTQKLGPWKRPVAYLSKKLDPVAAGWPPCLRIMAATAMLVKDSAKLTLGQPLTVITPHTLEAIVRQPPDRWITNARLTHYQALLLDTDRVQFGPPVTLNPATLLPVPENQPSPHDCRQVLAETHGTREDLKDQELPDADHTWYTDGSSYLDSGTRRAGAAVVDGHNTIWAQSLPPGTSAQKAELIALTKALELSKGKKANIYTDSRYAFATAHTHGSIYERRGWLTSEGKEIKNKAEIIALLKALFLPQEVAIIHCPGHQKGQDPVAVGNRQADRVARQAAMAEVLTLATEPDNTSHITAGKRTADGSEFEKRTADGSEFESPKKKAKVE

SEQ ID NO: 1542 - protein, 2137 aa, synthetic construct
  source 1..2137: note = Description of Artificial Sequence: Synthetic polypeptide
MPAAKRVKLDGGDKKYSIGLDIGTNSVGWAVITDEYKVPSKKFKVLGNTDRHSIKKNLIGALLFDSGETAEATRLKRTARRRYTRRKNRICYLQEIFSNEMAKVDDSFFHRLEESFLVEEDKKHERHPIFGNIVDEVAYHEKYPTIYHLRKKLVDSTDKADLRLIYLALAHMIKFRGHFLIEGDLNPDNSDVDKLFIQLVQTYNQLFEENPINASGVDAKAILSARLSKSRRLENLIAQLPGEKKNGLFGNLIALSLGLTPNFKSNFDLAEDAKLQLSKDTYDDDLDNLLAQIGDQYADLFLAAKNLSDAILLSDILRVNTEITKAPLSASMIKRYDEHHQDLTLLKALVRQQLPEKYKEIFFDQSKNGYAGYIDGGASQEEFYKFIKPILEKMDGTEELLVKLNREDLLRKQRTFDNGSIPHQIHLGELHAILRRQEDFYPFLKDNREKIEKILTFRIPYYVGPLARGNSRFAWMTRKSEETITPWNFEEVVDKGASAQSFIERMTNFDKNLPNEKVLPKHSLLYEYFTVYNELTKVKYVTEGMRKPAFLSGEQKKAIVDLLFKTNRKVTVKQLKEDYFKKIECFDSVEISGVEDRFNASLGTYHDLLKIIKDKDFLDNEENEDILEDIVLTLTLFEDREMIEERLKTYAHLFDDKVMKQLKRRRYTGWGRLSRKLINGIRDKQSGKTILDFLKSDGFANRNFMQLIHDDSLTFKEDIQKAQVSGQGDSLHEHIANLAGSPAIKKGILQTVKVVDELVKVMGRHKPENIVIEMARENQTTQKGQKNSRERMKRIEEGIKELGSQILKEHPVENTQLQNEKLYLYYLQNGRDMYVDQELDINRLSDYDVDHIVPQSFLKDDSIDNKVLTRSDKARGKSDNVPSEEVVKKMKNYWRQLLNAKLITQRKFDNLTKAERGGLSELDKAGFIKRQLVETRQITKHVAQILDSRMNTKYDENDKLIREVKVITLKSKLVSDFRKDFQFYKVREINNYHHAHDAYLNAVVGTALIKKYPKLESEFVYGDYKVYDVRKMIAKSEQEIGKATAKYFFYSNIMNFFKTEITLANGEIRKRPLIETNGETGEIVWDKGRDFATVRKVLSMPQVNIVKKTEVQTGGFSKESILPKRNSDKLIARKKDWDPKKYGGFDSPTVAYSVLVVAKVEKGKSKKLKSVKELLGITIMERSSFEKNPIDFLEAKGYKEVKKDLIIKLPKYSLFELENGRKRMLASAGELQKGNELALPSKYVNFLYLASHYEKLKGSPEDNEQKQLFVEQHKHYLDEIIEQISEFSKRVILADANLDKVLSAYNKHRDKPIREQAENIIHLFTLTNLGAPAAFKYFDTTIDRKRYTSTKEVLDATLIHQSITGLYETRIDLSQLGGDGGAEAAAKEAAAKEAAAKEAAAKALEAEAAAKEAAAKEAAAKEAAAKAGGTVSLQDEHRLFDIPVTTSLPDVWLQDFPQAWAETGGLGRAKCQAPIIIDLKPTAVPVSIKQYPMSLEAHMGIRQHIIKFLELGVLRPCRSPWNTPLLPVKKPGTQDYRPVQDLREINKRTVDIHPTVPNPYNLLSTLKPDYSWYTVLDLKDAFFCLPLAPQSQELFAFEWKDPERGISGQLTWTRLPQGFKNSPTLFNEALHRDLTDFRTQHPEVTLLQYVDDLLLAAPTKKACTQGTRHLLQELGEKGYRASAKKAQICQTKVTYLGYILSEGKRWLTPGRIETVARIPPPRNPREVREFLGTAGFCRLWIPGFAELAAPLYALTKPSTPFTWQTEHQLAFEALKKALLSAPALGLPDTSKPFTLFLDERQGIAKGVLTQKLGPWKRPVAYLSKKLDPVAAGWPPCLRIMAATAMLVKDSAKLTLGQPLTVITPHTLEAIVRQPPDRWITNARLTHYQALLLDTDRVQFGPPVTLNPATLLPVPENQPSPHDCRQVLAETHGTREDLKDQELPDADHTWYTDGSSYLDSGTRRAGAAVVDGHNTIWAQSLPPGTSAQKAELIALTKALELSKGKKANIYTDSRYAFATAHTHGSIYERRGWLTSEGKEIKNKAEIIALLKALFLPQEVAIIHCPGHQKGQDPVAVGNRQADRVARQAAMAEVLTLATEPDNTSHITAGKRTADGSEFEKRTADGSEFESPKKKAKVE

SEQ ID NO: 1543 - protein, 2116 aa, synthetic construct
  source 1..2116: note = Description of Artificial Sequence: Synthetic polypeptide
MPAAKRVKLDGGDKKYSIGLDIGTNSVGWAVITDEYKVPSKKFKVLGNTDRHSIKKNLIGALLFDSGETAEATRLKRTARRRYTRRKNRICYLQEIFSNEMAKVDDSFFHRLEESFLVEEDKKHERHPIFGNIVDEVAYHEKYPTIYHLRKKLVDSTDKADLRLIYLALAHMIKFRGHFLIEGDLNPDNSDVDKLFIQLVQTYNQLFEENPINASGVDAKAILSARLSKSRRLENLIAQLPGEKKNGLFGNLIALSLGLTPNFKSNFDLAEDAKLQLSKDTYDDDLDNLLAQIGDQYADLFLAAKNLSDAILLSDILRVNTEITKAPLSASMIKRYDEHHQDLTLLKALVRQQLPEKYKEIFFDQSKNGYAGYIDGGASQEEFYKFIKPILEKMDGTEELLVKLNREDLLRKQRTFDNGSIPHQIHLGELHAILRRQEDFYPFLKDNREKIEKILTFRIPYYVGPLARGNSRFAWMTRKSEETITPWNFEEVVDKGASAQSFIERMTNFDKNLPNEKVLPKHSLLYEYFTVYNELTKVKYVTEGMRKPAFLSGEQKKAIVDLLFKTNRKVTVKQLKEDYFKKIECFDSVEISGVEDRFNASLGTYHDLLKIIKDKDFLDNEENEDILEDIVLTLTLFEDREMIEERLKTYAHLFDDKVMKQLKRRRYTGWGRLSRKLINGIRDKQSGKTILDFLKSDGFANRNFMQLIHDDSLTFKEDIQKAQVSGQGDSLHEHIANLAGSPAIKKGILQTVKVVDELVKVMGRHKPENIVIEMARENQTTQKGQKNSRERMKRIEEGIKELGSQILKEHPVENTQLQNEKLYLYYLQNGRDMYVDQELDINRLSDYDVDHIVPQSFLKDDSIDNKVLTRSDKARGKSDNVPSEEVVKKMKNYWRQLLNAKLITQRKFDNLTKAERGGLSELDKAGFIKRQLVETRQITKHVAQILDSRMNTKYDENDKLIREVKVITLKSKLVSDFRKDFQFYKVREINNYHHAHDAYLNAVVGTALIKKYPKLESEFVYGDYKVYDVRKMIAKSEQEIGKATAKYFFYSNIMNFFKTEITLANGEIRKRPLIETNGETGEIVWDKGRDFATVRKVLSMPQVNIVKKTEVQTGGFSKESILPKRNSDKLIARKKDWDPKKYGGFDSPTVAYSVLVVAKVEKGKSKKLKSVKELLGITIMERSSFEKNPIDFLEAKGYKEVKKDLIIKLPKYSLFELENGRKRMLASAGELQKGNELALPSKYVNFLYLASHYEKLKGSPEDNEQKQLFVEQHKHYLDEIIEQISEFSKRVILADANLDKVLSAYNKHRDKPIREQAENIIHLFTLTNLGAPAAFKYFDTTIDRKRYTSTKEVLDATLIHQSITGLYETRIDLSQLGGDGGGGGGSGGGGSGGGGSGGGGSGGGGSGGTVSLQDEHRLFDIPVTTSLPDVWLQDFPQAWAETGGLGRAKCQAPIIIDLKPTAVPVSIKQYPMSLEAHMGIRQHIIKFLELGVLRPCRSPWNTPLLPVKKPGTQDYRPVQDLREINKRTVDIHPTVPNPYNLLSTLKPDYSWYTVLDLKDAFFCLPLAPQSQELFAFEWKDPERGISGQLTWTRLPQGFKNSPTLFNEALHRDLTDFRTQHPEVTLLQYVDDLLLAAPTKKACTQGTRHLLQELGEKGYRASAKKAQICQTKVTYLGYILSEGKRWLTPGRIETVARIPPPRNPREVREFLGTAGFCRLWIPGFAELAAPLYALTKPSTPFTWQTEHQLAFEALKKALLSAPALGLPDTSKPFTLFLDERQGIAKGVLTQKLGPWKRPVAYLSKKLDPVAAGWPPCLRIMAATAMLVKDSAKLTLGQPLTVITPHTLEAIVRQPPDRWITNARLTHYQALLLDTDRVQFGPPVTLNPATLLPVPENQPSPHDCRQVLAETHGTREDLKDQELPDADHTWYTDGSSYLDSGTRRAGAAVVDGHNTIWAQSLPPGTSAQKAELIALTKALELSKGKKANIYTDSRYAFATAHTHGSIYERRGWLTSEGKEIKNKAEIIALLKALFLPQEVAIIHCPGHQKGQDPVAVGNRQADRVARQAAMAEVLTLATEPDNTSHITAGKRTADGSEFEKRTADGSEFESPKKKAKVE

SEQ ID NO: 1544 - protein, 2099 aa, synthetic construct
  source 1..2099: note = Description of Artificial Sequence: Synthetic polypeptide
MPAAKRVKLDGGDKKYSIGLDIGTNSVGWAVITDEYKVPSKKFKVLGNTDRHSIKKNLIGALLFDSGETAEATRLKRTARRRYTRRKNRICYLQEIFSNEMAKVDDSFFHRLEESFLVEEDKKHERHPIFGNIVDEVAYHEKYPTIYHLRKKLVDSTDKADLRLIYLALAHMIKFRGHFLIEGDLNPDNSDVDKLFIQLVQTYNQLFEENPINASGVDAKAILSARLSKSRRLENLIAQLPGEKKNGLFGNLIALSLGLTPNFKSNFDLAEDAKLQLSKDTYDDDLDNLLAQIGDQYADLFLAAKNLSDAILLSDILRVNTEITKAPLSASMIKRYDEHHQDLTLLKALVRQQLPEKYKEIFFDQSKNGYAGYIDGGASQEEFYKFIKPILEKMDGTEELLVKLNREDLLRKQRTFDNGSIPHQIHLGELHAILRRQEDFYPFLKDNREKIEKILTFRIPYYVGPLARGNSRFAWMTRKSEETITPWNFEEVVDKGASAQSFIERMTNFDKNLPNEKVLPKHSLLYEYFTVYNELTKVKYVTEGMRKPAFLSGEQKKAIVDLLFKTNRKVTVKQLKEDYFKKIECFDSVEISGVEDRFNASLGTYHDLLKIIKDKDFLDNEENEDILEDIVLTLTLFEDREMIEERLKTYAHLFDDKVMKQLKRRRYTGWGRLSRKLINGIRDKQSGKTILDFLKSDGFANRNFMQLIHDDSLTFKEDIQKAQVSGQGDSLHEHIANLAGSPAIKKGILQTVKVVDELVKVMGRHKPENIVIEMARENQTTQKGQKNSRERMKRIEEGIKELGSQILKEHPVENTQLQNEKLYLYYLQNGRDMYVDQELDINRLSDYDVDHIVPQSFLKDDSIDNKVLTRSDKARGKSDNVPSEEVVKKMKNYWRQLLNAKLITQRKFDNLTKAERGGLSELDKAGFIKRQLVETRQITKHVAQILDSRMNTKYDENDKLIREVKVITLKSKLVSDFRKDFQFYKVREINNYHHAHDAYLNAVVGTALIKKYPKLESEFVYGDYKVYDVRKMIAKSEQEIGKATAKYFFYSNIMNFFKTEITLANGEIRKRPLIETNGETGEIVWDKGRDFATVRKVLSMPQVNIVKKTEVQTGGFSKESILPKRNSDKLIARKKDWDPKKYGGFDSPTVAYSVLVVAKVEKGKSKKLKSVKELLGITIMERSSFEKNPIDFLEAKGYKEVKKDLIIKLPKYSLFELENGRKRMLASAGELQKGNELALPSKYVNFLYLASHYEKLKGSPEDNEQKQLFVEQHKHYLDEIIEQISEFSKRVILADANLDKVLSAYNKHRDKPIREQAENIIHLFTLTNLGAPAAFKYFDTTIDRKRYTSTKEVLDATLIHQSITGLYETRIDLSQLGGDGGEAAAKPAPGGTVSLQDEHRLFDIPVTTSLPDVWLQDFPQAWAETGGLGRAKCQAPIIIDLKPTAVPVSIKQYPMSLEAHMGIRQHIIKFLELGVLRPCRSPWNTPLLPVKKPGTQDYRPVQDLREINKRTVDIHPTVPNPYNLLSTLKPDYSWYTVLDLKDAFFCLPLAPQSQELFAFEWKDPERGISGQLTWTRLPQGFKNSPTLFNEALHRDLTDFRTQHPEVTLLQYVDDLLLAAPTKKACTQGTRHLLQELGEKGYRASAKKAQICQTKVTYLGYILSEGKRWLTPGRIETVARIPPPRNPREVREFLGTAGFCRLWIPGFAELAAPLYALTKPSTPFTWQTEHQLAFEALKKALLSAPALGLPDTSKPFTLFLDERQGIAKGVLTQKLGPWKRPVAYLSKKLDPVAAGWPPCLRIMAATAMLVKDSAKLTLGQPLTVITPHTLEAIVRQPPDRWITNARLTHYQALLLDTDRVQFGPPVTLNPATLLPVPENQPSPHDCRQVLAETHGTREDLKDQELPDADHTWYTDGSSYLDSGTRRAGAAVVDGHNTIWAQSLPPGTSAQKAELIALTKALELSKGKKANIYTDSRYAFATAHTHGSIYERRGWLTSEGKEIKNKAEIIALLKALFLPQEVAIIHCPGHQKGQDPVAVGNRQADRVARQAAMAEVLTLATEPDNTSHITAGKRTADGSEFEKRTADGSEFESPKKKAKVE

SEQ ID NO: 1545 - protein, 2094 aa, synthetic construct
  source 1..2094: note = Description of Artificial Sequence: Synthetic polypeptide
MPAAKRVKLDGGDKKYSIGLDIGTNSVGWAVITDEYKVPSKKFKVLGNTDRHSIKKNLIGALLFDSGETAEATRLKRTARRRYTRRKNRICYLQEIFSNEMAKVDDSFFHRLEESFLVEEDKKHERHPIFGNIVDEVAYHEKYPTIYHLRKKLVDSTDKADLRLIYLALAHMIKFRGHFLIEGDLNPDNSDVDKLFIQLVQTYNQLFEENPINASGVDAKAILSARLSKSRRLENLIAQLPGEKKNGLFGNLIALSLGLTPNFKSNFDLAEDAKLQLSKDTYDDDLDNLLAQIGDQYADLFLAAKNLSDAILLSDILRVNTEITKAPLSASMIKRYDEHHQDLTLLKALVRQQLPEKYKEIFFDQSKNGYAGYIDGGASQEEFYKFIKPILEKMDGTEELLVKLNREDLLRKQRTFDNGSIPHQIHLGELHAILRRQEDFYPFLKDNREKIEKILTFRIPYYVGPLARGNSRFAWMTRKSEETITPWNFEEVVDKGASAQSFIERMTNFDKNLPNEKVLPKHSLLYEYFTVYNELTKVKYVTEGMRKPAFLSGEQKKAIVDLLFKTNRKVTVKQLKEDYFKKIECFDSVEISGVEDRFNASLGTYHDLLKIIKDKDFLDNEENEDILEDIVLTLTLFEDREMIEERLKTYAHLFDDKVMKQLKRRRYTGWGRLSRKLINGIRDKQSGKTILDFLKSDGFANRNFMQLIHDDSLTFKEDIQKAQVSGQGDSLHEHIANLAGSPAIKKGILQTVKVVDELVKVMGRHKPENIVIEMARENQTTQKGQKNSRERMKRIEEGIKELGSQILKEHPVENTQLQNEKLYLYYLQNGRDMYVDQELDINRLSDYDVDHIVPQSFLKDDSIDNKVLTRSDKARGKSDNVPSEEVVKKMKNYWRQLLNAKLITQRKFDNLTKAERGGLSELDKAGFIKRQLVETRQITKHVAQILDSRMNTKYDENDKLIREVKVITLKSKLVSDFRKDFQFYKVREINNYHHAHDAYLNAVVGTALIKKYPKLESEFVYGDYKVYDVRKMIAKSEQEIGKATAKYFFYSNIMNFFKTEITLANGEIRKRPLIETNGETGEIVWDKGRDFATVRKVLSMPQVNIVKKTEVQTGGFSKESILPKRNSDKLIARKKDWDPKKYGGFDSPTVAYSVLVVAKVEKGKSKKLKSVKELLGITIMERSSFEKNPIDFLEAKGYKEVKKDLIIKLPKYSLFELENGRKRMLASAGELQKGNELALPSKYVNFLYLASHYEKLKGSPEDNEQKQLFVEQHKHYLDEIIEQISEFSKRVILADANLDKVLSAYNKHRDKPIREQAENIIHLFTLTNLGAPAAFKYFDTTIDRKRYTSTKEVLDATLIHQSITGLYETRIDLSQLGGDGGGSSGGTVSLQDEHRLFDIPVTTSLPDVWLQDFPQAWAETGGLGRAKCQAPIIIDLKPTAVPVSIKQYPMSLEAHMGIRQHIIKFLELGVLRPCRSPWNTPLLPVKKPGTQDYRPVQDLREINKRTVDIHPTVPNPYNLLSTLKPDYSWYTVLDLKDAFFCLPLAPQSQELFAFEWKDPERGISGQLTWTRLPQGFKNSPTLFNEALHRDLTDFRTQHPEVTLLQYVDDLLLAAPTKKACTQGTRHLLQELGEKGYRASAKKAQICQTKVTYLGYILSEGKRWLTPGRIETVARIPPPRNPREVREFLGTAGFCRLWIPGFAELAAPLYALTKPSTPFTWQTEHQLAFEALKKALLSAPALGLPDTSKPFTLFLDERQGIAKGVLTQKLGPWKRPVAYLSKKLDPVAAGWPPCLRIMAATAMLVKDSAKLTLGQPLTVITPHTLEAIVRQPPDRWITNARLTHYQALLLDTDRVQFGPPVTLNPATLLPVPENQPSPHDCRQVLAETHGTREDLKDQELPDADHTWYTDGSSYLDSGTRRAGAAVVDGHNTIWAQSLPPGTSAQKAELIALTKALELSKGKKANIYTDSRYAFATAHTHGSIYERRGWLTSEGKEIKNKAEIIALLKALFLPQEVAIIHCPGHQKGQDPVAVGNRQADRVARQAAMAEVLTLATEPDNTSHITAGKRTADGSEFEKRTADGSEFESPKKKAKVE

SEQ ID NO: 1546 - protein, 2116 aa, synthetic construct
  source 1..2116: note = Description of Artificial Sequence: Synthetic polypeptide
MPAAKRVKLDGGDKKYSIGLDIGTNSVGWAVITDEYKVPSKKFKVLGNTDRHSIKKNLIGALLFDSGETAEATRLKRTARRRYTRRKNRICYLQEIFSNEMAKVDDSFFHRLEESFLVEEDKKHERHPIFGNIVDEVAYHEKYPTIYHLRKKLVDSTDKADLRLIYLALAHMIKFRGHFLIEGDLNPDNSDVDKLFIQLVQTYNQLFEENPINASGVDAKAILSARLSKSRRLENLIAQLPGEKKNGLFGNLIALSLGLTPNFKSNFDLAEDAKLQLSKDTYDDDLDNLLAQIGDQYADLFLAAKNLSDAILLSDILRVNTEITKAPLSASMIKRYDEHHQDLTLLKALVRQQLPEKYKEIFFDQSKNGYAGYIDGGASQEEFYKFIKPILEKMDGTEELLVKLNREDLLRKQRTFDNGSIPHQIHLGELHAILRRQEDFYPFLKDNREKIEKILTFRIPYYVGPLARGNSRFAWMTRKSEETITPWNFEEVVDKGASAQSFIERMTNFDKNLPNEKVLPKHSLLYEYFTVYNELTKVKYVTEGMRKPAFLSGEQKKAIVDLLFKTNRKVTVKQLKEDYFKKIECFDSVEISGVEDRFNASLGTYHDLLKIIKDKDFLDNEENEDILEDIVLTLTLFEDREMIEERLKTYAHLFDDKVMKQLKRRRYTGWGRLSRKLINGIRDKQSGKTILDFLKSDGFANRNFMQLIHDDSLTFKEDIQKAQVSGQGDSLHEHIANLAGSPAIKKGILQTVKVVDELVKVMGRHKPENIVIEMARENQTTQKGQKNSRERMKRIEEGIKELGSQILKEHPVENTQLQNEKLYLYYLQNGRDMYVDQELDINRLSDYDVDHIVPQSFLKDDSIDNKVLTRSDKARGKSDNVPSEEVVKKMKNYWRQLLNAKLITQRKFDNLTKAERGGLSELDKAGFIKRQLVETRQITKHVAQILDSRMNTKYDENDKLIREVKVITLKSKLVSDFRKDFQFYKVREINNYHHAHDAYLNAVVGTALIKKYPKLESEFVYGDYKVYDVRKMIAKSEQEIGKATAKYFFYSNIMNFFKTEITLANGEIRKRPLIETNGETGEIVWDKGRDFATVRKVLSMPQVNIVKKTEVQTGGFSKESILPKRNSDKLIARKKDWDPKKYGGFDSPTVAYSVLVVAKVEKGKSKKLKSVKELLGITIMERSSFEKNPIDFLEAKGYKEVKKDLIIKLPKYSLFELENGRKRMLASAGELQKGNELALPSKYVNFLYLASHYEKLKGSPEDNEQKQLFVEQHKHYLDEIIEQISEFSKRVILADANLDKVLSAYNKHRDKPIREQAENIIHLFTLTNLGAPAAFKYFDTTIDRKRYTSTKEVLDATLIHQSITGLYETRIDLSQLGGDGGEAAAKEAAAKEAAAKEAAAKEAAAKGGTVSLQDEHRLFDIPVTTSLPDVWLQDFPQAWAETGGLGRAKCQAPIIIDLKPTAVPVSIKQYPMSLEAHMGIRQHIIKFLELGVLRPCRSPWNTPLLPVKKPGTQDYRPVQDLREINKRTVDIHPTVPNPYNLLSTLKPDYSWYTVLDLKDAFFCLPLAPQSQELFAFEWKDPERGISGQLTWTRLPQGFKNSPTLFNEALHRDLTDFRTQHPEVTLLQYVDDLLLAAPTKKACTQGTRHLLQELGEKGYRASAKKAQICQTKVTYLGYILSEGKRWLTPGRIETVARIPPPRNPREVREFLGTAGFCRLWIPGFAELAAPLYALTKPSTPFTWQTEHQLAFEALKKALLSAPALGLPDTSKPFTLFLDERQGIAKGVLTQKLGPWKRPVAYLSKKLDPVAAGWPPCLRIMAATAMLVKDSAKLTLGQPLTVITPHTLEAIVRQPPDRWITNARLTHYQALLLDTDRVQFGPPVTLNPATLLPVPENQPSPHDCRQVLAETHGTREDLKDQELPDADHTWYTDGSSYLDSGTRRAGAAVVDGHNTIWAQSLPPGTSAQKAELIALTKALELSKGKKANIYTDSRYAFATAHTHGSIYERRGWLTSEGKEIKNKAEIIALLKALFLPQEVAIIHCPGHQKGQDPVAVGNRQADRVARQAAMAEVLTLATEPDNTSHITAGKRTADGSEFEKRTADGSEFESPKKKAKVE

SEQ ID NO: 1547 - protein, 2099 aa, synthetic construct
  source 1..2099: note = Description of Artificial Sequence: Synthetic polypeptide
MPAAKRVKLDGGDKKYSIGLDIGTNSVGWAVITDEYKVPSKKFKVLGNTDRHSIKKNLIGALLFDSGETAEATRLKRTARRRYTRRKNRICYLQEIFSNEMAKVDDSFFHRLEESFLVEEDKKHERHPIFGNIVDEVAYHEKYPTIYHLRKKLVDSTDKADLRLIYLALAHMIKFRGHFLIEGDLNPDNSDVDKLFIQLVQTYNQLFEENPINASGVDAKAILSARLSKSRRLENLIAQLPGEKKNGLFGNLIALSLGLTPNFKSNFDLAEDAKLQLSKDTYDDDLDNLLAQIGDQYADLFLAAKNLSDAILLSDILRVNTEITKAPLSASMIKRYDEHHQDLTLLKALVRQQLPEKYKEIFFDQSKNGYAGYIDGGASQEEFYKFIKPILEKMDGTEELLVKLNREDLLRKQRTFDNGSIPHQIHLGELHAILRRQEDFYPFLKDNREKIEKILTFRIPYYVGPLARGNSRFAWMTRKSEETITPWNFEEVVDKGASAQSFIERMTNFDKNLPNEKVLPKHSLLYEYFTVYNELTKVKYVTEGMRKPAFLSGEQKKAIVDLLFKTNRKVTVKQLKEDYFKKIECFDSVEISGVEDRFNASLGTYHDLLKIIKDKDFLDNEENEDILEDIVLTLTLFEDREMIEERLKTYAHLFDDKVMKQLKRRRYTGWGRLSRKLINGIRDKQSGKTILDFLKSDGFANRNFMQLIHDDSLTFKEDIQKAQVSGQGDSLHEHIANLAGSPAIKKGILQTVKVVDELVKVMGRHKPENIVIEMARENQTTQKGQKNSRERMKRIEEGIKELGSQILKEHPVENTQLQNEKLYLYYLQNGRDMYVDQELDINRLSDYDVDHIVPQSFLKDDSIDNKVLTRSDKARGKSDNVPSEEVVKKMKNYWRQLLNAKLITQRKFDNLTKAERGGLSELDKAGFIKRQLVETRQITKHVAQILDSRMNTKYDENDKLIREVKVITLKSKLVSDFRKDFQFYKVREINNYHHAHDAYLNAVVGTALIKKYPKLESEFVYGDYKVYDVRKMIAKSEQEIGKATAKYFFYSNIMNFFKTEITLANGEIRKRPLIETNGETGEIVWDKGRDFATVRKVLSMPQVNIVKKTEVQTGGFSKESILPKRNSDKLIARKKDWDPKKYGGFDSPTVAYSVLVVAKVEKGKSKKLKSVKELLGITIMERSSFEKNPIDFLEAKGYKEVKKDLIIKLPKYSLFELENGRKRMLASAGELQKGNELALPSKYVNFLYLASHYEKLKGSPEDNEQKQLFVEQHKHYLDEIIEQISEFSKRVILADANLDKVLSAYNKHRDKPIREQAENIIHLFTLTNLGAPAAFKYFDTTIDRKRYTSTKEVLDATLIHQSITGLYETRIDLSQLGGDGGEAAAKGGGGGTVSLQDEHRLFDIPVTTSLPDVWLQDFPQAWAETGGLGRAKCQAPIIIDLKPTAVPVSIKQYPMSLEAHMGIRQHIIKFLELGVLRPCRSPWNTPLLPVKKPGTQDYRPVQDLREINKRTVDIHPTVPNPYNLLSTLKPDYSWYTVLDLKDAFFCLPLAPQSQELFAFEWKDPERGISGQLTWTRLPQGFKNSPTLFNEALHRDLTDFRTQHPEVTLLQYVDDLLLAAPTKKACTQGTRHLLQELGEKGYRASAKKAQICQTKVTYLGYILSEGKRWLTPGRIETVARIPPPRNPREVREFLGTAGFCRLWIPGFAELAAPLYALTKPSTPFTWQTEHQLAFEALKKALLSAPALGLPDTSKPFTLFLDERQGIAKGVLTQKLGPWKRPVAYLSKKLDPVAAGWPPCLRIMAATAMLVKDSAKLTLGQPLTVITPHTLEAIVRQPPDRWITNARLTHYQALLLDTDRVQFGPPVTLNPATLLPVPENQPSPHDCRQVLAETHGTREDLKDQELPDADHTWYTDGSSYLDSGTRRAGAAVVDGHNTIWAQSLPPGTSAQKAELIALTKALELSKGKKANIYTDSRYAFATAHTHGSIYERRGWLTSEGKEIKNKAEIIALLKALFLPQEVAIIHCPGHQKGQDPVAVGNRQADRVARQAAMAEVLTLATEPDNTSHITAGKRTADGSEFEKRTADGSEFESPKKKAKVE

SEQ ID NO: 1548 - protein, 2097 aa, synthetic construct
  source 1..2097: note = Description of Artificial Sequence: Synthetic polypeptide
MPAAKRVKLDGGDKKYSIGLDIGTNSVGWAVITDEYKVPSKKFKVLGNTDRHSIKKNLIGALLFDSGETAEATRLKRTARRRYTRRKNRICYLQEIFSNEMAKVDDSFFHRLEESFLVEEDKKHERHPIFGNIVDEVAYHEKYPTIYHLRKKLVDSTDKADLRLIYLALAHMIKFRGHFLIEGDLNPDNSDVDKLFIQLVQTYNQLFEENPINASGVDAKAILSARLSKSRRLENLIAQLPGEKKNGLFGNLIALSLGLTPNFKSNFDLAEDAKLQLSKDTYDDDLDNLLAQIGDQYADLFLAAKNLSDAILLSDILRVNTEITKAPLSASMIKRYDEHHQDLTLLKALVRQQLPEKYKEIFFDQSKNGYAGYIDGGASQEEFYKFIKPILEKMDGTEELLVKLNREDLLRKQRTFDNGSIPHQIHLGELHAILRRQEDFYPFLKDNREKIEKILTFRIPYYVGPLARGNSRFAWMTRKSEETITPWNFEEVVDKGASAQSFIERMTNFDKNLPNEKVLPKHSLLYEYFTVYNELTKVKYVTEGMRKPAFLSGEQKKAIVDLLFKTNRKVTVKQLKEDYFKKIECFDSVEISGVEDRFNASLGTYHDLLKIIKDKDFLDNEENEDILEDIVLTLTLFEDREMIEERLKTYAHLFDDKVMKQLKRRRYTGWGRLSRKLINGIRDKQSGKTILDFLKSDGFANRNFMQLIHDDSLTFKEDIQKAQVSGQGDSLHEHIANLAGSPAIKKGILQTVKVVDELVKVMGRHKPENIVIEMARENQTTQKGQKNSRERMKRIEEGIKELGSQILKEHPVENTQLQNEKLYLYYLQNGRDMYVDQELDINRLSDYDVDHIVPQSFLKDDSIDNKVLTRSDKARGKSDNVPSEEVVKKMKNYWRQLLNAKLITQRKFDNLTKAERGGLSELDKAGFIKRQLVETRQITKHVAQILDSRMNTKYDENDKLIREVKVITLKSKLVSDFRKDFQFYKVREINNYHHAHDAYLNAVVGTALIKKYPKLESEFVYGDYKVYDVRKMIAKSEQEIGKATAKYFFYSNIMNFFKTEITLANGEIRKRPLIETNGETGEIVWDKGRDFATVRKVLSMPQVNIVKKTEVQTGGFSKESILPKRNSDKLIARKKDWDPKKYGGFDSPTVAYSVLVVAKVEKGKSKKLKSVKELLGITIMERSSFEKNPIDFLEAKGYKEVKKDLIIKLPKYSLFELENGRKRMLASAGELQKGNELALPSKYVNFLYLASHYEKLKGSPEDNEQKQLFVEQHKHYLDEIIEQISEFSKRVILADANLDKVLSAYNKHRDKPIREQAENIIHLFTLTNLGAPAAFKYFDTTIDRKRYTSTKEVLDATLIHQSITGLYETRIDLSQLGGDGGGSSGGGGGTVSLQDEHRLFDIPVTTSLPDVWLQDFPQAWAETGGLGRAKCQAPIIIDLKPTAVPVSIKQYPMSLEAHMGIRQHIIKFLELGVLRPCRSPWNTPLLPVKKPGTQDYRPVQDLREINKRTVDIHPTVPNPYNLLSTLKPDYSWYTVLDLKDAFFCLPLAPQSQELFAFEWKDPERGISGQLTWTRLPQGFKNSPTLFNEALHRDLTDFRTQHPEVTLLQYVDDLLLAAPTKKACTQGTRHLLQELGEKGYRASAKKAQICQTKVTYLGYILSEGKRWLTPGRIETVARIPPPRNPREVREFLGTAGFCRLWIPGFAELAAPLYALTKPSTPFTWQTEHQLAFEALKKALLSAPALGLPDTSKPFTLFLDERQGIAKGVLTQKLGPWKRPVAYLSKKLDPVAAGWPPCLRIMAATAMLVKDSAKLTLGQPLTVITPHTLEAIVRQPPDRWITNARLTHYQALLLDTDRVQFGPPVTLNPATLLPVPENQPSPHDCRQVLAETHGTREDLKDQELPDADHTWYTDGSSYLDSGTRRAGAAVVDGHNTIWAQSLPPGTSAQKAELIALTKALELSKGKKANIYTDSRYAFATAHTHGSIYERRGWLTSEGKEIKNKAEIIALLKALFLPQEVAIIHCPGHQKGQDPVAVGNRQADRVARQAAMAEVLTLATEPDNTSHITAGKRTADGSEFEKRTADGSEFESPKKKAKVE

SEQ ID NO: 1549 - protein, 2102 aa, synthetic construct
  source 1..2102: note = Description of Artificial Sequence: Synthetic polypeptide
MPAAKRVKLDGGDKKYSIGLDIGTNSVGWAVITDEYKVPSKKFKVLGNTDRHSIKKNLIGALLFDSGETAEATRLKRTARRRYTRRKNRICYLQEIFSNEMAKVDDSFFHRLEESFLVEEDKKHERHPIFGNIVDEVAYHEKYPTIYHLRKKLVDSTDKADLRLIYLALAHMIKFRGHFLIEGDLNPDNSDVDKLFIQLVQTYNQLFEENPINASGVDAKAILSARLSKSRRLENLIAQLPGEKKNGLFGNLIALSLGLTPNFKSNFDLAEDAKLQLSKDTYDDDLDNLLAQIGDQYADLFLAAKNLSDAILLSDILRVNTEITKAPLSASMIKRYDEHHQDLTLLKALVRQQLPEKYKEIFFDQSKNGYAGYIDGGASQEEFYKFIKPILEKMDGTEELLVKLNREDLLRKQRTFDNGSIPHQIHLGELHAILRRQEDFYPFLKDNREKIEKILTFRIPYYVGPLARGNSRFAWMTRKSEETITPWNFEEVVDKGASAQSFIERMTNFDKNLPNEKVLPKHSLLYEYFTVYNELTKVKYVTEGMRKPAFLSGEQKKAIVDLLFKTNRKVTVKQLKEDYFKKIECFDSVEISGVEDRFNASLGTYHDLLKIIKDKDFLDNEENEDILEDIVLTLTLFEDREMIEERLKTYAHLFDDKVMKQLKRRRYTGWGRLSRKLINGIRDKQSGKTILDFLKSDGFANRNFMQLIHDDSLTFKEDIQKAQVSGQGDSLHEHIANLAGSPAIKKGILQTVKVVDELVKVMGRHKPENIVIEMARENQTTQKGQKNSRERMKRIEEGIKELGSQILKEHPVENTQLQNEKLYLYYLQNGRDMYVDQELDINRLSDYDVDHIVPQSFLKDDSIDNKVLTRSDKARGKSDNVPSEEVVKKMKNYWRQLLNAKLITQRKFDNLTKAERGGLSELDKAGFIKRQLVETRQITKHVAQILDSRMNTKYDENDKLIREVKVITLKSKLVSDFRKDFQFYKVREINNYHHAHDAYLNAVVGTALIKKYPKLESEFVYGDYKVYDVRKMIAKSEQEIGKATAKYFFYSNIMNFFKTEITLANGEIRKRPLIETNGETGEIVWDKGRDFATVRKVLSMPQVNIVKKTEVQTGGFSKESILPKRNSDKLIARKKDWDPKKYGGFDSPTVAYSVLVVAKVEKGKSKKLKSVKELLGITIMERSSFEKNPIDFLEAKGYKEVKKDLIIKLPKYSLFELENGRKRMLASAGELQKGNELALPSKYVNFLYLASHYEKLKGSPEDNEQKQLFVEQHKHYLDEIIEQISEFSKRVILADANLDKVLSAYNKHRDKPIREQAENIIHLFTLTNLGAPAAFKYFDTTIDRKRYTSTKEVLDATLIHQSITGLYETRIDLSQLGGDGGGGSGSSEAAAKGGTVSLQDEHRLFDIPVTTSLPDVWLQDFPQAWAETGGLGRAKCQAPIIIDLKPTAVPVSIKQYPMSLEAHMGIRQHIIKFLELGVLRPCRSPWNTPLLPVKKPGTQDYRPVQDLREINKRTVDIHPTVPNPYNLLSTLKPDYSWYTVLDLKDAFFCLPLAPQSQELFAFEWKDPERGISGQLTWTRLPQGFKNSPTLFNEALHRDLTDFRTQHPEVTLLQYVDDLLLAAPTKKACTQGTRHLLQELGEKGYRASAKKAQICQTKVTYLGYILSEGKRWLTPGRIETVARIPPPRNPREVREFLGTAGFCRLWIPGFAELAAPLYALTKPSTPFTWQTEHQLAFEALKKALLSAPALGLPDTSKPFTLFLDERQGIAKGVLTQKLGPWKRPVAYLSKKLDPVAAGWPPCLRIMAATAMLVKDSAKLTLGQPLTVITPHTLEAIVRQPPDRWITNARLTHYQALLLDTDRVQFGPPVTLNPATLLPVPENQPSPHDCRQVLAETHGTREDLKDQELPDADHTWYTDGSSYLDSGTRRAGAAVVDGHNTIWAQSLPPGTSAQKAELIALTKALELSKGKKANIYTDSRYAFATAHTHGSIYERRGWLTSEGKEIKNKAEIIALLKALFLPQEVAIIHCPGHQKGQDPVAVGNRQADRVARQAAMAEVLTLATEPDNTSHITAGKRTADGSEFEKRTADGSEFESPKKKAKVE

SEQ ID NO: 1550 - protein, 2100 aa, synthetic construct
  source 1..2100: note = Description of Artificial Sequence: Synthetic polypeptide
MPAAKRVKLDGGDKKYSIGLDIGTNSVGWAVITDEYKVPSKKFKVLGNTDRHSIKKNLIGALLFDSGETAEATRLKRTARRRYTRRKNRICYLQEIFSNEMAKVDDSFFHRLEESFLVEEDKKHERHPIFGNIVDEVAYHEKYPTIYHLRKKLVDSTDKADLRLIYLALAHMIKFRGHFLIEGDLNPDNSDVDKLFIQLVQTYNQLFEENPINASGVDAKAILSARLSKSRRLENLIAQLPGEKKNGLFGNLIALSLGLTPNFKSNFDLAEDAKLQLSKDTYDDDLDNLLAQIGDQYADLFLAAKNLSDAILLSDILRVNTEITKAPLSASMIKRYDEHHQDLTLLKALVRQQLPEKYKEIFFDQSKNGYAGYIDGGASQEEFYKFIKPILEKMDGTEELLVKLNREDLLRKQRTFDNGSIPHQIHLGELHAILRRQEDFYPFLKDNREKIEKILTFRIPYYVGPLARGNSRFAWMTRKSEETITPWNFEEVVDKGASAQSFIERMTNFDKNLPNEKVLPKHSLLYEYFTVYNELTKVKYVTEGMRKPAFLSGEQKKAIVDLLFKTNRKVTVKQLKEDYFKKIECFDSVEISGVEDRFNASLGTYHDLLKIIKDKDFLDNEENEDILEDIVLTLTLFEDREMIEERLKTYAHLFDDKVMKQLKRRRYTGWGRLSRKLINGIRDKQSGKTILDFLKSDGFANRNFMQLIHDDSLTFKEDIQKAQVSGQGDSLHEHIANLAGSPAIKKGILQTVKVVDELVKVMGRHKPENIVIEMARENQTTQKGQKNSRERMKRIEEGIKELGSQILKEHPVENTQLQNEKLYLYYLQNGRDMYVDQELDINRLSDYDVDHIVPQSFLKDDSIDNKVLTRSDKARGKSDNVPSEEVVKKMKNYWRQLLNAKLITQRKFDNLTKAERGGLSELDKAGFIKRQLVETRQITKHVAQILDSRMNTKYDENDKLIREVKVITLKSKLVSDFRKDFQFYKVREINNYHHAHDAYLNAVVGTALIKKYPKLESEFVYGDYKVYDVRKMIAKSEQEIGKATAKYFFYSNIMNFFKTEITLANGEIRKRPLIETNGETGEIVWDKGRDFATVRKVLSMPQVNIVKKTEVQTGGFSKESILPKRNSDKLIARKKDWDPKKYGGFDSPTVAYSVLVVAKVEKGKSKKLKSVKELLGITIMERSSFEKNPIDFLEAKGYKEVKKDLIIKLPKYSLFELENGRKRMLASAGELQKGNELALPSKYVNFLYLASHYEKLKGSPEDNEQKQLFVEQHKHYLDEIIEQISEFSKRVILADANLDKVLSAYNKHRDKPIREQAENIIHLFTLTNLGAPAAFKYFDTTIDRKRYTSTKEVLDATLIHQSITGLYETRIDLSQLGGDGGGGSGSSGGGGGTVSLQDEHRLFDIPVTTSLPDVWLQDFPQAWAETGGLGRAKCQAPIIIDLKPTAVPVSIKQYPMSLEAHMGIRQHIIKFLELGVLRPCRSPWNTPLLPVKKPGTQDYRPVQDLREINKRTVDIHPTVPNPYNLLSTLKPDYSWYTVLDLKDAFFCLPLAPQSQELFAFEWKDPERGISGQLTWTRLPQGFKNSPTLFNEALHRDLTDFRTQHPEVTLLQYVDDLLLAAPTKKACTQGTRHLLQELGEKGYRASAKKAQICQTKVTYLGYILSEGKRWLTPGRIETVARIPPPRNPREVREFLGTAGFCRLWIPGFAELAAPLYALTKPSTPFTWQTEHQLAFEALKKALLSAPALGLPDTSKPFTLFLDERQGIAKGVLTQKLGPWKRPVAYLSKKLDPVAAGWPPCLRIMAATAMLVKDSAKLTLGQPLTVITPHTLEAIVRQPPDRWITNARLTHYQALLLDTDRVQFGPPVTLNPATLLPVPENQPSPHDCRQVLAETHGTREDLKDQELPDADHTWYTDGSSYLDSGTRRAGAAVVDGHNTIWAQSLPPGTSAQKAELIALTKALELSKGKKANIYTDSRYAFATAHTHGSIYERRGWLTSEGKEIKNKAEIIALLKALFLPQEVAIIHCPGHQKGQDPVAVGNRQADRVARQAAMAEVLTLATEPDNTSHITAGKRTADGSEFEKRTADGSEFESPKKKAKVE

SEQ ID NO: 1551 - protein, 2100 aa, synthetic construct
  source 1..2100: note = Description of Artificial Sequence: Synthetic polypeptide
MPAAKRVKLDGGDKKYSIGLDIGTNSVGWAVITDEYKVPSKKFKVLGNTDRHSIKKNLIGALLFDSGETAEATRLKRTARRRYTRRKNRICYLQEIFSNEMAKVDDSFFHRLEESFLVEEDKKHERHPIFGNIVDEVAYHEKYPTIYHLRKKLVDSTDKADLRLIYLALAHMIKFRGHFLIEGDLNPDNSDVDKLFIQLVQTYNQLFEENPINASGVDAKAILSARLSKSRRLENLIAQLPGEKKNGLFGNLIALSLGLTPNFKSNFDLAEDAKLQLSKDTYDDDLDNLLAQIGDQYADLFLAAKNLSDAILLSDILRVNTEITKAPLSASMIKRYDEHHQDLTLLKALVRQQLPEKYKEIFFDQSKNGYAGYIDGGASQEEFYKFIKPILEKMDGTEELLVKLNREDLLRKQRTFDNGSIPHQIHLGELHAILRRQEDFYPFLKDNREKIEKILTFRIPYYVGPLARGNSRFAWMTRKSEETITPWNFEEVVDKGASAQSFIERMTNFDKNLPNEKVLPKHSLLYEYFTVYNELTKVKYVTEGMRKPAFLSGEQKKAIVDLLFKTNRKVTVKQLKEDYFKKIECFDSVEISGVEDRFNASLGTYHDLLKIIKDKDFLDNEENEDILEDIVLTLTLFEDREMIEERLKTYAHLFDDKVMKQLKRRRYTGWGRLSRKLINGIRDKQSGKTILDFLKSDGFANRNFMQLIHDDSLTFKEDIQKAQVSGQGDSLHEHIANLAGSPAIKKGILQTVKVVDELVKVMGRHKPENIVIEMARENQTTQKGQKNSRERMKRIEEGIKELGSQILKEHPVENTQLQNEKLYLYYLQNGRDMYVDQELDINRLSDYDVDHIVPQSFLKDDSIDNKVLTRSDKARGKSDNVPSEEVVKKMKNYWRQLLNAKLITQRKFDNLTKAERGGLSELDKAGFIKRQLVETRQITKHVAQILDSRMNTKYDENDKLIREVKVITLKSKLVSDFRKDFQFYKVREINNYHHAHDAYLNAVVGTALIKKYPKLESEFVYGDYKVYDVRKMIAKSEQEIGKATAKYFFYSNIMNFFKTEITLANGEIRKRPLIETNGETGEIVWDKGRDFATVRKVLSMPQVNIVKKTEVQTGGFSKESILPKRNSDKLIARKKDWDPKKYGGFDSPTVAYSVLVVAKVEKGKSKKLKSVKELLGITIMERSSFEKNPIDFLEAKGYKEVKKDLIIKLPKYSLFELENGRKRMLASAGELQKGNELALPSKYVNFLYLASHYEKLKGSPEDNEQKQLFVEQHKHYLDEIIEQISEFSKRVILADANLDKVLSAYNKHRDKPIREQAENIIHLFTLTNLGAPAAFKYFDTTIDRKRYTSTKEVLDATLIHQSITGLYETRIDLSQLGGDGGGGSGSSPAPGGTVSLQDEHRLFDIPVTTSLPDVWLQDFPQAWAETGGLGRAKCQAPIIIDLKPTAVPVSIKQYPMSLEAHMGIRQHIIKFLELGVLRPCRSPWNTPLLPVKKPGTQDYRPVQDLREINKRTVDIHPTVPNPYNLLSTLKPDYSWYTVLDLKDAFFCLPLAPQSQELFAFEWKDPERGISGQLTWTRLPQGFKNSPTLFNEALHRDLTDFRTQHPEVTLLQYVDDLLLAAPTKKACTQGTRHLLQELGEKGYRASAKKAQICQTKVTYLGYILSEGKRWLTPGRIETVARIPPPRNPREVREFLGTAGFCRLWIPGFAELAAPLYALTKPSTPFTWQTEHQLAFEALKKALLSAPALGLPDTSKPFTLFLDERQGIAKGVLTQKLGPWKRPVAYLSKKLDPVAAGWPPCLRIMAATAMLVKDSAKLTLGQPLTVITPHTLEAIVRQPPDRWITNARLTHYQALLLDTDRVQFGPPVTLNPATLLPVPENQPSPHDCRQVLAETHGTREDLKDQELPDADHTWYTDGSSYLDSGTRRAGAAVVDGHNTIWAQSLPPGTSAQKAELIALTKALELSKGKKANIYTDSRYAFATAHTHGSIYERRGWLTSEGKEIKNKAEIIALLKALFLPQEVAIIHCPGHQKGQDPVAVGNRQADRVARQAAMAEVLTLATEPDNTSHITAGKRTADGSEFEKRTADGSEFESPKKKAKVE

SEQ ID NO: 1552 - protein, 2111 aa, synthetic construct
  source 1..2111: note = Description of Artificial Sequence: Synthetic polypeptide
MPAAKRVKLDGGDKKYSIGLDIGTNSVGWAVITDEYKVPSKKFKVLGNTDRHSIKKNLIGALLFDSGETAEATRLKRTARRRYTRRKNRICYLQEIFSNEMAKVDDSFFHRLEESFLVEEDKKHERHPIFGNIVDEVAYHEKYPTIYHLRKKLVDSTDKADLRLIYLALAHMIKFRGHFLIEGDLNPDNSDVDKLFIQLVQTYNQLFEENPINASGVDAKAILSARLSKSRRLENLIAQLPGEKKNGLFGNLIALSLGLTPNFKSNFDLAEDAKLQLSKDTYDDDLDNLLAQIGDQYADLFLAAKNLSDAILLSDILRVNTEITKAPLSASMIKRYDEHHQDLTLLKALVRQQLPEKYKEIFFDQSKNGYAGYIDGGASQEEFYKFIKPILEKMDGTEELLVKLNREDLLRKQRTFDNGSIPHQIHLGELHAILRRQEDFYPFLKDNREKIEKILTFRIPYYVGPLARGNSRFAWMTRKSEETITPWNFEEVVDKGASAQSFIERMTNFDKNLPNEKVLPKHSLLYEYFTVYNELTKVKYVTEGMRKPAFLSGEQKKAIVDLLFKTNRKVTVKQLKEDYFKKIECFDSVEISGVEDRFNASLGTYHDLLKIIKDKDFLDNEENEDILEDIVLTLTLFEDREMIEERLKTYAHLFDDKVMKQLKRRRYTGWGRLSRKLINGIRDKQSGKTILDFLKSDGFANRNFMQLIHDDSLTFKEDIQKAQVSGQGDSLHEHIANLAGSPAIKKGILQTVKVVDELVKVMGRHKPENIVIEMARENQTTQKGQKNSRERMKRIEEGIKELGSQILKEHPVENTQLQNEKLYLYYLQNGRDMYVDQELDINRLSDYDVDHIVPQSFLKDDSIDNKVLTRSDKARGKSDNVPSEEVVKKMKNYWRQLLNAKLITQRKFDNLTKAERGGLSELDKAGFIKRQLVETRQITKHVAQILDSRMNTKYDENDKLIREVKVITLKSKLVSDFRKDFQFYKVREINNYHHAHDAYLNAVVGTALIKKYPKLESEFVYGDYKVYDVRKMIAKSEQEIGKATAKYFFYSNIMNFFKTEITLANGEIRKRPLIETNGETGEIVWDKGRDFATVRKVLSMPQVNIVKKTEVQTGGFSKESILPKRNSDKLIARKKDWDPKKYGGFDSPTVAYSVLVVAKVEKGKSKKLKSVKELLGITIMERSSFEKNPIDFLEAKGYKEVKKDLIIKLPKYSLFELENGRKRMLASAGELQKGNELALPSKYVNFLYLASHYEKLKGSPEDNEQKQLFVEQHKHYLDEIIEQISEFSKRVILADANLDKVLSAYNKHRDKPIREQAENIIHLFTLTNLGAPAAFKYFDTTIDRKRYTSTKEVLDATLIHQSITGLYETRIDLSQLGGDGGGGGGSGGGGSGGGGSGGGGSGGTVSLQDEHRLFDIPVTTSLPDVWLQDFPQAWAETGGLGRAKCQAPIIIDLKPTAVPVSIKQYPMSLEAHMGIRQHIIKFLELGVLRPCRSPWNTPLLPVKKPGTQDYRPVQDLREINKRTVDIHPTVPNPYNLLSTLKPDYSWYTVLDLKDAFFCLPLAPQSQELFAFEWKDPERGISGQLTWTRLPQGFKNSPTLFNEALHRDLTDFRTQHPEVTLLQYVDDLLLAAPTKKACTQGTRHLLQELGEKGYRASAKKAQICQTKVTYLGYILSEGKRWLTPGRIETVARIPPPRNPREVREFLGTAGFCRLWIPGFAELAAPLYALTKPSTPFTWQTEHQLAFEALKKALLSAPALGLPDTSKPFTLFLDERQGIAKGVLTQKLGPWKRPVAYLSKKLDPVAAGWPPCLRIMAATAMLVKDSAKLTLGQPLTVITPHTLEAIVRQPPDRWITNARLTHYQALLLDTDRVQFGPPVTLNPATLLPVPENQPSPHDCRQVLAETHGTREDLKDQELPDADHTWYTDGSSYLDSGTRRAGAAVVDGHNTIWAQSLPPGTSAQKAELIALTKALELSKGKKANIYTDSRYAFATAHTHGSIYERRGWLTSEGKEIKNKAEIIALLKALFLPQEVAIIHCPGHQKGQDPVAVGNRQADRVARQAAMAEVLTLATEPDNTSHITAGKRTADGSEFEKRTADGSEFESPKKKAKVE

SEQ ID NO: 1553 - protein, 2106 aa, synthetic construct
  source 1..2106: note = Description of Artificial Sequence: Synthetic polypeptide
MPAAKRVKLDGGDKKYSIGLDIGTNSVGWAVITDEYKVPSKKFKVLGNTDRHSIKKNLIGALLFDSGETAEATRLKRTARRRYTRRKNRICYLQEIFSNEMAKVDDSFFHRLEESFLVEEDKKHERHPIFGNIVDEVAYHEKYPTIYHLRKKLVDSTDKADLRLIYLALAHMIKFRGHFLIEGDLNPDNSDVDKLFIQLVQTYNQLFEENPINASGVDAKAILSARLSKSRRLENLIAQLPGEKKNGLFGNLIALSLGLTPNFKSNFDLAEDAKLQLSKDTYDDDLDNLLAQIGDQYADLFLAAKNLSDAILLSDILRVNTEITKAPLSASMIKRYDEHHQDLTLLKALVRQQLPEKYKEIFFDQSKNGYAGYIDGGASQEEFYKFIKPILEKMDGTEELLVKLNREDLLRKQRTFDNGSIPHQIHLGELHAILRRQEDFYPFLKDNREKIEKILTFRIPYYVGPLARGNSRFAWMTRKSEETITPWNFEEVVDKGASAQSFIERMTNFDKNLPNEKVLPKHSLLYEYFTVYNELTKVKYVTEGMRKPAFLSGEQKKAIVDLLFKTNRKVTVKQLKEDYFKKIECFDSVEISGVEDRFNASLGTYHDLLKIIKDKDFLDNEENEDILEDIVLTLTLFEDREMIEERLKTYAHLFDDKVMKQLKRRRYTGWGRLSRKLINGIRDKQSGKTILDFLKSDGFANRNFMQLIHDDSLTFKEDIQKAQVSGQGDSLHEHIANLAGSPAIKKGILQTVKVVDELVKVMGRHKPENIVIEMARENQTTQKGQKNSRERMKRIEEGIKELGSQILKEHPVENTQLQNEKLYLYYLQNGRDMYVDQELDINRLSDYDVDHIVPQSFLKDDSIDNKVLTRSDKARGKSDNVPSEEVVKKMKNYWRQLLNAKLITQRKFDNLTKAERGGLSELDKAGFIKRQLVETRQITKHVAQILDSRMNTKYDENDKLIREVKVITLKSKLVSDFRKDFQFYKVREINNYHHAHDAYLNAVVGTALIKKYPKLESEFVYGDYKVYDVRKMIAKSEQEIGKATAKYFFYSNIMNFFKTEITLANGEIRKRPLIETNGETGEIVWDKGRDFATVRKVLSMPQVNIVKKTEVQTGGFSKESILPKRNSDKLIARKKDWDPKKYGGFDSPTVAYSVLVVAKVEKGKSKKLKSVKELLGITIMERSSFEKNPIDFLEAKGYKEVKKDLIIKLPKYSLFELENGRKRMLASAGELQKGNELALPSKYVNFLYLASHYEKLKGSPEDNEQKQLFVEQHKHYLDEIIEQISEFSKRVILADANLDKVLSAYNKHRDKPIREQAENIIHLFTLTNLGAPAAFKYFDTTIDRKRYTSTKEVLDATLIHQSITGLYETRIDLSQLGGDGGGSSGSSGSSGSSGSSGGTVSLQDEHRLFDIPVTTSLPDVWLQDFPQAWAETGGLGRAKCQAPIIIDLKPTAVPVSIKQYPMSLEAHMGIRQHIIKFLELGVLRPCRSPWNTPLLPVKKPGTQDYRPVQDLREINKRTVDIHPTVPNPYNLLSTLKPDYSWYTVLDLKDAFFCLPLAPQSQELFAFEWKDPERGISGQLTWTRLPQGFKNSPTLFNEALHRDLTDFRTQHPEVTLLQYVDDLLLAAPTKKACTQGTRHLLQELGEKGYRASAKKAQICQTKVTYLGYILSEGKRWLTPGRIETVARIPPPRNPREVREFLGTAGFCRLWIPGFAELAAPLYALTKPSTPFTWQTEHQLAFEALKKALLSAPALGLPDTSKPFTLFLDERQGIAKGVLTQKLGPWKRPVAYLSKKLDPVAAGWPPCLRIMAATAMLVKDSAKLTLGQPLTVITPHTLEAIVRQPPDRWITNARLTHYQALLLDTDRVQFGPPVTLNPATLLPVPENQPSPHDCRQVLAETHGTREDLKDQELPDADHTWYTDGSSYLDSGTRRAGAAVVDGHNTIWAQSLPPGTSAQKAELIALTKALELSKGKKANIYTDSRYAFATAHTHGSIYERRGWLTSEGKEIKNKAEIIALLKALFLPQEVAIIHCPGHQKGQDPVAVGNRQADRVARQAAMAEVLTLATEPDNTSHITAGKRTADGSEFEKRTADGSEFESPKKKAKVE

SEQ ID NO: 1554 - protein, 2097 aa, synthetic construct
  source 1..2097: note = Description of Artificial Sequence: Synthetic polypeptide
MPAAKRVKLDGGDKKYSIGLDIGTNSVGWAVITDEYKVPSKKFKVLGNTDRHSIKKNLIGALLFDSGETAEATRLKRTARRRYTRRKNRICYLQEIFSNEMAKVDDSFFHRLEESFLVEEDKKHERHPIFGNIVDEVAYHEKYPTIYHLRKKLVDSTDKADLRLIYLALAHMIKFRGHFLIEGDLNPDNSDVDKLFIQLVQTYNQLFEENPINASGVDAKAILSARLSKSRRLENLIAQLPGEKKNGLFGNLIALSLGLTPNFKSNFDLAEDAKLQLSKDTYDDDLDNLLAQIGDQYADLFLAAKNLSDAILLSDILRVNTEITKAPLSASMIKRYDEHHQDLTLLKALVRQQLPEKYKEIFFDQSKNGYAGYIDGGASQEEFYKFIKPILEKMDGTEELLVKLNREDLLRKQRTFDNGSIPHQIHLGELHAILRRQEDFYPFLKDNREKIEKILTFRIPYYVGPLARGNSRFAWMTRKSEETITPWNFEEVVDKGASAQSFIERMTNFDKNLPNEKVLPKHSLLYEYFTVYNELTKVKYVTEGMRKPAFLSGEQKKAIVDLLFKTNRKVTVKQLKEDYFKKIECFDSVEISGVEDRFNASLGTYHDLLKIIKDKDFLDNEENEDILEDIVLTLTLFEDREMIEERLKTYAHLFDDKVMKQLKRRRYTGWGRLSRKLINGIRDKQSGKTILDFLKSDGFANRNFMQLIHDDSLTFKEDIQKAQVSGQGDSLHEHIANLAGSPAIKKGILQTVKVVDELVKVMGRHKPENIVIEMARENQTTQKGQKNSRERMKRIEEGIKELGSQILKEHPVENTQLQNEKLYLYYLQNGRDMYVDQELDINRLSDYDVDHIVPQSFLKDDSIDNKVLTRSDKARGKSDNVPSEEVVKKMKNYWRQLLNAKLITQRKFDNLTKAERGGLSELDKAGFIKRQLVETRQITKHVAQILDSRMNTKYDENDKLIREVKVITLKSKLVSDFRKDFQFYKVREINNYHHAHDAYLNAVVGTALIKKYPKLESEFVYGDYKVYDVRKMIAKSEQEIGKATAKYFFYSNIMNFFKTEITLANGEIRKRPLIETNGETGEIVWDKGRDFATVRKVLSMPQVNIVKKTEVQTGGFSKESILPKRNSDKLIARKKDWDPKKYGGFDSPTVAYSVLVVAKVEKGKSKKLKSVKELLGITIMERSSFEKNPIDFLEAKGYKEVKKDLIIKLPKYSLFELENGRKRMLASAGELQKGNELALPSKYVNFLYLASHYEKLKGSPEDNEQKQLFVEQHKHYLDEIIEQISEFSKRVILADANLDKVLSAYNKHRDKPIREQAENIIHLFTLTNLGAPAAFKYFDTTIDRKRYTSTKEVLDATLIHQSITGLYETRIDLSQLGGDGGPAPGGSGGTVSLQDEHRLFDIPVTTSLPDVWLQDFPQAWAETGGLGRAKCQAPIIIDLKPTAVPVSIKQYPMSLEAHMGIRQHIIKFLELGVLRPCRSPWNTPLLPVKKPGTQDYRPVQDLREINKRTVDIHPTVPNPYNLLSTLKPDYSWYTVLDLKDAFFCLPLAPQSQELFAFEWKDPERGISGQLTWTRLPQGFKNSPTLFNEALHRDLTDFRTQHPEVTLLQYVDDLLLAAPTKKACTQGTRHLLQELGEKGYRASAKKAQICQTKVTYLGYILSEGKRWLTPGRIETVARIPPPRNPREVREFLGTAGFCRLWIPGFAELAAPLYALTKPSTPFTWQTEHQLAFEALKKALLSAPALGLPDTSKPFTLFLDERQGIAKGVLTQKLGPWKRPVAYLSKKLDPVAAGWPPCLRIMAATAMLVKDSAKLTLGQPLTVITPHTLEAIVRQPPDRWITNARLTHYQALLLDTDRVQFGPPVTLNPATLLPVPENQPSPHDCRQVLAETHGTREDLKDQELPDADHTWYTDGSSYLDSGTRRAGAAVVDGHNTIWAQSLPPGTSAQKAELIALTKALELSKGKKANIYTDSRYAFATAHTHGSIYERRGWLTSEGKEIKNKAEIIALLKALFLPQEVAIIHCPGHQKGQDPVAVGNRQADRVARQAAMAEVLTLATEPDNTSHITAGKRTADGSEFEKRTADGSEFESPKKKAKVE

SEQ ID NO: 1555 - protein, 2102 aa, synthetic construct
  source 1..2102: note = Description of Artificial Sequence: Synthetic polypeptide
MPAAKRVKLDGGDKKYSIGLDIGTNSVGWAVITDEYKVPSKKFKVLGNTDRHSIKKNLIGALLFDSGETAEATRLKRTARRRYTRRKNRICYLQEIFSNEMAKVDDSFFHRLEESFLVEEDKKHERHPIFGNIVDEVAYHEKYPTIYHLRKKLVDSTDKADLRLIYLALAHMIKFRGHFLIEGDLNPDNSDVDKLFIQLVQTYNQLFEENPINASGVDAKAILSARLSKSRRLENLIAQLPGEKKNGLFGNLIALSLGLTPNFKSNFDLAEDAKLQLSKDTYDDDLDNLLAQIGDQYADLFLAAKNLSDAILLSDILRVNTEITKAPLSASMIKRYDEHHQDLTLLKALVRQQLPEKYKEIFFDQSKNGYAGYIDGGASQEEFYKFIKPILEKMDGTEELLVKLNREDLLRKQRTFDNGSIPHQIHLGELHAILRRQEDFYPFLKDNREKIEKILTFRIPYYVGPLARGNSRFAWMTRKSEETITPWNFEEVVDKGASAQSFIERMTNFDKNLPNEKVLPKHSLLYEYFTVYNELTKVKYVTEGMRKPAFLSGEQKKAIVDLLFKTNRKVTVKQLKEDYFKKIECFDSVEISGVEDRFNASLGTYHDLLKIIKDKDFLDNEENEDILEDIVLTLTLFEDREMIEERLKTYAHLFDDKVMKQLKRRRYTGWGRLSRKLINGIRDKQSGKTILDFLKSDGFANRNFMQLIHDDSLTFKEDIQKAQVSGQGDSLHEHIANLAGSPAIKKGILQTVKVVDELVKVMGRHKPENIVIEMARENQTTQKGQKNSRERMKRIEEGIKELGSQILKEHPVENTQLQNEKLYLYYLQNGRDMYVDQELDINRLSDYDVDHIVPQSFLKDDSIDNKVLTRSDKARGKSDNVPSEEVVKKMKNYWRQLLNAKLITQRKFDNLTKAERGGLSELDKAGFIKRQLVETRQITKHVAQILDSRMNTKYDENDKLIREVKVITLKSKLVSDFRKDFQFYKVREINNYHHAHDAYLNAVVGTALIKKYPKLESEFVYGDYKVYDVRKMIAKSEQEIGKATAKYFFYSNIMNFFKTEITLANGEIRKRPLIETNGETGEIVWDKGRDFATVRKVLSMPQVNIVKKTEVQTGGFSKESILPKRNSDKLIARKKDWDPKKYGGFDSPTVAYSVLVVAKVEKGKSKKLKSVKELLGITIMERSSFEKNPIDFLEAKGYKEVKKDLIIKLPKYSLFELENGRKRMLASAGELQKGNELALPSKYVNFLYLASHYEKLKGSPEDNEQKQLFVEQHKHYLDEIIEQISEFSKRVILADANLDKVLSAYNKHRDKPIREQAENIIHLFTLTNLGAPAAFKYFDTTIDRKRYTSTKEVLDATLIHQSITGLYETRIDLSQLGGDGGPAPGGSEAAAKGGTVSLQDEHRLFDIPVTTSLPDVWLQDFPQAWAETGGLGRAKCQAPIIIDLKPTAVPVSIKQYPMSLEAHMGIRQHIIKFLELGVLRPCRSPWNTPLLPVKKPGTQDYRPVQDLREINKRTVDIHPTVPNPYNLLSTLKPDYSWYTVLDLKDAFFCLPLAPQSQELFAFEWKDPERGISGQLTWTRLPQGFKNSPTLFNEALHRDLTDFRTQHPEVTLLQYVDDLLLAAPTKKACTQGTRHLLQELGEKGYRASAKKAQICQTKVTYLGYILSEGKRWLTPGRIETVARIPPPRNPREVREFLGTAGFCRLWIPGFAELAAPLYALTKPSTPFTWQTEHQLAFEALKKALLSAPALGLPDTSKPFTLFLDERQGIAKGVLTQKLGPWKRPVAYLSKKLDPVAAGWPPCLRIMAATAMLVKDSAKLTLGQPLTVITPHTLEAIVRQPPDRWITNARLTHYQALLLDTDRVQFGPPVTLNPATLLPVPENQPSPHDCRQVLAETHGTREDLKDQELPDADHTWYTDGSSYLDSGTRRAGAAVVDGHNTIWAQSLPPGTSAQKAELIALTKALELSKGKKANIYTDSRYAFATAHTHGSIYERRGWLTSEGKEIKNKAEIIALLKALFLPQEVAIIHCPGHQKGQDPVAVGNRQADRVARQAAMAEVLTLATEPDNTSHITAGKRTADGSEFEKRTADGSEFESPKKKAKVE

SEQ ID NO: 1556 - protein, 2097 aa, synthetic construct
  source 1..2097: note = Description of Artificial Sequence: Synthetic polypeptide
MPAAKRVKLDGGDKKYSIGLDIGTNSVGWAVITDEYKVPSKKFKVLGNTDRHSIKKNLIGALLFDSGETAEATRLKRTARRRYTRRKNRICYLQEIFSNEMAKVDDSFFHRLEESFLVEEDKKHERHPIFGNIVDEVAYHEKYPTIYHLRKKLVDSTDKADLRLIYLALAHMIKFRGHFLIEGDLNPDNSDVDKLFIQLVQTYNQLFEENPINASGVDAKAILSARLSKSRRLENLIAQLPGEKKNGLFGNLIALSLGLTPNFKSNFDLAEDAKLQLSKDTYDDDLDNLLAQIGDQYADLFLAAKNLSDAILLSDILRVNTEITKAPLSASMIKRYDEHHQDLTLLKALVRQQLPEKYKEIFFDQSKNGYAGYIDGGASQEEFYKFIKPILEKMDGTEELLVKLNREDLLRKQRTFDNGSIPHQIHLGELHAILRRQEDFYPFLKDNREKIEKILTFRIPYYVGPLARGNSRFAWMTRKSEETITPWNFEEVVDKGASAQSFIERMTNFDKNLPNEKVLPKHSLLYEYFTVYNELTKVKYVTEGMRKPAFLSGEQKKAIVDLLFKTNRKVTVKQLKEDYFKKIECFDSVEISGVEDRFNASLGTYHDLLKIIKDKDFLDNEENEDILEDIVLTLTLFEDREMIEERLKTYAHLFDDKVMKQLKRRRYTGWGRLSRKLINGIRDKQSGKTILDFLKSDGFANRNFMQLIHDDSLTFKEDIQKAQVSGQGDSLHEHIANLAGSPAIKKGILQTVKVVDELVKVMGRHKPENIVIEMARENQTTQKGQKNSRERMKRIEEGIKELGSQILKEHPVENTQLQNEKLYLYYLQNGRDMYVDQELDINRLSDYDVDHIVPQSFLKDDSIDNKVLTRSDKARGKSDNVPSEEVVKKMKNYWRQLLNAKLITQRKFDNLTKAERGGLSELDKAGFIKRQLVETRQITKHVAQILDSRMNTKYDENDKLIREVKVITLKSKLVSDFRKDFQFYKVREINNYHHAHDAYLNAVVGTALIKKYPKLESEFVYGDYKVYDVRKMIAKSEQEIGKATAKYFFYSNIMNFFKTEITLANGEIRKRPLIETNGETGEIVWDKGRDFATVRKVLSMPQVNIVKKTEVQTGGFSKESILPKRNSDKLIARKKDWDPKKYGGFDSPTVAYSVLVVAKVEKGKSKKLKSVKELLGITIMERSSFEKNPIDFLEAKGYKEVKKDLIIKLPKYSLFELENGRKRMLASAGELQKGNELALPSKYVNFLYLASHYEKLKGSPEDNEQKQLFVEQHKHYLDEIIEQISEFSKRVILADANLDKVLSAYNKHRDKPIREQAENIIHLFTLTNLGAPAAFKYFDTTIDRKRYTSTKEVLDATLIHQSITGLYETRIDLSQLGGDGGGGSGGSGGTVSLQDEHRLFDIPVTTSLPDVWLQDFPQAWAETGGLGRAKCQAPIIIDLKPTAVPVSIKQYPMSLEAHMGIRQHIIKFLELGVLRPCRSPWNTPLLPVKKPGTQDYRPVQDLREINKRTVDIHPTVPNPYNLLSTLKPDYSWYTVLDLKDAFFCLPLAPQSQELFAFEWKDPERGISGQLTWTRLPQGFKNSPTLFNEALHRDLTDFRTQHPEVTLLQYVDDLLLAAPTKKACTQGTRHLLQELGEKGYRASAKKAQICQTKVTYLGYILSEGKRWLTPGRIETVARIPPPRNPREVREFLGTAGFCRLWIPGFAELAAPLYALTKPSTPFTWQTEHQLAFEALKKALLSAPALGLPDTSKPFTLFLDERQGIAKGVLTQKLGPWKRPVAYLSKKLDPVAAGWPPCLRIMAATAMLVKDSAKLTLGQPLTVITPHTLEAIVRQPPDRWITNARLTHYQALLLDTDRVQFGPPVTLNPATLLPVPENQPSPHDCRQVLAETHGTREDLKDQELPDADHTWYTDGSSYLDSGTRRAGAAVVDGHNTIWAQSLPPGTSAQKAELIALTKALELSKGKKANIYTDSRYAFATAHTHGSIYERRGWLTSEGKEIKNKAEIIALLKALFLPQEVAIIHCPGHQKGQDPVAVGNRQADRVARQAAMAEVLTLATEPDNTSHITAGKRTADGSEFEKRTADGSEFESPKKKAKVE

SEQ ID NO: 1557 - protein, 2099 aa, synthetic construct
  source 1..2099: note = Description of Artificial Sequence: Synthetic polypeptide
MPAAKRVKLDGGDKKYSIGLDIGTNSVGWAVITDEYKVPSKKFKVLGNTDRHSIKKNLIGALLFDSGETAEATRLKRTARRRYTRRKNRICYLQEIFSNEMAKVDDSFFHRLEESFLVEEDKKHERHPIFGNIVDEVAYHEKYPTIYHLRKKLVDSTDKADLRLIYLALAHMIKFRGHFLIEGDLNPDNSDVDKLFIQLVQTYNQLFEENPINASGVDAKAILSARLSKSRRLENLIAQLPGEKKNGLFGNLIALSLGLTPNFKSNFDLAEDAKLQLSKDTYDDDLDNLLAQIGDQYADLFLAAKNLSDAILLSDILRVNTEITKAPLSASMIKRYDEHHQDLTLLKALVRQQLPEKYKEIFFDQSKNGYAGYIDGGASQEEFYKFIKPILEKMDGTEELLVKLNREDLLRKQRTFDNGSIPHQIHLGELHAILRRQEDFYPFLKDNREKIEKILTFRIPYYVGPLARGNSRFAWMTRKSEETITPWNFEEVVDKGASAQSFIERMTNFDKNLPNEKVLPKHSLLYEYFTVYNELTKVKYVTEGMRKPAFLSGEQKKAIVDLLFKTNRKVTVKQLKEDYFKKIECFDSVEISGVEDRFNASLGTYHDLLKIIKDKDFLDNEENEDILEDIVLTLTLFEDREMIEERLKTYAHLFDDKVMKQLKRRRYTGWGRLSRKLINGIRDKQSGKTILDFLKSDGFANRNFMQLIHDDSLTFKEDIQKAQVSGQGDSLHEHIANLAGSPAIKKGILQTVKVVDELVKVMGRHKPENIVIEMARENQTTQKGQKNSRERMKRIEEGIKELGSQILKEHPVENTQLQNEKLYLYYLQNGRDMYVDQELDINRLSDYDVDHIVPQSFLKDDSIDNKVLTRSDKARGKSDNVPSEEVVKKMKNYWRQLLNAKLITQRKFDNLTKAERGGLSELDKAGFIKRQLVETRQITKHVAQILDSRMNTKYDENDKLIREVKVITLKSKLVSDFRKDFQFYKVREINNYHHAHDAYLNAVVGTALIKKYPKLESEFVYGDYKVYDVRKMIAKSEQEIGKATAKYFFYSNIMNFFKTEITLANGEIRKRPLIETNGETGEIVWDKGRDFATVRKVLSMPQVNIVKKTEVQTGGFSKESILPKRNSDKLIARKKDWDPKKYGGFDSPTVAYSVLVVAKVEKGKSKKLKSVKELLGITIMERSSFEKNPIDFLEAKGYKEVKKDLIIKLPKYSLFELENGRKRMLASAGELQKGNELALPSKYVNFLYLASHYEKLKGSPEDNEQKQLFVEQHKHYLDEIIEQISEFSKRVILADANLDKVLSAYNKHRDKPIREQAENIIHLFTLTNLGAPAAFKYFDTTIDRKRYTSTKEVLDATLIHQSITGLYETRIDLSQLGGDGGEAAAKGGSGGTVSLQDEHRLFDIPVTTSLPDVWLQDFPQAWAETGGLGRAKCQAPIIIDLKPTAVPVSIKQYPMSLEAHMGIRQHIIKFLELGVLRPCRSPWNTPLLPVKKPGTQDYRPVQDLREINKRTVDIHPTVPNPYNLLSTLKPDYSWYTVLDLKDAFFCLPLAPQSQELFAFEWKDPERGISGQLTWTRLPQGFKNSPTLFNEALHRDLTDFRTQHPEVTLLQYVDDLLLAAPTKKACTQGTRHLLQELGEKGYRASAKKAQICQTKVTYLGYILSEGKRWLTPGRIETVARIPPPRNPREVREFLGTAGFCRLWIPGFAELAAPLYALTKPSTPFTWQTEHQLAFEALKKALLSAPALGLPDTSKPFTLFLDERQGIAKGVLTQKLGPWKRPVAYLSKKLDPVAAGWPPCLRIMAATAMLVKDSAKLTLGQPLTVITPHTLEAIVRQPPDRWITNARLTHYQALLLDTDRVQFGPPVTLNPATLLPVPENQPSPHDCRQVLAETHGTREDLKDQELPDADHTWYTDGSSYLDSGTRRAGAAVVDGHNTIWAQSLPPGTSAQKAELIALTKALELSKGKKANIYTDSRYAFATAHTHGSIYERRGWLTSEGKEIKNKAEIIALLKALFLPQEVAIIHCPGHQKGQDPVAVGNRQADRVARQAAMAEVLTLATEPDNTSHITAGKRTADGSEFEKRTADGSEFESPKKKAKVE

SEQ ID NO: 1558 - protein, 2097 aa, synthetic construct
  source 1..2097: note = Description of Artificial Sequence: Synthetic polypeptide
MPAAKRVKLDGGDKKYSIGLDIGTNSVGWAVITDEYKVPSKKFKVLGNTDRHSIKKNLIGALLFDSGETAEATRLKRTARRRYTRRKNRICYLQEIFSNEMAKVDDSFFHRLEESFLVEEDKKHERHPIFGNIVDEVAYHEKYPTIYHLRKKLVDSTDKADLRLIYLALAHMIKFRGHFLIEGDLNPDNSDVDKLFIQLVQTYNQLFEENPINASGVDAKAILSARLSKSRRLENLIAQLPGEKKNGLFGNLIALSLGLTPNFKSNFDLAEDAKLQLSKDTYDDDLDNLLAQIGDQYADLFLAAKNLSDAILLSDILRVNTEITKAPLSASMIKRYDEHHQDLTLLKALVRQQLPEKYKEIFFDQSKNGYAGYIDGGASQEEFYKFIKPILEKMDGTEELLVKLNREDLLRKQRTFDNGSIPHQIHLGELHAILRRQEDFYPFLKDNREKIEKILTFRIPYYVGPLARGNSRFAWMTRKSEETITPWNFEEVVDKGASAQSFIERMTNFDKNLPNEKVLPKHSLLYEYFTVYNELTKVKYVTEGMRKPAFLSGEQKKAIVDLLFKTNRKVTVKQLKEDYFKKIECFDSVEISGVEDRFNASLGTYHDLLKIIKDKDFLDNEENEDILEDIVLTLTLFEDREMIEERLKTYAHLFDDKVMKQLKRRRYTGWGRLSRKLINGIRDKQSGKTILDFLKSDGFANRNFMQLIHDDSLTFKEDIQKAQVSGQGDSLHEHIANLAGSPAIKKGILQTVKVVDELVKVMGRHKPENIVIEMARENQTTQKGQKNSRERMKRIEEGIKELGSQILKEHPVENTQLQNEKLYLYYLQNGRDMYVDQELDINRLSDYDVDHIVPQSFLKDDSIDNKVLTRSDKARGKSDNVPSEEVVKKMKNYWRQLLNAKLITQRKFDNLTKAERGGLSELDKAGFIKRQLVETRQITKHVAQILDSRMNTKYDENDKLIREVKVITLKSKLVSDFRKDFQFYKVREINNYHHAHDAYLNAVVGTALIKKYPKLESEFVYGDYKVYDVRKMIAKSEQEIGKATAKYFFYSNIMNFFKTEITLANGEIRKRPLIETNGETGEIVWDKGRDFATVRKVLSMPQVNIVKKTEVQTGGFSKESILPKRNSDKLIARKKDWDPKKYGGFDSPTVAYSVLVVAKVEKGKSKKLKSVKELLGITIMERSSFEKNPIDFLEAKGYKEVKKDLIIKLPKYSLFELENGRKRMLASAGELQKGNELALPSKYVNFLYLASHYEKLKGSPEDNEQKQLFVEQHKHYLDEIIEQISEFSKRVILADANLDKVLSAYNKHRDKPIREQAENIIHLFTLTNLGAPAAFKYFDTTIDRKRYTSTKEVLDATLIHQSITGLYETRIDLSQLGGDGGPAPGSSGGTVSLQDEHRLFDIPVTTSLPDVWLQDFPQAWAETGGLGRAKCQAPIIIDLKPTAVPVSIKQYPMSLEAHMGIRQHIIKFLELGVLRPCRSPWNTPLLPVKKPGTQDYRPVQDLREINKRTVDIHPTVPNPYNLLSTLKPDYSWYTVLDLKDAFFCLPLAPQSQELFAFEWKDPERGISGQLTWTRLPQGFKNSPTLFNEALHRDLTDFRTQHPEVTLLQYVDDLLLAAPTKKACTQGTRHLLQELGEKGYRASAKKAQICQTKVTYLGYILSEGKRWLTPGRIETVARIPPPRNPREVREFLGTAGFCRLWIPGFAELAAPLYALTKPSTPFTWQTEHQLAFEALKKALLSAPALGLPDTSKPFTLFLDERQGIAKGVLTQKLGPWKRPVAYLSKKLDPVAAGWPPCLRIMAATAMLVKDSAKLTLGQPLTVITPHTLEAIVRQPPDRWITNARLTHYQALLLDTDRVQFGPPVTLNPATLLPVPENQPSPHDCRQVLAETHGTREDLKDQELPDADHTWYTDGSSYLDSGTRRAGAAVVDGHNTIWAQSLPPGTSAQKAELIALTKALELSKGKKANIYTDSRYAFATAHTHGSIYERRGWLTSEGKEIKNKAEIIALLKALFLPQEVAIIHCPGHQKGQDPVAVGNRQADRVARQAAMAEVLTLATEPDNTSHITAGKRTADGSEFEKRTADGSEFESPKKKAKVE

SEQ ID NO: 1559 - protein, 2096 aa, synthetic construct
  source 1..2096: note = Description of Artificial Sequence: Synthetic polypeptide
MPAAKRVKLDGGDKKYSIGLDIGTNSVGWAVITDEYKVPSKKFKVLGNTDRHSIKKNLIGALLFDSGETAEATRLKRTARRRYTRRKNRICYLQEIFSNEMAKVDDSFFHRLEESFLVEEDKKHERHPIFGNIVDEVAYHEKYPTIYHLRKKLVDSTDKADLRLIYLALAHMIKFRGHFLIEGDLNPDNSDVDKLFIQLVQTYNQLFEENPINASGVDAKAILSARLSKSRRLENLIAQLPGEKKNGLFGNLIALSLGLTPNFKSNFDLAEDAKLQLSKDTYDDDLDNLLAQIGDQYADLFLAAKNLSDAILLSDILRVNTEITKAPLSASMIKRYDEHHQDLTLLKALVRQQLPEKYKEIFFDQSKNGYAGYIDGGASQEEFYKFIKPILEKMDGTEELLVKLNREDLLRKQRTFDNGSIPHQIHLGELHAILRRQEDFYPFLKDNREKIEKILTFRIPYYVGPLARGNSRFAWMTRKSEETITPWNFEEVVDKGASAQSFIERMTNFDKNLPNEKVLPKHSLLYEYFTVYNELTKVKYVTEGMRKPAFLSGEQKKAIVDLLFKTNRKVTVKQLKEDYFKKIECFDSVEISGVEDRFNASLGTYHDLLKIIKDKDFLDNEENEDILEDIVLTLTLFEDREMIEERLKTYAHLFDDKVMKQLKRRRYTGWGRLSRKLINGIRDKQSGKTILDFLKSDGFANRNFMQLIHDDSLTFKEDIQKAQVSGQGDSLHEHIANLAGSPAIKKGILQTVKVVDELVKVMGRHKPENIVIEMARENQTTQKGQKNSRERMKRIEEGIKELGSQILKEHPVENTQLQNEKLYLYYLQNGRDMYVDQELDINRLSDYDVDHIVPQSFLKDDSIDNKVLTRSDKARGKSDNVPSEEVVKKMKNYWRQLLNAKLITQRKFDNLTKAERGGLSELDKAGFIKRQLVETRQITKHVAQILDSRMNTKYDENDKLIREVKVITLKSKLVSDFRKDFQFYKVREINNYHHAHDAYLNAVVGTALIKKYPKLESEFVYGDYKVYDVRKMIAKSEQEIGKATAKYFFYSNIMNFFKTEITLANGEIRKRPLIETNGETGEIVWDKGRDFATVRKVLSMPQVNIVKKTEVQTGGFSKESILPKRNSDKLIARKKDWDPKKYGGFDSPTVAYSVLVVAKVEKGKSKKLKSVKELLGITIMERSSFEKNPIDFLEAKGYKEVKKDLIIKLPKYSLFELENGRKRMLASAGELQKGNELALPSKYVNFLYLASHYEKLKGSPEDNEQKQLFVEQHKHYLDEIIEQISEFSKRVILADANLDKVLSAYNKHRDKPIREQAENIIHLFTLTNLGAPAAFKYFDTTIDRKRYTSTKEVLDATLIHQSITGLYETRIDLSQLGGDGGGGGGSGGTVSLQDEHRLFDIPVTTSLPDVWLQDFPQAWAETGGLGRAKCQAPIIIDLKPTAVPVSIKQYPMSLEAHMGIRQHIIKFLELGVLRPCRSPWNTPLLPVKKPGTQDYRPVQDLREINKRTVDIHPTVPNPYNLLSTLKPDYSWYTVLDLKDAFFCLPLAPQSQELFAFEWKDPERGISGQLTWTRLPQGFKNSPTLFNEALHRDLTDFRTQHPEVTLLQYVDDLLLAAPTKKACTQGTRHLLQELGEKGYRASAKKAQICQTKVTYLGYILSEGKRWLTPGRIETVARIPPPRNPREVREFLGTAGFCRLWIPGFAELAAPLYALTKPSTPFTWQTEHQLAFEALKKALLSAPALGLPDTSKPFTLFLDERQGIAKGVLTQKLGPWKRPVAYLSKKLDPVAAGWPPCLRIMAATAMLVKDSAKLTLGQPLTVITPHTLEAIVRQPPDRWITNARLTHYQALLLDTDRVQFGPPVTLNPATLLPVPENQPSPHDCRQVLAETHGTREDLKDQELPDADHTWYTDGSSYLDSGTRRAGAAVVDGHNTIWAQSLPPGTSAQKAELIALTKALELSKGKKANIYTDSRYAFATAHTHGSIYERRGWLTSEGKEIKNKAEIIALLKALFLPQEVAIIHCPGHQKGQDPVAVGNRQADRVARQAAMAEVLTLATEPDNTSHITAGKRTADGSEFEKRTADGSEFESPKKKAKVE

SEQ ID NO: 1560 - protein, 2098 aa, synthetic construct
  source 1..2098: note = Description of Artificial Sequence: Synthetic polypeptide
MPAAKRVKLDGGDKKYSIGLDIGTNSVGWAVITDEYKVPSKKFKVLGNTDRHSIKKNLIGALLFDSGETAEATRLKRTARRRYTRRKNRICYLQEIFSNEMAKVDDSFFHRLEESFLVEEDKKHERHPIFGNIVDEVAYHEKYPTIYHLRKKLVDSTDKADLRLIYLALAHMIKFRGHFLIEGDLNPDNSDVDKLFIQLVQTYNQLFEENPINASGVDAKAILSARLSKSRRLENLIAQLPGEKKNGLFGNLIALSLGLTPNFKSNFDLAEDAKLQLSKDTYDDDLDNLLAQIGDQYADLFLAAKNLSDAILLSDILRVNTEITKAPLSASMIKRYDEHHQDLTLLKALVRQQLPEKYKEIFFDQSKNGYAGYIDGGASQEEFYKFIKPILEKMDGTEELLVKLNREDLLRKQRTFDNGSIPHQIHLGELHAILRRQEDFYPFLKDNREKIEKILTFRIPYYVGPLARGNSRFAWMTRKSEETITPWNFEEVVDKGASAQSFIERMTNFDKNLPNEKVLPKHSLLYEYFTVYNELTKVKYVTEGMRKPAFLSGEQKKAIVDLLFKTNRKVTVKQLKEDYFKKIECFDSVEISGVEDRFNASLGTYHDLLKIIKDKDFLDNEENEDILEDIVLTLTLFEDREMIEERLKTYAHLFDDKVMKQLKRRRYTGWGRLSRKLINGIRDKQSGKTILDFLKSDGFANRNFMQLIHDDSLTFKEDIQKAQVSGQGDSLHEHIANLAGSPAIKKGILQTVKVVDELVKVMGRHKPENIVIEMARENQTTQKGQKNSRERMKRIEEGIKELGSQILKEHPVENTQLQNEKLYLYYLQNGRDMYVDQELDINRLSDYDVDHIVPQSFLKDDSIDNKVLTRSDKARGKSDNVPSEEVVKKMKNYWRQLLNAKLITQRKFDNLTKAERGGLSELDKAGFIKRQLVETRQITKHVAQILDSRMNTKYDENDKLIREVKVITLKSKLVSDFRKDFQFYKVREINNYHHAHDAYLNAVVGTALIKKYPKLESEFVYGDYKVYDVRKMIAKSEQEIGKATAKYFFYSNIMNFFKTEITLANGEIRKRPLIETNGETGEIVWDKGRDFATVRKVLSMPQVNIVKKTEVQTGGFSKESILPKRNSDKLIARKKDWDPKKYGGFDSPTVAYSVLVVAKVEKGKSKKLKSVKELLGITIMERSSFEKNPIDFLEAKGYKEVKKDLIIKLPKYSLFELENGRKRMLASAGELQKGNELALPSKYVNFLYLASHYEKLKGSPEDNEQKQLFVEQHKHYLDEIIEQISEFSKRVILADANLDKVLSAYNKHRDKPIREQAENIIHLFTLTNLGAPAAFKYFDTTIDRKRYTSTKEVLDATLIHQSITGLYETRIDLSQLGGDGGGGGGGGGGGTVSLQDEHRLFDIPVTTSLPDVWLQDFPQAWAETGGLGRAKCQAPIIIDLKPTAVPVSIKQYPMSLEAHMGIRQHIIKFLELGVLRPCRSPWNTPLLPVKKPGTQDYRPVQDLREINKRTVDIHPTVPNPYNLLSTLKPDYSWYTVLDLKDAFFCLPLAPQSQELFAFEWKDPERGISGQLTWTRLPQGFKNSPTLFNEALHRDLTDFRTQHPEVTLLQYVDDLLLAAPTKKACTQGTRHLLQELGEKGYRASAKKAQICQTKVTYLGYILSEGKRWLTPGRIETVARIPPPRNPREVREFLGTAGFCRLWIPGFAELAAPLYALTKPSTPFTWQTEHQLAFEALKKALLSAPALGLPDTSKPFTLFLDERQGIAKGVLTQKLGPWKRPVAYLSKKLDPVAAGWPPCLRIMAATAMLVKDSAKLTLGQPLTVITPHTLEAIVRQPPDRWITNARLTHYQALLLDTDRVQFGPPVTLNPATLLPVPENQPSPHDCRQVLAETHGTREDLKDQELPDADHTWYTDGSSYLDSGTRRAGAAVVDGHNTIWAQSLPPGTSAQKAELIALTKALELSKGKKANIYTDSRYAFATAHTHGSIYERRGWLTSEGKEIKNKAEIIALLKALFLPQEVAIIHCPGHQKGQDPVAVGNRQADRVARQAAMAEVLTLATEPDNTSHITAGKRTADGSEFEKRTADGSEFESPKKKAKVE

SEQ ID NO: 1561 - protein, 2106 aa, synthetic construct
  source 1..2106: note = Description of Artificial Sequence: Synthetic polypeptide
MPAAKRVKLDGGDKKYSIGLDIGTNSVGWAVITDEYKVPSKKFKVLGNTDRHSIKKNLIGALLFDSGETAEATRLKRTARRRYTRRKNRICYLQEIFSNEMAKVDDSFFHRLEESFLVEEDKKHERHPIFGNIVDEVAYHEKYPTIYHLRKKLVDSTDKADLRLIYLALAHMIKFRGHFLIEGDLNPDNSDVDKLFIQLVQTYNQLFEENPINASGVDAKAILSARLSKSRRLENLIAQLPGEKKNGLFGNLIALSLGLTPNFKSNFDLAEDAKLQLSKDTYDDDLDNLLAQIGDQYADLFLAAKNLSDAILLSDILRVNTEITKAPLSASMIKRYDEHHQDLTLLKALVRQQLPEKYKEIFFDQSKNGYAGYIDGGASQEEFYKFIKPILEKMDGTEELLVKLNREDLLRKQRTFDNGSIPHQIHLGELHAILRRQEDFYPFLKDNREKIEKILTFRIPYYVGPLARGNSRFAWMTRKSEETITPWNFEEVVDKGASAQSFIERMTNFDKNLPNEKVLPKHSLLYEYFTVYNELTKVKYVTEGMRKPAFLSGEQKKAIVDLLFKTNRKVTVKQLKEDYFKKIECFDSVEISGVEDRFNASLGTYHDLLKIIKDKDFLDNEENEDILEDIVLTLTLFEDREMIEERLKTYAHLFDDKVMKQLKRRRYTGWGRLSRKLINGIRDKQSGKTILDFLKSDGFANRNFMQLIHDDSLTFKEDIQKAQVSGQGDSLHEHIANLAGSPAIKKGILQTVKVVDELVKVMGRHKPENIVIEMARENQTTQKGQKNSRERMKRIEEGIKELGSQILKEHPVENTQLQNEKLYLYYLQNGRDMYVDQELDINRLSDYDVDHIVPQSFLKDDSIDNKVLTRSDKARGKSDNVPSEEVVKKMKNYWRQLLNAKLITQRKFDNLTKAERGGLSELDKAGFIKRQLVETRQITKHVAQILDSRMNTKYDENDKLIREVKVITLKSKLVSDFRKDFQFYKVREINNYHHAHDAYLNAVVGTALIKKYPKLESEFVYGDYKVYDVRKMIAKSEQEIGKATAKYFFYSNIMNFFKTEITLANGEIRKRPLIETNGETGEIVWDKGRDFATVRKVLSMPQVNIVKKTEVQTGGFSKESILPKRNSDKLIARKKDWDPKKYGGFDSPTVAYSVLVVAKVEKGKSKKLKSVKELLGITIMERSSFEKNPIDFLEAKGYKEVKKDLIIKLPKYSLFELENGRKRMLASAGELQKGNELALPSKYVNFLYLASHYEKLKGSPEDNEQKQLFVEQHKHYLDEIIEQISEFSKRVILADANLDKVLSAYNKHRDKPIREQAENIIHLFTLTNLGAPAAFKYFDTTIDRKRYTSTKEVLDATLIHQSITGLYETRIDLSQLGGDGGGGGGSEAAAKGGGGSGGTVSLQDEHRLFDIPVTTSLPDVWLQDFPQAWAETGGLGRAKCQAPIIIDLKPTAVPVSIKQYPMSLEAHMGIRQHIIKFLELGVLRPCRSPWNTPLLPVKKPGTQDYRPVQDLREINKRTVDIHPTVPNPYNLLSTLKPDYSWYTVLDLKDAFFCLPLAPQSQELFAFEWKDPERGISGQLTWTRLPQGFKNSPTLFNEALHRDLTDFRTQHPEVTLLQYVDDLLLAAPTKKACTQGTRHLLQELGEKGYRASAKKAQICQTKVTYLGYILSEGKRWLTPGRIETVARIPPPRNPREVREFLGTAGFCRLWIPGFAELAAPLYALTKPSTPFTWQTEHQLAFEALKKALLSAPALGLPDTSKPFTLFLDERQGIAKGVLTQKLGPWKRPVAYLSKKLDPVAAGWPPCLRIMAATAMLVKDSAKLTLGQPLTVITPHTLEAIVRQPPDRWITNARLTHYQALLLDTDRVQFGPPVTLNPATLLPVPENQPSPHDCRQVLAETHGTREDLKDQELPDADHTWYTDGSSYLDSGTRRAGAAVVDGHNTIWAQSLPPGTSAQKAELIALTKALELSKGKKANIYTDSRYAFATAHTHGSIYERRGWLTSEGKEIKNKAEIIALLKALFLPQEVAIIHCPGHQKGQDPVAVGNRQADRVARQAAMAEVLTLATEPDNTSHITAGKRTADGSEFEKRTADGSEFESPKKKAKVE

SEQ ID NO: 1562 - protein, 2111 aa, synthetic construct
  source 1..2111: note = Description of Artificial Sequence: Synthetic polypeptide
MPAAKRVKLDGGDKKYSIGLDIGTNSVGWAVITDEYKVPSKKFKVLGNTDRHSIKKNLIGALLFDSGETAEATRLKRTARRRYTRRKNRICYLQEIFSNEMAKVDDSFFHRLEESFLVEEDKKHERHPIFGNIVDEVAYHEKYPTIYHLRKKLVDSTDKADLRLIYLALAHMIKFRGHFLIEGDLNPDNSDVDKLFIQLVQTYNQLFEENPINASGVDAKAILSARLSKSRRLENLIAQLPGEKKNGLFGNLIALSLGLTPNFKSNFDLAEDAKLQLSKDTYDDDLDNLLAQIGDQYADLFLAAKNLSDAILLSDILRVNTEITKAPLSASMIKRYDEHHQDLTLLKALVRQQLPEKYKEIFFDQSKNGYAGYIDGGASQEEFYKFIKPILEKMDGTEELLVKLNREDLLRKQRTFDNGSIPHQIHLGELHAILRRQEDFYPFLKDNREKIEKILTFRIPYYVGPLARGNSRFAWMTRKSEETITPWNFEEVVDKGASAQSFIERMTNFDKNLPNEKVLPKHSLLYEYFTVYNELTKVKYVTEGMRKPAFLSGEQKKAIVDLLFKTNRKVTVKQLKEDYFKKIECFDSVEISGVEDRFNASLGTYHDLLKIIKDKDFLDNEENEDILEDIVLTLTLFEDREMIEERLKTYAHLFDDKVMKQLKRRRYTGWGRLSRKLINGIRDKQSGKTILDFLKSDGFANRNFMQLIHDDSLTFKEDIQKAQVSGQGDSLHEHIANLAGSPAIKKGILQTVKVVDELVKVMGRHKPENIVIEMARENQTTQKGQKNSRERMKRIEEGIKELGSQILKEHPVENTQLQNEKLYLYYLQNGRDMYVDQELDINRLSDYDVDHIVPQSFLKDDSIDNKVLTRSDKARGKSDNVPSEEVVKKMKNYWRQLLNAKLITQRKFDNLTKAERGGLSELDKAGFIKRQLVETRQITKHVAQILDSRMNTKYDENDKLIREVKVITLKSKLVSDFRKDFQFYKVREINNYHHAHDAYLNAVVGTALIKKYPKLESEFVYGDYKVYDVRKMIAKSEQEIGKATAKYFFYSNIMNFFKTEITLANGEIRKRPLIETNGETGEIVWDKGRDFATVRKVLSMPQVNIVKKTEVQTGGFSKESILPKRNSDKLIARKKDWDPKKYGGFDSPTVAYSVLVVAKVEKGKSKKLKSVKELLGITIMERSSFEKNPIDFLEAKGYKEVKKDLIIKLPKYSLFELENGRKRMLASAGELQKGNELALPSKYVNFLYLASHYEKLKGSPEDNEQKQLFVEQHKHYLDEIIEQISEFSKRVILADANLDKVLSAYNKHRDKPIREQAENIIHLFTLTNLGAPAAFKYFDTTIDRKRYTSTKEVLDATLIHQSITGLYETRIDLSQLGGDGGEAAAKEAAAKEAAAKEAAAKGGTVSLQDEHRLFDIPVTTSLPDVWLQDFPQAWAETGGLGRAKCQAPIIIDLKPTAVPVSIKQYPMSLEAHMGIRQHIIKFLELGVLRPCRSPWNTPLLPVKKPGTQDYRPVQDLREINKRTVDIHPTVPNPYNLLSTLKPDYSWYTVLDLKDAFFCLPLAPQSQELFAFEWKDPERGISGQLTWTRLPQGFKNSPTLFNEALHRDLTDFRTQHPEVTLLQYVDDLLLAAPTKKACTQGTRHLLQELGEKGYRASAKKAQICQTKVTYLGYILSEGKRWLTPGRIETVARIPPPRNPREVREFLGTAGFCRLWIPGFAELAAPLYALTKPSTPFTWQTEHQLAFEALKKALLSAPALGLPDTSKPFTLFLDERQGIAKGVLTQKLGPWKRPVAYLSKKLDPVAAGWPPCLRIMAATAMLVKDSAKLTLGQPLTVITPHTLEAIVRQPPDRWITNARLTHYQALLLDTDRVQFGPPVTLNPATLLPVPENQPSPHDCRQVLAETHGTREDLKDQELPDADHTWYTDGSSYLDSGTRRAGAAVVDGHNTIWAQSLPPGTSAQKAELIALTKALELSKGKKANIYTDSRYAFATAHTHGSIYERRGWLTSEGKEIKNKAEIIALLKALFLPQEVAIIHCPGHQKGQDPVAVGNRQADRVARQAAMAEVLTLATEPDNTSHITAGKRTADGSEFEKRTADGSEFESPKKKAKVE

SEQ ID NO: 1563 - protein, 2102 aa, synthetic construct
  source 1..2102: note = Description of Artificial Sequence: Synthetic polypeptide
MPAAKRVKLDGGDKKYSIGLDIGTNSVGWAVITDEYKVPSKKFKVLGNTDRHSIKKNLIGALLFDSGETAEATRLKRTARRRYTRRKNRICYLQEIFSNEMAKVDDSFFHRLEESFLVEEDKKHERHPIFGNIVDEVAYHEKYPTIYHLRKKLVDSTDKADLRLIYLALAHMIKFRGHFLIEGDLNPDNSDVDKLFIQLVQTYNQLFEENPINASGVDAKAILSARLSKSRRLENLIAQLPGEKKNGLFGNLIALSLGLTPNFKSNFDLAEDAKLQLSKDTYDDDLDNLLAQIGDQYADLFLAAKNLSDAILLSDILRVNTEITKAPLSASMIKRYDEHHQDLTLLKALVRQQLPEKYKEIFFDQSKNGYAGYIDGGASQEEFYKFIKPILEKMDGTEELLVKLNREDLLRKQRTFDNGSIPHQIHLGELHAILRRQEDFYPFLKDNREKIEKILTFRIPYYVGPLARGNSRFAWMTRKSEETITPWNFEEVVDKGASAQSFIERMTNFDKNLPNEKVLPKHSLLYEYFTVYNELTKVKYVTEGMRKPAFLSGEQKKAIVDLLFKTNRKVTVKQLKEDYFKKIECFDSVEISGVEDRFNASLGTYHDLLKIIKDKDFLDNEENEDILEDIVLTLTLFEDREMIEERLKTYAHLFDDKVMKQLKRRRYTGWGRLSRKLINGIRDKQSGKTILDFLKSDGFANRNFMQLIHDDSLTFKEDIQKAQVSGQGDSLHEHIANLAGSPAIKKGILQTVKVVDELVKVMGRHKPENIVIEMARENQTTQKGQKNSRERMKRIEEGIKELGSQILKEHPVENTQLQNEKLYLYYLQNGRDMYVDQELDINRLSDYDVDHIVPQSFLKDDSIDNKVLTRSDKARGKSDNVPSEEVVKKMKNYWRQLLNAKLITQRKFDNLTKAERGGLSELDKAGFIKRQLVETRQITKHVAQILDSRMNTKYDENDKLIREVKVITLKSKLVSDFRKDFQFYKVREINNYHHAHDAYLNAVVGTALIKKYPKLESEFVYGDYKVYDVRKMIAKSEQEIGKATAKYFFYSNIMNFFKTEITLANGEIRKRPLIETNGETGEIVWDKGRDFATVRKVLSMPQVNIVKKTEVQTGGFSKESILPKRNSDKLIARKKDWDPKKYGGFDSPTVAYSVLVVAKVEKGKSKKLKSVKELLGITIMERSSFEKNPIDFLEAKGYKEVKKDLIIKLPKYSLFELENGRKRMLASAGELQKGNELALPSKYVNFLYLASHYEKLKGSPEDNEQKQLFVEQHKHYLDEIIEQISEFSKRVILADANLDKVLSAYNKHRDKPIREQAENIIHLFTLTNLGAPAAFKYFDTTIDRKRYTSTKEVLDATLIHQSITGLYETRIDLSQLGGDGGGGSEAAAKPAPGGTVSLQDEHRLFDIPVTTSLPDVWLQDFPQAWAETGGLGRAKCQAPIIIDLKPTAVPVSIKQYPMSLEAHMGIRQHIIKFLELGVLRPCRSPWNTPLLPVKKPGTQDYRPVQDLREINKRTVDIHPTVPNPYNLLSTLKPDYSWYTVLDLKDAFFCLPLAPQSQELFAFEWKDPERGISGQLTWTRLPQGFKNSPTLFNEALHRDLTDFRTQHPEVTLLQYVDDLLLAAPTKKACTQGTRHLLQELGEKGYRASAKKAQICQTKVTYLGYILSEGKRWLTPGRIETVARIPPPRNPREVREFLGTAGFCRLWIPGFAELAAPLYALTKPSTPFTWQTEHQLAFEALKKALLSAPALGLPDTSKPFTLFLDERQGIAKGVLTQKLGPWKRPVAYLSKKLDPVAAGWPPCLRIMAATAMLVKDSAKLTLGQPLTVITPHTLEAIVRQPPDRWITNARLTHYQALLLDTDRVQFGPPVTLNPATLLPVPENQPSPHDCRQVLAETHGTREDLKDQELPDADHTWYTDGSSYLDSGTRRAGAAVVDGHNTIWAQSLPPGTSAQKAELIALTKALELSKGKKANIYTDSRYAFATAHTHGSIYERRGWLTSEGKEIKNKAEIIALLKALFLPQEVAIIHCPGHQKGQDPVAVGNRQADRVARQAAMAEVLTLATEPDNTSHITAGKRTADGSEFEKRTADGSEFESPKKKAKVE

SEQ ID NO: 1564 - protein, 2096 aa, synthetic construct
  source 1..2096: note = Description of Artificial Sequence: Synthetic polypeptide
MPAAKRVKLDGGDKKYSIGLDIGTNSVGWAVITDEYKVPSKKFKVLGNTDRHSIKKNLIGALLFDSGETAEATRLKRTARRRYTRRKNRICYLQEIFSNEMAKVDDSFFHRLEESFLVEEDKKHERHPIFGNIVDEVAYHEKYPTIYHLRKKLVDSTDKADLRLIYLALAHMIKFRGHFLIEGDLNPDNSDVDKLFIQLVQTYNQLFEENPINASGVDAKAILSARLSKSRRLENLIAQLPGEKKNGLFGNLIALSLGLTPNFKSNFDLAEDAKLQLSKDTYDDDLDNLLAQIGDQYADLFLAAKNLSDAILLSDILRVNTEITKAPLSASMIKRYDEHHQDLTLLKALVRQQLPEKYKEIFFDQSKNGYAGYIDGGASQEEFYKFIKPILEKMDGTEELLVKLNREDLLRKQRTFDNGSIPHQIHLGELHAILRRQEDFYPFLKDNREKIEKILTFRIPYYVGPLARGNSRFAWMTRKSEETITPWNFEEVVDKGASAQSFIERMTNFDKNLPNEKVLPKHSLLYEYFTVYNELTKVKYVTEGMRKPAFLSGEQKKAIVDLLFKTNRKVTVKQLKEDYFKKIECFDSVEISGVEDRFNASLGTYHDLLKIIKDKDFLDNEENEDILEDIVLTLTLFEDREMIEERLKTYAHLFDDKVMKQLKRRRYTGWGRLSRKLINGIRDKQSGKTILDFLKSDGFANRNFMQLIHDDSLTFKEDIQKAQVSGQGDSLHEHIANLAGSPAIKKGILQTVKVVDELVKVMGRHKPENIVIEMARENQTTQKGQKNSRERMKRIEEGIKELGSQILKEHPVENTQLQNEKLYLYYLQNGRDMYVDQELDINRLSDYDVDHIVPQSFLKDDSIDNKVLTRSDKARGKSDNVPSEEVVKKMKNYWRQLLNAKLITQRKFDNLTKAERGGLSELDKAGFIKRQLVETRQITKHVAQILDSRMNTKYDENDKLIREVKVITLKSKLVSDFRKDFQFYKVREINNYHHAHDAYLNAVVGTALIKKYPKLESEFVYGDYKVYDVRKMIAKSEQEIGKATAKYFFYSNIMNFFKTEITLANGEIRKRPLIETNGETGEIVWDKGRDFATVRKVLSMPQVNIVKKTEVQTGGFSKESILPKRNSDKLIARKKDWDPKKYGGFDSPTVAYSVLVVAKVEKGKSKKLKSVKELLGITIMERSSFEKNPIDFLEAKGYKEVKKDLIIKLPKYSLFELENGRKRMLASAGELQKGNELALPSKYVNFLYLASHYEKLKGSPEDNEQKQLFVEQHKHYLDEIIEQISEFSKRVILADANLDKVLSAYNKHRDKPIREQAENIIHLFTLTNLGAPAAFKYFDTTIDRKRYTSTKEVLDATLIHQSITGLYETRIDLSQLGGDGGPAPAPGGTVSLQDEHRLFDIPVTTSLPDVWLQDFPQAWAETGGLGRAKCQAPIIIDLKPTAVPVSIKQYPMSLEAHMGIRQHIIKFLELGVLRPCRSPWNTPLLPVKKPGTQDYRPVQDLREINKRTVDIHPTVPNPYNLLSTLKPDYSWYTVLDLKDAFFCLPLAPQSQELFAFEWKDPERGISGQLTWTRLPQGFKNSPTLFNEALHRDLTDFRTQHPEVTLLQYVDDLLLAAPTKKACTQGTRHLLQELGEKGYRASAKKAQICQTKVTYLGYILSEGKRWLTPGRIETVARIPPPRNPREVREFLGTAGFCRLWIPGFAELAAPLYALTKPSTPFTWQTEHQLAFEALKKALLSAPALGLPDTSKPFTLFLDERQGIAKGVLTQKLGPWKRPVAYLSKKLDPVAAGWPPCLRIMAATAMLVKDSAKLTLGQPLTVITPHTLEAIVRQPPDRWITNARLTHYQALLLDTDRVQFGPPVTLNPATLLPVPENQPSPHDCRQVLAETHGTREDLKDQELPDADHTWYTDGSSYLDSGTRRAGAAVVDGHNTIWAQSLPPGTSAQKAELIALTKALELSKGKKANIYTDSRYAFATAHTHGSIYERRGWLTSEGKEIKNKAEIIALLKALFLPQEVAIIHCPGHQKGQDPVAVGNRQADRVARQAAMAEVLTLATEPDNTSHITAGKRTADGSEFEKRTADGSEFESPKKKAKVE

SEQ ID NO: 1565 - protein, 2097 aa, synthetic construct
  source 1..2097: note = Description of Artificial Sequence: Synthetic polypeptide
MPAAKRVKLDGGDKKYSIGLDIGTNSVGWAVITDEYKVPSKKFKVLGNTDRHSIKKNLIGALLFDSGETAEATRLKRTARRRYTRRKNRICYLQEIFSNEMAKVDDSFFHRLEESFLVEEDKKHERHPIFGNIVDEVAYHEKYPTIYHLRKKLVDSTDKADLRLIYLALAHMIKFRGHFLIEGDLNPDNSDVDKLFIQLVQTYNQLFEENPINASGVDAKAILSARLSKSRRLENLIAQLPGEKKNGLFGNLIALSLGLTPNFKSNFDLAEDAKLQLSKDTYDDDLDNLLAQIGDQYADLFLAAKNLSDAILLSDILRVNTEITKAPLSASMIKRYDEHHQDLTLLKALVRQQLPEKYKEIFFDQSKNGYAGYIDGGASQEEFYKFIKPILEKMDGTEELLVKLNREDLLRKQRTFDNGSIPHQIHLGELHAILRRQEDFYPFLKDNREKIEKILTFRIPYYVGPLARGNSRFAWMTRKSEETITPWNFEEVVDKGASAQSFIERMTNFDKNLPNEKVLPKHSLLYEYFTVYNELTKVKYVTEGMRKPAFLSGEQKKAIVDLLFKTNRKVTVKQLKEDYFKKIECFDSVEISGVEDRFNASLGTYHDLLKIIKDKDFLDNEENEDILEDIVLTLTLFEDREMIEERLKTYAHLFDDKVMKQLKRRRYTGWGRLSRKLINGIRDKQSGKTILDFLKSDGFANRNFMQLIHDDSLTFKEDIQKAQVSGQGDSLHEHIANLAGSPAIKKGILQTVKVVDELVKVMGRHKPENIVIEMARENQTTQKGQKNSRERMKRIEEGIKELGSQILKEHPVENTQLQNEKLYLYYLQNGRDMYVDQELDINRLSDYDVDHIVPQSFLKDDSIDNKVLTRSDKARGKSDNVPSEEVVKKMKNYWRQLLNAKLITQRKFDNLTKAERGGLSELDKAGFIKRQLVETRQITKHVAQILDSRMNTKYDENDKLIREVKVITLKSKLVSDFRKDFQFYKVREINNYHHAHDAYLNAVVGTALIKKYPKLESEFVYGDYKVYDVRKMIAKSEQEIGKATAKYFFYSNIMNFFKTEITLANGEIRKRPLIETNGETGEIVWDKGRDFATVRKVLSMPQVNIVKKTEVQTGGFSKESILPKRNSDKLIARKKDWDPKKYGGFDSPTVAYSVLVVAKVEKGKSKKLKSVKELLGITIMERSSFEKNPIDFLEAKGYKEVKKDLIIKLPKYSLFELENGRKRMLASAGELQKGNELALPSKYVNFLYLASHYEKLKGSPEDNEQKQLFVEQHKHYLDEIIEQISEFSKRVILADANLDKVLSAYNKHRDKPIREQAENIIHLFTLTNLGAPAAFKYFDTTIDRKRYTSTKEVLDATLIHQSITGLYETRIDLSQLGGDGGGGGGSSGGTVSLQDEHRLFDIPVTTSLPDVWLQDFPQAWAETGGLGRAKCQAPIIIDLKPTAVPVSIKQYPMSLEAHMGIRQHIIKFLELGVLRPCRSPWNTPLLPVKKPGTQDYRPVQDLREINKRTVDIHPTVPNPYNLLSTLKPDYSWYTVLDLKDAFFCLPLAPQSQELFAFEWKDPERGISGQLTWTRLPQGFKNSPTLFNEALHRDLTDFRTQHPEVTLLQYVDDLLLAAPTKKACTQGTRHLLQELGEKGYRASAKKAQICQTKVTYLGYILSEGKRWLTPGRIETVARIPPPRNPREVREFLGTAGFCRLWIPGFAELAAPLYALTKPSTPFTWQTEHQLAFEALKKALLSAPALGLPDTSKPFTLFLDERQGIAKGVLTQKLGPWKRPVAYLSKKLDPVAAGWPPCLRIMAATAMLVKDSAKLTLGQPLTVITPHTLEAIVRQPPDRWITNARLTHYQALLLDTDRVQFGPPVTLNPATLLPVPENQPSPHDCRQVLAETHGTREDLKDQELPDADHTWYTDGSSYLDSGTRRAGAAVVDGHNTIWAQSLPPGTSAQKAELIALTKALELSKGKKANIYTDSRYAFATAHTHGSIYERRGWLTSEGKEIKNKAEIIALLKALFLPQEVAIIHCPGHQKGQDPVAVGNRQADRVARQAAMAEVLTLATEPDNTSHITAGKRTADGSEFEKRTADGSEFESPKKKAKVE

SEQ ID NO: 1566 - protein, 2099 aa, synthetic construct
  source 1..2099: note = Description of Artificial Sequence: Synthetic polypeptide
MPAAKRVKLDGGDKKYSIGLDIGTNSVGWAVITDEYKVPSKKFKVLGNTDRHSIKKNLIGALLFDSGETAEATRLKRTARRRYTRRKNRICYLQEIFSNEMAKVDDSFFHRLEESFLVEEDKKHERHPIFGNIVDEVAYHEKYPTIYHLRKKLVDSTDKADLRLIYLALAHMIKFRGHFLIEGDLNPDNSDVDKLFIQLVQTYNQLFEENPINASGVDAKAILSARLSKSRRLENLIAQLPGEKKNGLFGNLIALSLGLTPNFKSNFDLAEDAKLQLSKDTYDDDLDNLLAQIGDQYADLFLAAKNLSDAILLSDILRVNTEITKAPLSASMIKRYDEHHQDLTLLKALVRQQLPEKYKEIFFDQSKNGYAGYIDGGASQEEFYKFIKPILEKMDGTEELLVKLNREDLLRKQRTFDNGSIPHQIHLGELHAILRRQEDFYPFLKDNREKIEKILTFRIPYYVGPLARGNSRFAWMTRKSEETITPWNFEEVVDKGASAQSFIERMTNFDKNLPNEKVLPKHSLLYEYFTVYNELTKVKYVTEGMRKPAFLSGEQKKAIVDLLFKTNRKVTVKQLKEDYFKKIECFDSVEISGVEDRFNASLGTYHDLLKIIKDKDFLDNEENEDILEDIVLTLTLFEDREMIEERLKTYAHLFDDKVMKQLKRRRYTGWGRLSRKLINGIRDKQSGKTILDFLKSDGFANRNFMQLIHDDSLTFKEDIQKAQVSGQGDSLHEHIANLAGSPAIKKGILQTVKVVDELVKVMGRHKPENIVIEMARENQTTQKGQKNSRERMKRIEEGIKELGSQILKEHPVENTQLQNEKLYLYYLQNGRDMYVDQELDINRLSDYDVDHIVPQSFLKDDSIDNKVLTRSDKARGKSDNVPSEEVVKKMKNYWRQLLNAKLITQRKFDNLTKAERGGLSELDKAGFIKRQLVETRQITKHVAQILDSRMNTKYDENDKLIREVKVITLKSKLVSDFRKDFQFYKVREINNYHHAHDAYLNAVVGTALIKKYPKLESEFVYGDYKVYDVRKMIAKSEQEIGKATAKYFFYSNIMNFFKTEITLANGEIRKRPLIETNGETGEIVWDKGRDFATVRKVLSMPQVNIVKKTEVQTGGFSKESILPKRNSDKLIARKKDWDPKKYGGFDSPTVAYSVLVVAKVEKGKSKKLKSVKELLGITIMERSSFEKNPIDFLEAKGYKEVKKDLIIKLPKYSLFELENGRKRMLASAGELQKGNELALPSKYVNFLYLASHYEKLKGSPEDNEQKQLFVEQHKHYLDEIIEQISEFSKRVILADANLDKVLSAYNKHRDKPIREQAENIIHLFTLTNLGAPAAFKYFDTTIDRKRYTSTKEVLDATLIHQSITGLYETRIDLSQLGGDGGGGGEAAAKGGTVSLQDEHRLFDIPVTTSLPDVWLQDFPQAWAETGGLGRAKCQAPIIIDLKPTAVPVSIKQYPMSLEAHMGIRQHIIKFLELGVLRPCRSPWNTPLLPVKKPGTQDYRPVQDLREINKRTVDIHPTVPNPYNLLSTLKPDYSWYTVLDLKDAFFCLPLAPQSQELFAFEWKDPERGISGQLTWTRLPQGFKNSPTLFNEALHRDLTDFRTQHPEVTLLQYVDDLLLAAPTKKACTQGTRHLLQELGEKGYRASAKKAQICQTKVTYLGYILSEGKRWLTPGRIETVARIPPPRNPREVREFLGTAGFCRLWIPGFAELAAPLYALTKPSTPFTWQTEHQLAFEALKKALLSAPALGLPDTSKPFTLFLDERQGIAKGVLTQKLGPWKRPVAYLSKKLDPVAAGWPPCLRIMAATAMLVKDSAKLTLGQPLTVITPHTLEAIVRQPPDRWITNARLTHYQALLLDTDRVQFGPPVTLNPATLLPVPENQPSPHDCRQVLAETHGTREDLKDQELPDADHTWYTDGSSYLDSGTRRAGAAVVDGHNTIWAQSLPPGTSAQKAELIALTKALELSKGKKANIYTDSRYAFATAHTHGSIYERRGWLTSEGKEIKNKAEIIALLKALFLPQEVAIIHCPGHQKGQDPVAVGNRQADRVARQAAMAEVLTLATEPDNTSHITAGKRTADGSEFEKRTADGSEFESPKKKAKVE

SEQ ID NO: 1567 - protein, 2102 aa, synthetic construct
  source 1..2102: note = Description of Artificial Sequence: Synthetic polypeptide
MPAAKRVKLDGGDKKYSIGLDIGTNSVGWAVITDEYKVPSKKFKVLGNTDRHSIKKNLIGALLFDSGETAEATRLKRTARRRYTRRKNRICYLQEIFSNEMAKVDDSFFHRLEESFLVEEDKKHERHPIFGNIVDEVAYHEKYPTIYHLRKKLVDSTDKADLRLIYLALAHMIKFRGHFLIEGDLNPDNSDVDKLFIQLVQTYNQLFEENPINASGVDAKAILSARLSKSRRLENLIAQLPGEKKNGLFGNLIALSLGLTPNFKSNFDLAEDAKLQLSKDTYDDDLDNLLAQIGDQYADLFLAAKNLSDAILLSDILRVNTEITKAPLSASMIKRYDEHHQDLTLLKALVRQQLPEKYKEIFFDQSKNGYAGYIDGGASQEEFYKFIKPILEKMDGTEELLVKLNREDLLRKQRTFDNGSIPHQIHLGELHAILRRQEDFYPFLKDNREKIEKILTFRIPYYVGPLARGNSRFAWMTRKSEETITPWNFEEVVDKGASAQSFIERMTNFDKNLPNEKVLPKHSLLYEYFTVYNELTKVKYVTEGMRKPAFLSGEQKKAIVDLLFKTNRKVTVKQLKEDYFKKIECFDSVEISGVEDRFNASLGTYHDLLKIIKDKDFLDNEENEDILEDIVLTLTLFEDREMIEERLKTYAHLFDDKVMKQLKRRRYTGWGRLSRKLINGIRDKQSGKTILDFLKSDGFANRNFMQLIHDDSLTFKEDIQKAQVSGQGDSLHEHIANLAGSPAIKKGILQTVKVVDELVKVMGRHKPENIVIEMARENQTTQKGQKNSRERMKRIEEGIKELGSQILKEHPVENTQLQNEKLYLYYLQNGRDMYVDQELDINRLSDYDVDHIVPQSFLKDDSIDNKVLTRSDKARGKSDNVPSEEVVKKMKNYWRQLLNAKLITQRKFDNLTKAERGGLSELDKAGFIKRQLVETRQITKHVAQILDSRMNTKYDENDKLIREVKVITLKSKLVSDFRKDFQFYKVREINNYHHAHDAYLNAVVGTALIKKYPKLESEFVYGDYKVYDVRKMIAKSEQEIGKATAKYFFYSNIMNFFKTEITLANGEIRKRPLIETNGETGEIVWDKGRDFATVRKVLSMPQVNIVKKTEVQTGGFSKESILPKRNSDKLIARKKDWDPKKYGGFDSPTVAYSVLVVAKVEKGKSKKLKSVKELLGITIMERSSFEKNPIDFLEAKGYKEVKKDLIIKLPKYSLFELENGRKRMLASAGELQKGNELALPSKYVNFLYLASHYEKLKGSPEDNEQKQLFVEQHKHYLDEIIEQISEFSKRVILADANLDKVLSAYNKHRDKPIREQAENIIHLFTLTNLGAPAAFKYFDTTIDRKRYTSTKEVLDATLIHQSITGLYETRIDLSQLGGDGGGSSGGSEAAAKGGTVSLQDEHRLFDIPVTTSLPDVWLQDFPQAWAETGGLGRAKCQAPIIIDLKPTAVPVSIKQYPMSLEAHMGIRQHIIKFLELGVLRPCRSPWNTPLLPVKKPGTQDYRPVQDLREINKRTVDIHPTVPNPYNLLSTLKPDYSWYTVLDLKDAFFCLPLAPQSQELFAFEWKDPERGISGQLTWTRLPQGFKNSPTLFNEALHRDLTDFRTQHPEVTLLQYVDDLLLAAPTKKACTQGTRHLLQELGEKGYRASAKKAQICQTKVTYLGYILSEGKRWLTPGRIETVARIPPPRNPREVREFLGTAGFCRLWIPGFAELAAPLYALTKPSTPFTWQTEHQLAFEALKKALLSAPALGLPDTSKPFTLFLDERQGIAKGVLTQKLGPWKRPVAYLSKKLDPVAAGWPPCLRIMAATAMLVKDSAKLTLGQPLTVITPHTLEAIVRQPPDRWITNARLTHYQALLLDTDRVQFGPPVTLNPATLLPVPENQPSPHDCRQVLAETHGTREDLKDQELPDADHTWYTDGSSYLDSGTRRAGAAVVDGHNTIWAQSLPPGTSAQKAELIALTKALELSKGKKANIYTDSRYAFATAHTHGSIYERRGWLTSEGKEIKNKAEIIALLKALFLPQEVAIIHCPGHQKGQDPVAVGNRQADRVARQAAMAEVLTLATEPDNTSHITAGKRTADGSEFEKRTADGSEFESPKKKAKVE

SEQ ID NO: 1568 - protein, 2100 aa, synthetic construct
  source 1..2100: note = Description of Artificial Sequence: Synthetic polypeptide
MPAAKRVKLDGGDKKYSIGLDIGTNSVGWAVITDEYKVPSKKFKVLGNTDRHSIKKNLIGALLFDSGETAEATRLKRTARRRYTRRKNRICYLQEIFSNEMAKVDDSFFHRLEESFLVEEDKKHERHPIFGNIVDEVAYHEKYPTIYHLRKKLVDSTDKADLRLIYLALAHMIKFRGHFLIEGDLNPDNSDVDKLFIQLVQTYNQLFEENPINASGVDAKAILSARLSKSRRLENLIAQLPGEKKNGLFGNLIALSLGLTPNFKSNFDLAEDAKLQLSKDTYDDDLDNLLAQIGDQYADLFLAAKNLSDAILLSDILRVNTEITKAPLSASMIKRYDEHHQDLTLLKALVRQQLPEKYKEIFFDQSKNGYAGYIDGGASQEEFYKFIKPILEKMDGTEELLVKLNREDLLRKQRTFDNGSIPHQIHLGELHAILRRQEDFYPFLKDNREKIEKILTFRIPYYVGPLARGNSRFAWMTRKSEETITPWNFEEVVDKGASAQSFIERMTNFDKNLPNEKVLPKHSLLYEYFTVYNELTKVKYVTEGMRKPAFLSGEQKKAIVDLLFKTNRKVTVKQLKEDYFKKIECFDSVEISGVEDRFNASLGTYHDLLKIIKDKDFLDNEENEDILEDIVLTLTLFEDREMIEERLKTYAHLFDDKVMKQLKRRRYTGWGRLSRKLINGIRDKQSGKTILDFLKSDGFANRNFMQLIHDDSLTFKEDIQKAQVSGQGDSLHEHIANLAGSPAIKKGILQTVKVVDELVKVMGRHKPENIVIEMARENQTTQKGQKNSRERMKRIEEGIKELGSQILKEHPVENTQLQNEKLYLYYLQNGRDMYVDQELDINRLSDYDVDHIVPQSFLKDDSIDNKVLTRSDKARGKSDNVPSEEVVKKMKNYWRQLLNAKLITQRKFDNLTKAERGGLSELDKAGFIKRQLVETRQITKHVAQILDSRMNTKYDENDKLIREVKVITLKSKLVSDFRKDFQFYKVREINNYHHAHDAYLNAVVGTALIKKYPKLESEFVYGDYKVYDVRKMIAKSEQEIGKATAKYFFYSNIMNFFKTEITLANGEIRKRPLIETNGETGEIVWDKGRDFATVRKVLSMPQVNIVKKTEVQTGGFSKESILPKRNSDKLIARKKDWDPKKYGGFDSPTVAYSVLVVAKVEKGKSKKLKSVKELLGITIMERSSFEKNPIDFLEAKGYKEVKKDLIIKLPKYSLFELENGRKRMLASAGELQKGNELALPSKYVNFLYLASHYEKLKGSPEDNEQKQLFVEQHKHYLDEIIEQISEFSKRVILADANLDKVLSAYNKHRDKPIREQAENIIHLFTLTNLGAPAAFKYFDTTIDRKRYTSTKEVLDATLIHQSITGLYETRIDLSQLGGDGGPAPGSSGGGGGTVSLQDEHRLFDIPVTTSLPDVWLQDFPQAWAETGGLGRAKCQAPIIIDLKPTAVPVSIKQYPMSLEAHMGIRQHIIKFLELGVLRPCRSPWNTPLLPVKKPGTQDYRPVQDLREINKRTVDIHPTVPNPYNLLSTLKPDYSWYTVLDLKDAFFCLPLAPQSQELFAFEWKDPERGISGQLTWTRLPQGFKNSPTLFNEALHRDLTDFRTQHPEVTLLQYVDDLLLAAPTKKACTQGTRHLLQELGEKGYRASAKKAQICQTKVTYLGYILSEGKRWLTPGRIETVARIPPPRNPREVREFLGTAGFCRLWIPGFAELAAPLYALTKPSTPFTWQTEHQLAFEALKKALLSAPALGLPDTSKPFTLFLDERQGIAKGVLTQKLGPWKRPVAYLSKKLDPVAAGWPPCLRIMAATAMLVKDSAKLTLGQPLTVITPHTLEAIVRQPPDRWITNARLTHYQALLLDTDRVQFGPPVTLNPATLLPVPENQPSPHDCRQVLAETHGTREDLKDQELPDADHTWYTDGSSYLDSGTRRAGAAVVDGHNTIWAQSLPPGTSAQKAELIALTKALELSKGKKANIYTDSRYAFATAHTHGSIYERRGWLTSEGKEIKNKAEIIALLKALFLPQEVAIIHCPGHQKGQDPVAVGNRQADRVARQAAMAEVLTLATEPDNTSHITAGKRTADGSEFEKRTADGSEFESPKKKAKVE

SEQ ID NO: 1569 - protein, 2099 aa, synthetic construct
  source 1..2099: note = Description of Artificial Sequence: Synthetic polypeptide
MPAAKRVKLDGGDKKYSIGLDIGTNSVGWAVITDEYKVPSKKFKVLGNTDRHSIKKNLIGALLFDSGETAEATRLKRTARRRYTRRKNRICYLQEIFSNEMAKVDDSFFHRLEESFLVEEDKKHERHPIFGNIVDEVAYHEKYPTIYHLRKKLVDSTDKADLRLIYLALAHMIKFRGHFLIEGDLNPDNSDVDKLFIQLVQTYNQLFEENPINASGVDAKAILSARLSKSRRLENLIAQLPGEKKNGLFGNLIALSLGLTPNFKSNFDLAEDAKLQLSKDTYDDDLDNLLAQIGDQYADLFLAAKNLSDAILLSDILRVNTEITKAPLSASMIKRYDEHHQDLTLLKALVRQQLPEKYKEIFFDQSKNGYAGYIDGGASQEEFYKFIKPILEKMDGTEELLVKLNREDLLRKQRTFDNGSIPHQIHLGELHAILRRQEDFYPFLKDNREKIEKILTFRIPYYVGPLARGNSRFAWMTRKSEETITPWNFEEVVDKGASAQSFIERMTNFDKNLPNEKVLPKHSLLYEYFTVYNELTKVKYVTEGMRKPAFLSGEQKKAIVDLLFKTNRKVTVKQLKEDYFKKIECFDSVEISGVEDRFNASLGTYHDLLKIIKDKDFLDNEENEDILEDIVLTLTLFEDREMIEERLKTYAHLFDDKVMKQLKRRRYTGWGRLSRKLINGIRDKQSGKTILDFLKSDGFANRNFMQLIHDDSLTFKEDIQKAQVSGQGDSLHEHIANLAGSPAIKKGILQTVKVVDELVKVMGRHKPENIVIEMARENQTTQKGQKNSRERMKRIEEGIKELGSQILKEHPVENTQLQNEKLYLYYLQNGRDMYVDQELDINRLSDYDVDHIVPQSFLKDDSIDNKVLTRSDKARGKSDNVPSEEVVKKMKNYWRQLLNAKLITQRKFDNLTKAERGGLSELDKAGFIKRQLVETRQITKHVAQILDSRMNTKYDENDKLIREVKVITLKSKLVSDFRKDFQFYKVREINNYHHAHDAYLNAVVGTALIKKYPKLESEFVYGDYKVYDVRKMIAKSEQEIGKATAKYFFYSNIMNFFKTEITLANGEIRKRPLIETNGETGEIVWDKGRDFATVRKVLSMPQVNIVKKTEVQTGGFSKESILPKRNSDKLIARKKDWDPKKYGGFDSPTVAYSVLVVAKVEKGKSKKLKSVKELLGITIMERSSFEKNPIDFLEAKGYKEVKKDLIIKLPKYSLFELENGRKRMLASAGELQKGNELALPSKYVNFLYLASHYEKLKGSPEDNEQKQLFVEQHKHYLDEIIEQISEFSKRVILADANLDKVLSAYNKHRDKPIREQAENIIHLFTLTNLGAPAAFKYFDTTIDRKRYTSTKEVLDATLIHQSITGLYETRIDLSQLGGDGGPAPEAAAKGGTVSLQDEHRLFDIPVTTSLPDVWLQDFPQAWAETGGLGRAKCQAPIIIDLKPTAVPVSIKQYPMSLEAHMGIRQHIIKFLELGVLRPCRSPWNTPLLPVKKPGTQDYRPVQDLREINKRTVDIHPTVPNPYNLLSTLKPDYSWYTVLDLKDAFFCLPLAPQSQELFAFEWKDPERGISGQLTWTRLPQGFKNSPTLFNEALHRDLTDFRTQHPEVTLLQYVDDLLLAAPTKKACTQGTRHLLQELGEKGYRASAKKAQICQTKVTYLGYILSEGKRWLTPGRIETVARIPPPRNPREVREFLGTAGFCRLWIPGFAELAAPLYALTKPSTPFTWQTEHQLAFEALKKALLSAPALGLPDTSKPFTLFLDERQGIAKGVLTQKLGPWKRPVAYLSKKLDPVAAGWPPCLRIMAATAMLVKDSAKLTLGQPLTVITPHTLEAIVRQPPDRWITNARLTHYQALLLDTDRVQFGPPVTLNPATLLPVPENQPSPHDCRQVLAETHGTREDLKDQELPDADHTWYTDGSSYLDSGTRRAGAAVVDGHNTIWAQSLPPGTSAQKAELIALTKALELSKGKKANIYTDSRYAFATAHTHGSIYERRGWLTSEGKEIKNKAEIIALLKALFLPQEVAIIHCPGHQKGQDPVAVGNRQADRVARQAAMAEVLTLATEPDNTSHITAGKRTADGSEFEKRTADGSEFESPKKKAKVE

SEQ ID NO: 1570 - protein, 2107 aa, synthetic construct
  source 1..2107: note = Description of Artificial Sequence: Synthetic polypeptide
MPAAKRVKLDGGDKKYSIGLDIGTNSVGWAVITDEYKVPSKKFKVLGNTDRHSIKKNLIGALLFDSGETAEATRLKRTARRRYTRRKNRICYLQEIFSNEMAKVDDSFFHRLEESFLVEEDKKHERHPIFGNIVDEVAYHEKYPTIYHLRKKLVDSTDKADLRLIYLALAHMIKFRGHFLIEGDLNPDNSDVDKLFIQLVQTYNQLFEENPINASGVDAKAILSARLSKSRRLENLIAQLPGEKKNGLFGNLIALSLGLTPNFKSNFDLAEDAKLQLSKDTYDDDLDNLLAQIGDQYADLFLAAKNLSDAILLSDILRVNTEITKAPLSASMIKRYDEHHQDLTLLKALVRQQLPEKYKEIFFDQSKNGYAGYIDGGASQEEFYKFIKPILEKMDGTEELLVKLNREDLLRKQRTFDNGSIPHQIHLGELHAILRRQEDFYPFLKDNREKIEKILTFRIPYYVGPLARGNSRFAWMTRKSEETITPWNFEEVVDKGASAQSFIERMTNFDKNLPNEKVLPKHSLLYEYFTVYNELTKVKYVTEGMRKPAFLSGEQKKAIVDLLFKTNRKVTVKQLKEDYFKKIECFDSVEISGVEDRFNASLGTYHDLLKIIKDKDFLDNEENEDILEDIVLTLTLFEDREMIEERLKTYAHLFDDKVMKQLKRRRYTGWGRLSRKLINGIRDKQSGKTILDFLKSDGFANRNFMQLIHDDSLTFKEDIQKAQVSGQGDSLHEHIANLAGSPAIKKGILQTVKVVDELVKVMGRHKPENIVIEMARENQTTQKGQKNSRERMKRIEEGIKELGSQILKEHPVENTQLQNEKLYLYYLQNGRDMYVDQELDINRLSDYDVDHIVPQSFLKDDSIDNKVLTRSDKARGKSDNVPSEEVVKKMKNYWRQLLNAKLITQRKFDNLTKAERGGLSELDKAGFIKRQLVETRQITKHVAQILDSRMNTKYDENDKLIREVKVITLKSKLVSDFRKDFQFYKVREINNYHHAHDAYLNAVVGTALIKKYPKLESEFVYGDYKVYDVRKMIAKSEQEIGKATAKYFFYSNIMNFFKTEITLANGEIRKRPLIETNGETGEIVWDKGRDFATVRKVLSMPQVNIVKKTEVQTGGFSKESILPKRNSDKLIARKKDWDPKKYGGFDSPTVAYSVLVVAKVEKGKSKKLKSVKELLGITIMERSSFEKNPIDFLEAKGYKEVKKDLIIKLPKYSLFELENGRKRMLASAGELQKGNELALPSKYVNFLYLASHYEKLKGSPEDNEQKQLFVEQHKHYLDEIIEQISEFSKRVILADANLDKVLSAYNKHRDKPIREQAENIIHLFTLTNLGAPAAFKYFDTTIDRKRYTSTKEVLDATLIHQSITGLYETRIDLSQLGGDGGSGSETPGTSESATPESGGTVSLQDEHRLFDIPVTTSLPDVWLQDFPQAWAETGGLGRAKCQAPIIIDLKPTAVPVSIKQYPMSLEAHMGIRQHIIKFLELGVLRPCRSPWNTPLLPVKKPGTQDYRPVQDLREINKRTVDIHPTVPNPYNLLSTLKPDYSWYTVLDLKDAFFCLPLAPQSQELFAFEWKDPERGISGQLTWTRLPQGFKNSPTLFNEALHRDLTDFRTQHPEVTLLQYVDDLLLAAPTKKACTQGTRHLLQELGEKGYRASAKKAQICQTKVTYLGYILSEGKRWLTPGRIETVARIPPPRNPREVREFLGTAGFCRLWIPGFAELAAPLYALTKPSTPFTWQTEHQLAFEALKKALLSAPALGLPDTSKPFTLFLDERQGIAKGVLTQKLGPWKRPVAYLSKKLDPVAAGWPPCLRIMAATAMLVKDSAKLTLGQPLTVITPHTLEAIVRQPPDRWITNARLTHYQALLLDTDRVQFGPPVTLNPATLLPVPENQPSPHDCRQVLAETHGTREDLKDQELPDADHTWYTDGSSYLDSGTRRAGAAVVDGHNTIWAQSLPPGTSAQKAELIALTKALELSKGKKANIYTDSRYAFATAHTHGSIYERRGWLTSEGKEIKNKAEIIALLKALFLPQEVAIIHCPGHQKGQDPVAVGNRQADRVARQAAMAEVLTLATEPDNTSHITAGKRTADGSEFEKRTADGSEFESPKKKAKVE

SEQ ID NO: 1571 - protein, 2102 aa, synthetic construct
  source 1..2102: note = Description of Artificial Sequence: Synthetic polypeptide
MPAAKRVKLDGGDKKYSIGLDIGTNSVGWAVITDEYKVPSKKFKVLGNTDRHSIKKNLIGALLFDSGETAEATRLKRTARRRYTRRKNRICYLQEIFSNEMAKVDDSFFHRLEESFLVEEDKKHERHPIFGNIVDEVAYHEKYPTIYHLRKKLVDSTDKADLRLIYLALAHMIKFRGHFLIEGDLNPDNSDVDKLFIQLVQTYNQLFEENPINASGVDAKAILSARLSKSRRLENLIAQLPGEKKNGLFGNLIALSLGLTPNFKSNFDLAEDAKLQLSKDTYDDDLDNLLAQIGDQYADLFLAAKNLSDAILLSDILRVNTEITKAPLSASMIKRYDEHHQDLTLLKALVRQQLPEKYKEIFFDQSKNGYAGYIDGGASQEEFYKFIKPILEKMDGTEELLVKLNREDLLRKQRTFDNGSIPHQIHLGELHAILRRQEDFYPFLKDNREKIEKILTFRIPYYVGPLARGNSRFAWMTRKSEETITPWNFEEVVDKGASAQSFIERMTNFDKNLPNEKVLPKHSLLYEYFTVYNELTKVKYVTEGMRKPAFLSGEQKKAIVDLLFKTNRKVTVKQLKEDYFKKIECFDSVEISGVEDRFNASLGTYHDLLKIIKDKDFLDNEENEDILEDIVLTLTLFEDREMIEERLKTYAHLFDDKVMKQLKRRRYTGWGRLSRKLINGIRDKQSGKTILDFLKSDGFANRNFMQLIHDDSLTFKEDIQKAQVSGQGDSLHEHIANLAGSPAIKKGILQTVKVVDELVKVMGRHKPENIVIEMARENQTTQKGQKNSRERMKRIEEGIKELGSQILKEHPVENTQLQNEKLYLYYLQNGRDMYVDQELDINRLSDYDVDHIVPQSFLKDDSIDNKVLTRSDKARGKSDNVPSEEVVKKMKNYWRQLLNAKLITQRKFDNLTKAERGGLSELDKAGFIKRQLVETRQITKHVAQILDSRMNTKYDENDKLIREVKVITLKSKLVSDFRKDFQFYKVREINNYHHAHDAYLNAVVGTALIKKYPKLESEFVYGDYKVYDVRKMIAKSEQEIGKATAKYFFYSNIMNFFKTEITLANGEIRKRPLIETNGETGEIVWDKGRDFATVRKVLSMPQVNIVKKTEVQTGGFSKESILPKRNSDKLIARKKDWDPKKYGGFDSPTVAYSVLVVAKVEKGKSKKLKSVKELLGITIMERSSFEKNPIDFLEAKGYKEVKKDLIIKLPKYSLFELENGRKRMLASAGELQKGNELALPSKYVNFLYLASHYEKLKGSPEDNEQKQLFVEQHKHYLDEIIEQISEFSKRVILADANLDKVLSAYNKHRDKPIREQAENIIHLFTLTNLGAPAAFKYFDTTIDRKRYTSTKEVLDATLIHQSITGLYETRIDLSQLGGDGGEAAAKGSSPAPGGTVSLQDEHRLFDIPVTTSLPDVWLQDFPQAWAETGGLGRAKCQAPIIIDLKPTAVPVSIKQYPMSLEAHMGIRQHIIKFLELGVLRPCRSPWNTPLLPVKKPGTQDYRPVQDLREINKRTVDIHPTVPNPYNLLSTLKPDYSWYTVLDLKDAFFCLPLAPQSQELFAFEWKDPERGISGQLTWTRLPQGFKNSPTLFNEALHRDLTDFRTQHPEVTLLQYVDDLLLAAPTKKACTQGTRHLLQELGEKGYRASAKKAQICQTKVTYLGYILSEGKRWLTPGRIETVARIPPPRNPREVREFLGTAGFCRLWIPGFAELAAPLYALTKPSTPFTWQTEHQLAFEALKKALLSAPALGLPDTSKPFTLFLDERQGIAKGVLTQKLGPWKRPVAYLSKKLDPVAAGWPPCLRIMAATAMLVKDSAKLTLGQPLTVITPHTLEAIVRQPPDRWITNARLTHYQALLLDTDRVQFGPPVTLNPATLLPVPENQPSPHDCRQVLAETHGTREDLKDQELPDADHTWYTDGSSYLDSGTRRAGAAVVDGHNTIWAQSLPPGTSAQKAELIALTKALELSKGKKANIYTDSRYAFATAHTHGSIYERRGWLTSEGKEIKNKAEIIALLKALFLPQEVAIIHCPGHQKGQDPVAVGNRQADRVARQAAMAEVLTLATEPDNTSHITAGKRTADGSEFEKRTADGSEFESPKKKAKVE

SEQ ID NO: 1572 - protein, 2097 aa, synthetic construct
  source 1..2097: note = Description of Artificial Sequence: Synthetic polypeptide
MPAAKRVKLDGGDKKYSIGLDIGTNSVGWAVITDEYKVPSKKFKVLGNTDRHSIKKNLIGALLFDSGETAEATRLKRTARRRYTRRKNRICYLQEIFSNEMAKVDDSFFHRLEESFLVEEDKKHERHPIFGNIVDEVAYHEKYPTIYHLRKKLVDSTDKADLRLIYLALAHMIKFRGHFLIEGDLNPDNSDVDKLFIQLVQTYNQLFEENPINASGVDAKAILSARLSKSRRLENLIAQLPGEKKNGLFGNLIALSLGLTPNFKSNFDLAEDAKLQLSKDTYDDDLDNLLAQIGDQYADLFLAAKNLSDAILLSDILRVNTEITKAPLSASMIKRYDEHHQDLTLLKALVRQQLPEKYKEIFFDQSKNGYAGYIDGGASQEEFYKFIKPILEKMDGTEELLVKLNREDLLRKQRTFDNGSIPHQIHLGELHAILRRQEDFYPFLKDNREKIEKILTFRIPYYVGPLARGNSRFAWMTRKSEETITPWNFEEVVDKGASAQSFIERMTNFDKNLPNEKVLPKHSLLYEYFTVYNELTKVKYVTEGMRKPAFLSGEQKKAIVDLLFKTNRKVTVKQLKEDYFKKIECFDSVEISGVEDRFNASLGTYHDLLKIIKDKDFLDNEENEDILEDIVLTLTLFEDREMIEERLKTYAHLFDDKVMKQLKRRRYTGWGRLSRKLINGIRDKQSGKTILDFLKSDGFANRNFMQLIHDDSLTFKEDIQKAQVSGQGDSLHEHIANLAGSPAIKKGILQTVKVVDELVKVMGRHKPENIVIEMARENQTTQKGQKNSRERMKRIEEGIKELGSQILKEHPVENTQLQNEKLYLYYLQNGRDMYVDQELDINRLSDYDVDHIVPQSFLKDDSIDNKVLTRSDKARGKSDNVPSEEVVKKMKNYWRQLLNAKLITQRKFDNLTKAERGGLSELDKAGFIKRQLVETRQITKHVAQILDSRMNTKYDENDKLIREVKVITLKSKLVSDFRKDFQFYKVREINNYHHAHDAYLNAVVGTALIKKYPKLESEFVYGDYKVYDVRKMIAKSEQEIGKATAKYFFYSNIMNFFKTEITLANGEIRKRPLIETNGETGEIVWDKGRDFATVRKVLSMPQVNIVKKTEVQTGGFSKESILPKRNSDKLIARKKDWDPKKYGGFDSPTVAYSVLVVAKVEKGKSKKLKSVKELLGITIMERSSFEKNPIDFLEAKGYKEVKKDLIIKLPKYSLFELENGRKRMLASAGELQKGNELALPSKYVNFLYLASHYEKLKGSPEDNEQKQLFVEQHKHYLDEIIEQISEFSKRVILADANLDKVLSAYNKHRDKPIREQAENIIHLFTLTNLGAPAAFKYFDTTIDRKRYTSTKEVLDATLIHQSITGLYETRIDLSQLGGDGGGGGGGGGGTVSLQDEHRLFDIPVTTSLPDVWLQDFPQAWAETGGLGRAKCQAPIIIDLKPTAVPVSIKQYPMSLEAHMGIRQHIIKFLELGVLRPCRSPWNTPLLPVKKPGTQDYRPVQDLREINKRTVDIHPTVPNPYNLLSTLKPDYSWYTVLDLKDAFFCLPLAPQSQELFAFEWKDPERGISGQLTWTRLPQGFKNSPTLFNEALHRDLTDFRTQHPEVTLLQYVDDLLLAAPTKKACTQGTRHLLQELGEKGYRASAKKAQICQTKVTYLGYILSEGKRWLTPGRIETVARIPPPRNPREVREFLGTAGFCRLWIPGFAELAAPLYALTKPSTPFTWQTEHQLAFEALKKALLSAPALGLPDTSKPFTLFLDERQGIAKGVLTQKLGPWKRPVAYLSKKLDPVAAGWPPCLRIMAATAMLVKDSAKLTLGQPLTVITPHTLEAIVRQPPDRWITNARLTHYQALLLDTDRVQFGPPVTLNPATLLPVPENQPSPHDCRQVLAETHGTREDLKDQELPDADHTWYTDGSSYLDSGTRRAGAAVVDGHNTIWAQSLPPGTSAQKAELIALTKALELSKGKKANIYTDSRYAFATAHTHGSIYERRGWLTSEGKEIKNKAEIIALLKALFLPQEVAIIHCPGHQKGQDPVAVGNRQADRVARQAAMAEVLTLATEPDNTSHITAGKRTADGSEFEKRTADGSEFESPKKKAKVE

SEQ ID NO: 1573 - protein, 2100 aa, synthetic construct
  source 1..2100: note = Description of Artificial Sequence: Synthetic polypeptide
MPAAKRVKLDGGDKKYSIGLDIGTNSVGWAVITDEYKVPSKKFKVLGNTDRHSIKKNLIGALLFDSGETAEATRLKRTARRRYTRRKNRICYLQEIFSNEMAKVDDSFFHRLEESFLVEEDKKHERHPIFGNIVDEVAYHEKYPTIYHLRKKLVDSTDKADLRLIYLALAHMIKFRGHFLIEGDLNPDNSDVDKLFIQLVQTYNQLFEENPINASGVDAKAILSARLSKSRRLENLIAQLPGEKKNGLFGNLIALSLGLTPNFKSNFDLAEDAKLQLSKDTYDDDLDNLLAQIGDQYADLFLAAKNLSDAILLSDILRVNTEITKAPLSASMIKRYDEHHQDLTLLKALVRQQLPEKYKEIFFDQSKNGYAGYIDGGASQEEFYKFIKPILEKMDGTEELLVKLNREDLLRKQRTFDNGSIPHQIHLGELHAILRRQEDFYPFLKDNREKIEKILTFRIPYYVGPLARGNSRFAWMTRKSEETITPWNFEEVVDKGASAQSFIERMTNFDKNLPNEKVLPKHSLLYEYFTVYNELTKVKYVTEGMRKPAFLSGEQKKAIVDLLFKTNRKVTVKQLKEDYFKKIECFDSVEISGVEDRFNASLGTYHDLLKIIKDKDFLDNEENEDILEDIVLTLTLFEDREMIEERLKTYAHLFDDKVMKQLKRRRYTGWGRLSRKLINGIRDKQSGKTILDFLKSDGFANRNFMQLIHDDSLTFKEDIQKAQVSGQGDSLHEHIANLAGSPAIKKGILQTVKVVDELVKVMGRHKPENIVIEMARENQTTQKGQKNSRERMKRIEEGIKELGSQILKEHPVENTQLQNEKLYLYYLQNGRDMYVDQELDINRLSDYDVDHIVPQSFLKDDSIDNKVLTRSDKARGKSDNVPSEEVVKKMKNYWRQLLNAKLITQRKFDNLTKAERGGLSELDKAGFIKRQLVETRQITKHVAQILDSRMNTKYDENDKLIREVKVITLKSKLVSDFRKDFQFYKVREINNYHHAHDAYLNAVVGTALIKKYPKLESEFVYGDYKVYDVRKMIAKSEQEIGKATAKYFFYSNIMNFFKTEITLANGEIRKRPLIETNGETGEIVWDKGRDFATVRKVLSMPQVNIVKKTEVQTGGFSKESILPKRNSDKLIARKKDWDPKKYGGFDSPTVAYSVLVVAKVEKGKSKKLKSVKELLGITIMERSSFEKNPIDFLEAKGYKEVKKDLIIKLPKYSLFELENGRKRMLASAGELQKGNELALPSKYVNFLYLASHYEKLKGSPEDNEQKQLFVEQHKHYLDEIIEQISEFSKRVILADANLDKVLSAYNKHRDKPIREQAENIIHLFTLTNLGAPAAFKYFDTTIDRKRYTSTKEVLDATLIHQSITGLYETRIDLSQLGGDGGGGSGGSGGSGGTVSLQDEHRLFDIPVTTSLPDVWLQDFPQAWAETGGLGRAKCQAPIIIDLKPTAVPVSIKQYPMSLEAHMGIRQHIIKFLELGVLRPCRSPWNTPLLPVKKPGTQDYRPVQDLREINKRTVDIHPTVPNPYNLLSTLKPDYSWYTVLDLKDAFFCLPLAPQSQELFAFEWKDPERGISGQLTWTRLPQGFKNSPTLFNEALHRDLTDFRTQHPEVTLLQYVDDLLLAAPTKKACTQGTRHLLQELGEKGYRASAKKAQICQTKVTYLGYILSEGKRWLTPGRIETVARIPPPRNPREVREFLGTAGFCRLWIPGFAELAAPLYALTKPSTPFTWQTEHQLAFEALKKALLSAPALGLPDTSKPFTLFLDERQGIAKGVLTQKLGPWKRPVAYLSKKLDPVAAGWPPCLRIMAATAMLVKDSAKLTLGQPLTVITPHTLEAIVRQPPDRWITNARLTHYQALLLDTDRVQFGPPVTLNPATLLPVPENQPSPHDCRQVLAETHGTREDLKDQELPDADHTWYTDGSSYLDSGTRRAGAAVVDGHNTIWAQSLPPGTSAQKAELIALTKALELSKGKKANIYTDSRYAFATAHTHGSIYERRGWLTSEGKEIKNKAEIIALLKALFLPQEVAIIHCPGHQKGQDPVAVGNRQADRVARQAAMAEVLTLATEPDNTSHITAGKRTADGSEFEKRTADGSEFESPKKKAKVE

SEQ ID NO: 1574 - protein, 2102 aa, synthetic construct
  source 1..2102: note = Description of Artificial Sequence: Synthetic polypeptide
MPAAKRVKLDGGDKKYSIGLDIGTNSVGWAVITDEYKVPSKKFKVLGNTDRHSIKKNLIGALLFDSGETAEATRLKRTARRRYTRRKNRICYLQEIFSNEMAKVDDSFFHRLEESFLVEEDKKHERHPIFGNIVDEVAYHEKYPTIYHLRKKLVDSTDKADLRLIYLALAHMIKFRGHFLIEGDLNPDNSDVDKLFIQLVQTYNQLFEENPINASGVDAKAILSARLSKSRRLENLIAQLPGEKKNGLFGNLIALSLGLTPNFKSNFDLAEDAKLQLSKDTYDDDLDNLLAQIGDQYADLFLAAKNLSDAILLSDILRVNTEITKAPLSASMIKRYDEHHQDLTLLKALVRQQLPEKYKEIFFDQSKNGYAGYIDGGASQEEFYKFIKPILEKMDGTEELLVKLNREDLLRKQRTFDNGSIPHQIHLGELHAILRRQEDFYPFLKDNREKIEKILTFRIPYYVGPLARGNSRFAWMTRKSEETITPWNFEEVVDKGASAQSFIERMTNFDKNLPNEKVLPKHSLLYEYFTVYNELTKVKYVTEGMRKPAFLSGEQKKAIVDLLFKTNRKVTVKQLKEDYFKKIECFDSVEISGVEDRFNASLGTYHDLLKIIKDKDFLDNEENEDILEDIVLTLTLFEDREMIEERLKTYAHLFDDKVMKQLKRRRYTGWGRLSRKLINGIRDKQSGKTILDFLKSDGFANRNFMQLIHDDSLTFKEDIQKAQVSGQGDSLHEHIANLAGSPAIKKGILQTVKVVDELVKVMGRHKPENIVIEMARENQTTQKGQKNSRERMKRIEEGIKELGSQILKEHPVENTQLQNEKLYLYYLQNGRDMYVDQELDINRLSDYDVDHIVPQSFLKDDSIDNKVLTRSDKARGKSDNVPSEEVVKKMKNYWRQLLNAKLITQRKFDNLTKAERGGLSELDKAGFIKRQLVETRQITKHVAQILDSRMNTKYDENDKLIREVKVITLKSKLVSDFRKDFQFYKVREINNYHHAHDAYLNAVVGTALIKKYPKLESEFVYGDYKVYDVRKMIAKSEQEIGKATAKYFFYSNIMNFFKTEITLANGEIRKRPLIETNGETGEIVWDKGRDFATVRKVLSMPQVNIVKKTEVQTGGFSKESILPKRNSDKLIARKKDWDPKKYGGFDSPTVAYSVLVVAKVEKGKSKKLKSVKELLGITIMERSSFEKNPIDFLEAKGYKEVKKDLIIKLPKYSLFELENGRKRMLASAGELQKGNELALPSKYVNFLYLASHYEKLKGSPEDNEQKQLFVEQHKHYLDEIIEQISEFSKRVILADANLDKVLSAYNKHRDKPIREQAENIIHLFTLTNLGAPAAFKYFDTTIDRKRYTSTKEVLDATLIHQSITGLYETRIDLSQLGGDGGGGGEAAAKGSSGGTVSLQDEHRLFDIPVTTSLPDVWLQDFPQAWAETGGLGRAKCQAPIIIDLKPTAVPVSIKQYPMSLEAHMGIRQHIIKFLELGVLRPCRSPWNTPLLPVKKPGTQDYRPVQDLREINKRTVDIHPTVPNPYNLLSTLKPDYSWYTVLDLKDAFFCLPLAPQSQELFAFEWKDPERGISGQLTWTRLPQGFKNSPTLFNEALHRDLTDFRTQHPEVTLLQYVDDLLLAAPTKKACTQGTRHLLQELGEKGYRASAKKAQICQTKVTYLGYILSEGKRWLTPGRIETVARIPPPRNPREVREFLGTAGFCRLWIPGFAELAAPLYALTKPSTPFTWQTEHQLAFEALKKALLSAPALGLPDTSKPFTLFLDERQGIAKGVLTQKLGPWKRPVAYLSKKLDPVAAGWPPCLRIMAATAMLVKDSAKLTLGQPLTVITPHTLEAIVRQPPDRWITNARLTHYQALLLDTDRVQFGPPVTLNPATLLPVPENQPSPHDCRQVLAETHGTREDLKDQELPDADHTWYTDGSSYLDSGTRRAGAAVVDGHNTIWAQSLPPGTSAQKAELIALTKALELSKGKKANIYTDSRYAFATAHTHGSIYERRGWLTSEGKEIKNKAEIIALLKALFLPQEVAIIHCPGHQKGQDPVAVGNRQADRVARQAAMAEVLTLATEPDNTSHITAGKRTADGSEFEKRTADGSEFESPKKKAKVE

SEQ ID NO: 1575 - protein, 2102 aa, synthetic construct
  source 1..2102: note = Description of Artificial Sequence: Synthetic polypeptide
MPAAKRVKLDGGDKKYSIGLDIGTNSVGWAVITDEYKVPSKKFKVLGNTDRHSIKKNLIGALLFDSGETAEATRLKRTARRRYTRRKNRICYLQEIFSNEMAKVDDSFFHRLEESFLVEEDKKHERHPIFGNIVDEVAYHEKYPTIYHLRKKLVDSTDKADLRLIYLALAHMIKFRGHFLIEGDLNPDNSDVDKLFIQLVQTYNQLFEENPINASGVDAKAILSARLSKSRRLENLIAQLPGEKKNGLFGNLIALSLGLTPNFKSNFDLAEDAKLQLSKDTYDDDLDNLLAQIGDQYADLFLAAKNLSDAILLSDILRVNTEITKAPLSASMIKRYDEHHQDLTLLKALVRQQLPEKYKEIFFDQSKNGYAGYIDGGASQEEFYKFIKPILEKMDGTEELLVKLNREDLLRKQRTFDNGSIPHQIHLGELHAILRRQEDFYPFLKDNREKIEKILTFRIPYYVGPLARGNSRFAWMTRKSEETITPWNFEEVVDKGASAQSFIERMTNFDKNLPNEKVLPKHSLLYEYFTVYNELTKVKYVTEGMRKPAFLSGEQKKAIVDLLFKTNRKVTVKQLKEDYFKKIECFDSVEISGVEDRFNASLGTYHDLLKIIKDKDFLDNEENEDILEDIVLTLTLFEDREMIEERLKTYAHLFDDKVMKQLKRRRYTGWGRLSRKLINGIRDKQSGKTILDFLKSDGFANRNFMQLIHDDSLTFKEDIQKAQVSGQGDSLHEHIANLAGSPAIKKGILQTVKVVDELVKVMGRHKPENIVIEMARENQTTQKGQKNSRERMKRIEEGIKELGSQILKEHPVENTQLQNEKLYLYYLQNGRDMYVDQELDINRLSDYDVDHIVPQSFLKDDSIDNKVLTRSDKARGKSDNVPSEEVVKKMKNYWRQLLNAKLITQRKFDNLTKAERGGLSELDKAGFIKRQLVETRQITKHVAQILDSRMNTKYDENDKLIREVKVITLKSKLVSDFRKDFQFYKVREINNYHHAHDAYLNAVVGTALIKKYPKLESEFVYGDYKVYDVRKMIAKSEQEIGKATAKYFFYSNIMNFFKTEITLANGEIRKRPLIETNGETGEIVWDKGRDFATVRKVLSMPQVNIVKKTEVQTGGFSKESILPKRNSDKLIARKKDWDPKKYGGFDSPTVAYSVLVVAKVEKGKSKKLKSVKELLGITIMERSSFEKNPIDFLEAKGYKEVKKDLIIKLPKYSLFELENGRKRMLASAGELQKGNELALPSKYVNFLYLASHYEKLKGSPEDNEQKQLFVEQHKHYLDEIIEQISEFSKRVILADANLDKVLSAYNKHRDKPIREQAENIIHLFTLTNLGAPAAFKYFDTTIDRKRYTSTKEVLDATLIHQSITGLYETRIDLSQLGGDGGPAPEAAAKGSSGGTVSLQDEHRLFDIPVTTSLPDVWLQDFPQAWAETGGLGRAKCQAPIIIDLKPTAVPVSIKQYPMSLEAHMGIRQHIIKFLELGVLRPCRSPWNTPLLPVKKPGTQDYRPVQDLREINKRTVDIHPTVPNPYNLLSTLKPDYSWYTVLDLKDAFFCLPLAPQSQELFAFEWKDPERGISGQLTWTRLPQGFKNSPTLFNEALHRDLTDFRTQHPEVTLLQYVDDLLLAAPTKKACTQGTRHLLQELGEKGYRASAKKAQICQTKVTYLGYILSEGKRWLTPGRIETVARIPPPRNPREVREFLGTAGFCRLWIPGFAELAAPLYALTKPSTPFTWQTEHQLAFEALKKALLSAPALGLPDTSKPFTLFLDERQGIAKGVLTQKLGPWKRPVAYLSKKLDPVAAGWPPCLRIMAATAMLVKDSAKLTLGQPLTVITPHTLEAIVRQPPDRWITNARLTHYQALLLDTDRVQFGPPVTLNPATLLPVPENQPSPHDCRQVLAETHGTREDLKDQELPDADHTWYTDGSSYLDSGTRRAGAAVVDGHNTIWAQSLPPGTSAQKAELIALTKALELSKGKKANIYTDSRYAFATAHTHGSIYERRGWLTSEGKEIKNKAEIIALLKALFLPQEVAIIHCPGHQKGQDPVAVGNRQADRVARQAAMAEVLTLATEPDNTSHITAGKRTADGSEFEKRTADGSEFESPKKKAKVE

SEQ ID NO: 1576 - protein, 2102 aa, synthetic construct
  source 1..2102: note = Description of Artificial Sequence: Synthetic polypeptide
MPAAKRVKLDGGDKKYSIGLDIGTNSVGWAVITDEYKVPSKKFKVLGNTDRHSIKKNLIGALLFDSGETAEATRLKRTARRRYTRRKNRICYLQEIFSNEMAKVDDSFFHRLEESFLVEEDKKHERHPIFGNIVDEVAYHEKYPTIYHLRKKLVDSTDKADLRLIYLALAHMIKFRGHFLIEGDLNPDNSDVDKLFIQLVQTYNQLFEENPINASGVDAKAILSARLSKSRRLENLIAQLPGEKKNGLFGNLIALSLGLTPNFKSNFDLAEDAKLQLSKDTYDDDLDNLLAQIGDQYADLFLAAKNLSDAILLSDILRVNTEITKAPLSASMIKRYDEHHQDLTLLKALVRQQLPEKYKEIFFDQSKNGYAGYIDGGASQEEFYKFIKPILEKMDGTEELLVKLNREDLLRKQRTFDNGSIPHQIHLGELHAILRRQEDFYPFLKDNREKIEKILTFRIPYYVGPLARGNSRFAWMTRKSEETITPWNFEEVVDKGASAQSFIERMTNFDKNLPNEKVLPKHSLLYEYFTVYNELTKVKYVTEGMRKPAFLSGEQKKAIVDLLFKTNRKVTVKQLKEDYFKKIECFDSVEISGVEDRFNASLGTYHDLLKIIKDKDFLDNEENEDILEDIVLTLTLFEDREMIEERLKTYAHLFDDKVMKQLKRRRYTGWGRLSRKLINGIRDKQSGKTILDFLKSDGFANRNFMQLIHDDSLTFKEDIQKAQVSGQGDSLHEHIANLAGSPAIKKGILQTVKVVDELVKVMGRHKPENIVIEMARENQTTQKGQKNSRERMKRIEEGIKELGSQILKEHPVENTQLQNEKLYLYYLQNGRDMYVDQELDINRLSDYDVDHIVPQSFLKDDSIDNKVLTRSDKARGKSDNVPSEEVVKKMKNYWRQLLNAKLITQRKFDNLTKAERGGLSELDKAGFIKRQLVETRQITKHVAQILDSRMNTKYDENDKLIREVKVITLKSKLVSDFRKDFQFYKVREINNYHHAHDAYLNAVVGTALIKKYPKLESEFVYGDYKVYDVRKMIAKSEQEIGKATAKYFFYSNIMNFFKTEITLANGEIRKRPLIETNGETGEIVWDKGRDFATVRKVLSMPQVNIVKKTEVQTGGFSKESILPKRNSDKLIARKKDWDPKKYGGFDSPTVAYSVLVVAKVEKGKSKKLKSVKELLGITIMERSSFEKNPIDFLEAKGYKEVKKDLIIKLPKYSLFELENGRKRMLASAGELQKGNELALPSKYVNFLYLASHYEKLKGSPEDNEQKQLFVEQHKHYLDEIIEQISEFSKRVILADANLDKVLSAYNKHRDKPIREQAENIIHLFTLTNLGAPAAFKYFDTTIDRKRYTSTKEVLDATLIHQSITGLYETRIDLSQLGGDGGEAAAKGSSGGGGGTVSLQDEHRLFDIPVTTSLPDVWLQDFPQAWAETGGLGRAKCQAPIIIDLKPTAVPVSIKQYPMSLEAHMGIRQHIIKFLELGVLRPCRSPWNTPLLPVKKPGTQDYRPVQDLREINKRTVDIHPTVPNPYNLLSTLKPDYSWYTVLDLKDAFFCLPLAPQSQELFAFEWKDPERGISGQLTWTRLPQGFKNSPTLFNEALHRDLTDFRTQHPEVTLLQYVDDLLLAAPTKKACTQGTRHLLQELGEKGYRASAKKAQICQTKVTYLGYILSEGKRWLTPGRIETVARIPPPRNPREVREFLGTAGFCRLWIPGFAELAAPLYALTKPSTPFTWQTEHQLAFEALKKALLSAPALGLPDTSKPFTLFLDERQGIAKGVLTQKLGPWKRPVAYLSKKLDPVAAGWPPCLRIMAATAMLVKDSAKLTLGQPLTVITPHTLEAIVRQPPDRWITNARLTHYQALLLDTDRVQFGPPVTLNPATLLPVPENQPSPHDCRQVLAETHGTREDLKDQELPDADHTWYTDGSSYLDSGTRRAGAAVVDGHNTIWAQSLPPGTSAQKAELIALTKALELSKGKKANIYTDSRYAFATAHTHGSIYERRGWLTSEGKEIKNKAEIIALLKALFLPQEVAIIHCPGHQKGQDPVAVGNRQADRVARQAAMAEVLTLATEPDNTSHITAGKRTADGSEFEKRTADGSEFESPKKKAKVE

SEQ ID NO: 1577 - protein, 2102 aa, synthetic construct
  source 1..2102: note = Description of Artificial Sequence: Synthetic polypeptide
MPAAKRVKLDGGDKKYSIGLDIGTNSVGWAVITDEYKVPSKKFKVLGNTDRHSIKKNLIGALLFDSGETAEATRLKRTARRRYTRRKNRICYLQEIFSNEMAKVDDSFFHRLEESFLVEEDKKHERHPIFGNIVDEVAYHEKYPTIYHLRKKLVDSTDKADLRLIYLALAHMIKFRGHFLIEGDLNPDNSDVDKLFIQLVQTYNQLFEENPINASGVDAKAILSARLSKSRRLENLIAQLPGEKKNGLFGNLIALSLGLTPNFKSNFDLAEDAKLQLSKDTYDDDLDNLLAQIGDQYADLFLAAKNLSDAILLSDILRVNTEITKAPLSASMIKRYDEHHQDLTLLKALVRQQLPEKYKEIFFDQSKNGYAGYIDGGASQEEFYKFIKPILEKMDGTEELLVKLNREDLLRKQRTFDNGSIPHQIHLGELHAILRRQEDFYPFLKDNREKIEKILTFRIPYYVGPLARGNSRFAWMTRKSEETITPWNFEEVVDKGASAQSFIERMTNFDKNLPNEKVLPKHSLLYEYFTVYNELTKVKYVTEGMRKPAFLSGEQKKAIVDLLFKTNRKVTVKQLKEDYFKKIECFDSVEISGVEDRFNASLGTYHDLLKIIKDKDFLDNEENEDILEDIVLTLTLFEDREMIEERLKTYAHLFDDKVMKQLKRRRYTGWGRLSRKLINGIRDKQSGKTILDFLKSDGFANRNFMQLIHDDSLTFKEDIQKAQVSGQGDSLHEHIANLAGSPAIKKGILQTVKVVDELVKVMGRHKPENIVIEMARENQTTQKGQKNSRERMKRIEEGIKELGSQILKEHPVENTQLQNEKLYLYYLQNGRDMYVDQELDINRLSDYDVDHIVPQSFLKDDSIDNKVLTRSDKARGKSDNVPSEEVVKKMKNYWRQLLNAKLITQRKFDNLTKAERGGLSELDKAGFIKRQLVETRQITKHVAQILDSRMNTKYDENDKLIREVKVITLKSKLVSDFRKDFQFYKVREINNYHHAHDAYLNAVVGTALIKKYPKLESEFVYGDYKVYDVRKMIAKSEQEIGKATAKYFFYSNIMNFFKTEITLANGEIRKRPLIETNGETGEIVWDKGRDFATVRKVLSMPQVNIVKKTEVQTGGFSKESILPKRNSDKLIARKKDWDPKKYGGFDSPTVAYSVLVVAKVEKGKSKKLKSVKELLGITIMERSSFEKNPIDFLEAKGYKEVKKDLIIKLPKYSLFELENGRKRMLASAGELQKGNELALPSKYVNFLYLASHYEKLKGSPEDNEQKQLFVEQHKHYLDEIIEQISEFSKRVILADANLDKVLSAYNKHRDKPIREQAENIIHLFTLTNLGAPAAFKYFDTTIDRKRYTSTKEVLDATLIHQSITGLYETRIDLSQLGGDGGEAAAKGGGGGSGGTVSLQDEHRLFDIPVTTSLPDVWLQDFPQAWAETGGLGRAKCQAPIIIDLKPTAVPVSIKQYPMSLEAHMGIRQHIIKFLELGVLRPCRSPWNTPLLPVKKPGTQDYRPVQDLREINKRTVDIHPTVPNPYNLLSTLKPDYSWYTVLDLKDAFFCLPLAPQSQELFAFEWKDPERGISGQLTWTRLPQGFKNSPTLFNEALHRDLTDFRTQHPEVTLLQYVDDLLLAAPTKKACTQGTRHLLQELGEKGYRASAKKAQICQTKVTYLGYILSEGKRWLTPGRIETVARIPPPRNPREVREFLGTAGFCRLWIPGFAELAAPLYALTKPSTPFTWQTEHQLAFEALKKALLSAPALGLPDTSKPFTLFLDERQGIAKGVLTQKLGPWKRPVAYLSKKLDPVAAGWPPCLRIMAATAMLVKDSAKLTLGQPLTVITPHTLEAIVRQPPDRWITNARLTHYQALLLDTDRVQFGPPVTLNPATLLPVPENQPSPHDCRQVLAETHGTREDLKDQELPDADHTWYTDGSSYLDSGTRRAGAAVVDGHNTIWAQSLPPGTSAQKAELIALTKALELSKGKKANIYTDSRYAFATAHTHGSIYERRGWLTSEGKEIKNKAEIIALLKALFLPQEVAIIHCPGHQKGQDPVAVGNRQADRVARQAAMAEVLTLATEPDNTSHITAGKRTADGSEFEKRTADGSEFESPKKKAKVE

SEQ ID NO: 1578 - protein, 2100 aa, synthetic construct
  source 1..2100: note = Description of Artificial Sequence: Synthetic polypeptide
MPAAKRVKLDGGDKKYSIGLDIGTNSVGWAVITDEYKVPSKKFKVLGNTDRHSIKKNLIGALLFDSGETAEATRLKRTARRRYTRRKNRICYLQEIFSNEMAKVDDSFFHRLEESFLVEEDKKHERHPIFGNIVDEVAYHEKYPTIYHLRKKLVDSTDKADLRLIYLALAHMIKFRGHFLIEGDLNPDNSDVDKLFIQLVQTYNQLFEENPINASGVDAKAILSARLSKSRRLENLIAQLPGEKKNGLFGNLIALSLGLTPNFKSNFDLAEDAKLQLSKDTYDDDLDNLLAQIGDQYADLFLAAKNLSDAILLSDILRVNTEITKAPLSASMIKRYDEHHQDLTLLKALVRQQLPEKYKEIFFDQSKNGYAGYIDGGASQEEFYKFIKPILEKMDGTEELLVKLNREDLLRKQRTFDNGSIPHQIHLGELHAILRRQEDFYPFLKDNREKIEKILTFRIPYYVGPLARGNSRFAWMTRKSEETITPWNFEEVVDKGASAQSFIERMTNFDKNLPNEKVLPKHSLLYEYFTVYNELTKVKYVTEGMRKPAFLSGEQKKAIVDLLFKTNRKVTVKQLKEDYFKKIECFDSVEISGVEDRFNASLGTYHDLLKIIKDKDFLDNEENEDILEDIVLTLTLFEDREMIEERLKTYAHLFDDKVMKQLKRRRYTGWGRLSRKLINGIRDKQSGKTILDFLKSDGFANRNFMQLIHDDSLTFKEDIQKAQVSGQGDSLHEHIANLAGSPAIKKGILQTVKVVDELVKVMGRHKPENIVIEMARENQTTQKGQKNSRERMKRIEEGIKELGSQILKEHPVENTQLQNEKLYLYYLQNGRDMYVDQELDINRLSDYDVDHIVPQSFLKDDSIDNKVLTRSDKARGKSDNVPSEEVVKKMKNYWRQLLNAKLITQRKFDNLTKAERGGLSELDKAGFIKRQLVETRQITKHVAQILDSRMNTKYDENDKLIREVKVITLKSKLVSDFRKDFQFYKVREINNYHHAHDAYLNAVVGTALIKKYPKLESEFVYGDYKVYDVRKMIAKSEQEIGKATAKYFFYSNIMNFFKTEITLANGEIRKRPLIETNGETGEIVWDKGRDFATVRKVLSMPQVNIVKKTEVQTGGFSKESILPKRNSDKLIARKKDWDPKKYGGFDSPTVAYSVLVVAKVEKGKSKKLKSVKELLGITIMERSSFEKNPIDFLEAKGYKEVKKDLIIKLPKYSLFELENGRKRMLASAGELQKGNELALPSKYVNFLYLASHYEKLKGSPEDNEQKQLFVEQHKHYLDEIIEQISEFSKRVILADANLDKVLSAYNKHRDKPIREQAENIIHLFTLTNLGAPAAFKYFDTTIDRKRYTSTKEVLDATLIHQSITGLYETRIDLSQLGGDGGGGGGSSPAPGGTVSLQDEHRLFDIPVTTSLPDVWLQDFPQAWAETGGLGRAKCQAPIIIDLKPTAVPVSIKQYPMSLEAHMGIRQHIIKFLELGVLRPCRSPWNTPLLPVKKPGTQDYRPVQDLREINKRTVDIHPTVPNPYNLLSTLKPDYSWYTVLDLKDAFFCLPLAPQSQELFAFEWKDPERGISGQLTWTRLPQGFKNSPTLFNEALHRDLTDFRTQHPEVTLLQYVDDLLLAAPTKKACTQGTRHLLQELGEKGYRASAKKAQICQTKVTYLGYILSEGKRWLTPGRIETVARIPPPRNPREVREFLGTAGFCRLWIPGFAELAAPLYALTKPSTPFTWQTEHQLAFEALKKALLSAPALGLPDTSKPFTLFLDERQGIAKGVLTQKLGPWKRPVAYLSKKLDPVAAGWPPCLRIMAATAMLVKDSAKLTLGQPLTVITPHTLEAIVRQPPDRWITNARLTHYQALLLDTDRVQFGPPVTLNPATLLPVPENQPSPHDCRQVLAETHGTREDLKDQELPDADHTWYTDGSSYLDSGTRRAGAAVVDGHNTIWAQSLPPGTSAQKAELIALTKALELSKGKKANIYTDSRYAFATAHTHGSIYERRGWLTSEGKEIKNKAEIIALLKALFLPQEVAIIHCPGHQKGQDPVAVGNRQADRVARQAAMAEVLTLATEPDNTSHITAGKRTADGSEFEKRTADGSEFESPKKKAKVE

SEQ ID NO: 1579 - protein, 2102 aa, synthetic construct
  source 1..2102: note = Description of Artificial Sequence: Synthetic polypeptide
MPAAKRVKLDGGDKKYSIGLDIGTNSVGWAVITDEYKVPSKKFKVLGNTDRHSIKKNLIGALLFDSGETAEATRLKRTARRRYTRRKNRICYLQEIFSNEMAKVDDSFFHRLEESFLVEEDKKHERHPIFGNIVDEVAYHEKYPTIYHLRKKLVDSTDKADLRLIYLALAHMIKFRGHFLIEGDLNPDNSDVDKLFIQLVQTYNQLFEENPINASGVDAKAILSARLSKSRRLENLIAQLPGEKKNGLFGNLIALSLGLTPNFKSNFDLAEDAKLQLSKDTYDDDLDNLLAQIGDQYADLFLAAKNLSDAILLSDILRVNTEITKAPLSASMIKRYDEHHQDLTLLKALVRQQLPEKYKEIFFDQSKNGYAGYIDGGASQEEFYKFIKPILEKMDGTEELLVKLNREDLLRKQRTFDNGSIPHQIHLGELHAILRRQEDFYPFLKDNREKIEKILTFRIPYYVGPLARGNSRFAWMTRKSEETITPWNFEEVVDKGASAQSFIERMTNFDKNLPNEKVLPKHSLLYEYFTVYNELTKVKYVTEGMRKPAFLSGEQKKAIVDLLFKTNRKVTVKQLKEDYFKKIECFDSVEISGVEDRFNASLGTYHDLLKIIKDKDFLDNEENEDILEDIVLTLTLFEDREMIEERLKTYAHLFDDKVMKQLKRRRYTGWGRLSRKLINGIRDKQSGKTILDFLKSDGFANRNFMQLIHDDSLTFKEDIQKAQVSGQGDSLHEHIANLAGSPAIKKGILQTVKVVDELVKVMGRHKPENIVIEMARENQTTQKGQKNSRERMKRIEEGIKELGSQILKEHPVENTQLQNEKLYLYYLQNGRDMYVDQELDINRLSDYDVDHIVPQSFLKDDSIDNKVLTRSDKARGKSDNVPSEEVVKKMKNYWRQLLNAKLITQRKFDNLTKAERGGLSELDKAGFIKRQLVETRQITKHVAQILDSRMNTKYDENDKLIREVKVITLKSKLVSDFRKDFQFYKVREINNYHHAHDAYLNAVVGTALIKKYPKLESEFVYGDYKVYDVRKMIAKSEQEIGKATAKYFFYSNIMNFFKTEITLANGEIRKRPLIETNGETGEIVWDKGRDFATVRKVLSMPQVNIVKKTEVQTGGFSKESILPKRNSDKLIARKKDWDPKKYGGFDSPTVAYSVLVVAKVEKGKSKKLKSVKELLGITIMERSSFEKNPIDFLEAKGYKEVKKDLIIKLPKYSLFELENGRKRMLASAGELQKGNELALPSKYVNFLYLASHYEKLKGSPEDNEQKQLFVEQHKHYLDEIIEQISEFSKRVILADANLDKVLSAYNKHRDKPIREQAENIIHLFTLTNLGAPAAFKYFDTTIDRKRYTSTKEVLDATLIHQSITGLYETRIDLSQLGGDGGEAAAKPAPGGSGGTVSLQDEHRLFDIPVTTSLPDVWLQDFPQAWAETGGLGRAKCQAPIIIDLKPTAVPVSIKQYPMSLEAHMGIRQHIIKFLELGVLRPCRSPWNTPLLPVKKPGTQDYRPVQDLREINKRTVDIHPTVPNPYNLLSTLKPDYSWYTVLDLKDAFFCLPLAPQSQELFAFEWKDPERGISGQLTWTRLPQGFKNSPTLFNEALHRDLTDFRTQHPEVTLLQYVDDLLLAAPTKKACTQGTRHLLQELGEKGYRASAKKAQICQTKVTYLGYILSEGKRWLTPGRIETVARIPPPRNPREVREFLGTAGFCRLWIPGFAELAAPLYALTKPSTPFTWQTEHQLAFEALKKALLSAPALGLPDTSKPFTLFLDERQGIAKGVLTQKLGPWKRPVAYLSKKLDPVAAGWPPCLRIMAATAMLVKDSAKLTLGQPLTVITPHTLEAIVRQPPDRWITNARLTHYQALLLDTDRVQFGPPVTLNPATLLPVPENQPSPHDCRQVLAETHGTREDLKDQELPDADHTWYTDGSSYLDSGTRRAGAAVVDGHNTIWAQSLPPGTSAQKAELIALTKALELSKGKKANIYTDSRYAFATAHTHGSIYERRGWLTSEGKEIKNKAEIIALLKALFLPQEVAIIHCPGHQKGQDPVAVGNRQADRVARQAAMAEVLTLATEPDNTSHITAGKRTADGSEFEKRTADGSEFESPKKKAKVE

SEQ ID NO: 1580 - protein, 2102 aa, synthetic construct
  source 1..2102: note = Description of Artificial Sequence: Synthetic polypeptide
MPAAKRVKLDGGDKKYSIGLDIGTNSVGWAVITDEYKVPSKKFKVLGNTDRHSIKKNLIGALLFDSGETAEATRLKRTARRRYTRRKNRICYLQEIFSNEMAKVDDSFFHRLEESFLVEEDKKHERHPIFGNIVDEVAYHEKYPTIYHLRKKLVDSTDKADLRLIYLALAHMIKFRGHFLIEGDLNPDNSDVDKLFIQLVQTYNQLFEENPINASGVDAKAILSARLSKSRRLENLIAQLPGEKKNGLFGNLIALSLGLTPNFKSNFDLAEDAKLQLSKDTYDDDLDNLLAQIGDQYADLFLAAKNLSDAILLSDILRVNTEITKAPLSASMIKRYDEHHQDLTLLKALVRQQLPEKYKEIFFDQSKNGYAGYIDGGASQEEFYKFIKPILEKMDGTEELLVKLNREDLLRKQRTFDNGSIPHQIHLGELHAILRRQEDFYPFLKDNREKIEKILTFRIPYYVGPLARGNSRFAWMTRKSEETITPWNFEEVVDKGASAQSFIERMTNFDKNLPNEKVLPKHSLLYEYFTVYNELTKVKYVTEGMRKPAFLSGEQKKAIVDLLFKTNRKVTVKQLKEDYFKKIECFDSVEISGVEDRFNASLGTYHDLLKIIKDKDFLDNEENEDILEDIVLTLTLFEDREMIEERLKTYAHLFDDKVMKQLKRRRYTGWGRLSRKLINGIRDKQSGKTILDFLKSDGFANRNFMQLIHDDSLTFKEDIQKAQVSGQGDSLHEHIANLAGSPAIKKGILQTVKVVDELVKVMGRHKPENIVIEMARENQTTQKGQKNSRERMKRIEEGIKELGSQILKEHPVENTQLQNEKLYLYYLQNGRDMYVDQELDINRLSDYDVDHIVPQSFLKDDSIDNKVLTRSDKARGKSDNVPSEEVVKKMKNYWRQLLNAKLITQRKFDNLTKAERGGLSELDKAGFIKRQLVETRQITKHVAQILDSRMNTKYDENDKLIREVKVITLKSKLVSDFRKDFQFYKVREINNYHHAHDAYLNAVVGTALIKKYPKLESEFVYGDYKVYDVRKMIAKSEQEIGKATAKYFFYSNIMNFFKTEITLANGEIRKRPLIETNGETGEIVWDKGRDFATVRKVLSMPQVNIVKKTEVQTGGFSKESILPKRNSDKLIARKKDWDPKKYGGFDSPTVAYSVLVVAKVEKGKSKKLKSVKELLGITIMERSSFEKNPIDFLEAKGYKEVKKDLIIKLPKYSLFELENGRKRMLASAGELQKGNELALPSKYVNFLYLASHYEKLKGSPEDNEQKQLFVEQHKHYLDEIIEQISEFSKRVILADANLDKVLSAYNKHRDKPIREQAENIIHLFTLTNLGAPAAFKYFDTTIDRKRYTSTKEVLDATLIHQSITGLYETRIDLSQLGGDGGPAPGGGEAAAKGGTVSLQDEHRLFDIPVTTSLPDVWLQDFPQAWAETGGLGRAKCQAPIIIDLKPTAVPVSIKQYPMSLEAHMGIRQHIIKFLELGVLRPCRSPWNTPLLPVKKPGTQDYRPVQDLREINKRTVDIHPTVPNPYNLLSTLKPDYSWYTVLDLKDAFFCLPLAPQSQELFAFEWKDPERGISGQLTWTRLPQGFKNSPTLFNEALHRDLTDFRTQHPEVTLLQYVDDLLLAAPTKKACTQGTRHLLQELGEKGYRASAKKAQICQTKVTYLGYILSEGKRWLTPGRIETVARIPPPRNPREVREFLGTAGFCRLWIPGFAELAAPLYALTKPSTPFTWQTEHQLAFEALKKALLSAPALGLPDTSKPFTLFLDERQGIAKGVLTQKLGPWKRPVAYLSKKLDPVAAGWPPCLRIMAATAMLVKDSAKLTLGQPLTVITPHTLEAIVRQPPDRWITNARLTHYQALLLDTDRVQFGPPVTLNPATLLPVPENQPSPHDCRQVLAETHGTREDLKDQELPDADHTWYTDGSSYLDSGTRRAGAAVVDGHNTIWAQSLPPGTSAQKAELIALTKALELSKGKKANIYTDSRYAFATAHTHGSIYERRGWLTSEGKEIKNKAEIIALLKALFLPQEVAIIHCPGHQKGQDPVAVGNRQADRVARQAAMAEVLTLATEPDNTSHITAGKRTADGSEFEKRTADGSEFESPKKKAKVE

SEQ ID NO: 1581 - protein, 2102 aa, synthetic construct
  source 1..2102: note = Description of Artificial Sequence: Synthetic polypeptide
MPAAKRVKLDGGDKKYSIGLDIGTNSVGWAVITDEYKVPSKKFKVLGNTDRHSIKKNLIGALLFDSGETAEATRLKRTARRRYTRRKNRICYLQEIFSNEMAKVDDSFFHRLEESFLVEEDKKHERHPIFGNIVDEVAYHEKYPTIYHLRKKLVDSTDKADLRLIYLALAHMIKFRGHFLIEGDLNPDNSDVDKLFIQLVQTYNQLFEENPINASGVDAKAILSARLSKSRRLENLIAQLPGEKKNGLFGNLIALSLGLTPNFKSNFDLAEDAKLQLSKDTYDDDLDNLLAQIGDQYADLFLAAKNLSDAILLSDILRVNTEITKAPLSASMIKRYDEHHQDLTLLKALVRQQLPEKYKEIFFDQSKNGYAGYIDGGASQEEFYKFIKPILEKMDGTEELLVKLNREDLLRKQRTFDNGSIPHQIHLGELHAILRRQEDFYPFLKDNREKIEKILTFRIPYYVGPLARGNSRFAWMTRKSEETITPWNFEEVVDKGASAQSFIERMTNFDKNLPNEKVLPKHSLLYEYFTVYNELTKVKYVTEGMRKPAFLSGEQKKAIVDLLFKTNRKVTVKQLKEDYFKKIECFDSVEISGVEDRFNASLGTYHDLLKIIKDKDFLDNEENEDILEDIVLTLTLFEDREMIEERLKTYAHLFDDKVMKQLKRRRYTGWGRLSRKLINGIRDKQSGKTILDFLKSDGFANRNFMQLIHDDSLTFKEDIQKAQVSGQGDSLHEHIANLAGSPAIKKGILQTVKVVDELVKVMGRHKPENIVIEMARENQTTQKGQKNSRERMKRIEEGIKELGSQILKEHPVENTQLQNEKLYLYYLQNGRDMYVDQELDINRLSDYDVDHIVPQSFLKDDSIDNKVLTRSDKARGKSDNVPSEEVVKKMKNYWRQLLNAKLITQRKFDNLTKAERGGLSELDKAGFIKRQLVETRQITKHVAQILDSRMNTKYDENDKLIREVKVITLKSKLVSDFRKDFQFYKVREINNYHHAHDAYLNAVVGTALIKKYPKLESEFVYGDYKVYDVRKMIAKSEQEIGKATAKYFFYSNIMNFFKTEITLANGEIRKRPLIETNGETGEIVWDKGRDFATVRKVLSMPQVNIVKKTEVQTGGFSKESILPKRNSDKLIARKKDWDPKKYGGFDSPTVAYSVLVVAKVEKGKSKKLKSVKELLGITIMERSSFEKNPIDFLEAKGYKEVKKDLIIKLPKYSLFELENGRKRMLASAGELQKGNELALPSKYVNFLYLASHYEKLKGSPEDNEQKQLFVEQHKHYLDEIIEQISEFSKRVILADANLDKVLSAYNKHRDKPIREQAENIIHLFTLTNLGAPAAFKYFDTTIDRKRYTSTKEVLDATLIHQSITGLYETRIDLSQLGGDGGPAPEAAAKGGGGGTVSLQDEHRLFDIPVTTSLPDVWLQDFPQAWAETGGLGRAKCQAPIIIDLKPTAVPVSIKQYPMSLEAHMGIRQHIIKFLELGVLRPCRSPWNTPLLPVKKPGTQDYRPVQDLREINKRTVDIHPTVPNPYNLLSTLKPDYSWYTVLDLKDAFFCLPLAPQSQELFAFEWKDPERGISGQLTWTRLPQGFKNSPTLFNEALHRDLTDFRTQHPEVTLLQYVDDLLLAAPTKKACTQGTRHLLQELGEKGYRASAKKAQICQTKVTYLGYILSEGKRWLTPGRIETVARIPPPRNPREVREFLGTAGFCRLWIPGFAELAAPLYALTKPSTPFTWQTEHQLAFEALKKALLSAPALGLPDTSKPFTLFLDERQGIAKGVLTQKLGPWKRPVAYLSKKLDPVAAGWPPCLRIMAATAMLVKDSAKLTLGQPLTVITPHTLEAIVRQPPDRWITNARLTHYQALLLDTDRVQFGPPVTLNPATLLPVPENQPSPHDCRQVLAETHGTREDLKDQELPDADHTWYTDGSSYLDSGTRRAGAAVVDGHNTIWAQSLPPGTSAQKAELIALTKALELSKGKKANIYTDSRYAFATAHTHGSIYERRGWLTSEGKEIKNKAEIIALLKALFLPQEVAIIHCPGHQKGQDPVAVGNRQADRVARQAAMAEVLTLATEPDNTSHITAGKRTADGSEFEKRTADGSEFESPKKKAKVE

SEQ ID NO: 1582 - protein, 2100 aa, synthetic construct
  source 1..2100: note = Description of Artificial Sequence: Synthetic polypeptide
MPAAKRVKLDGGDKKYSIGLDIGTNSVGWAVITDEYKVPSKKFKVLGNTDRHSIKKNLIGALLFDSGETAEATRLKRTARRRYTRRKNRICYLQEIFSNEMAKVDDSFFHRLEESFLVEEDKKHERHPIFGNIVDEVAYHEKYPTIYHLRKKLVDSTDKADLRLIYLALAHMIKFRGHFLIEGDLNPDNSDVDKLFIQLVQTYNQLFEENPINASGVDAKAILSARLSKSRRLENLIAQLPGEKKNGLFGNLIALSLGLTPNFKSNFDLAEDAKLQLSKDTYDDDLDNLLAQIGDQYADLFLAAKNLSDAILLSDILRVNTEITKAPLSASMIKRYDEHHQDLTLLKALVRQQLPEKYKEIFFDQSKNGYAGYIDGGASQEEFYKFIKPILEKMDGTEELLVKLNREDLLRKQRTFDNGSIPHQIHLGELHAILRRQEDFYPFLKDNREKIEKILTFRIPYYVGPLARGNSRFAWMTRKSEETITPWNFEEVVDKGASAQSFIERMTNFDKNLPNEKVLPKHSLLYEYFTVYNELTKVKYVTEGMRKPAFLSGEQKKAIVDLLFKTNRKVTVKQLKEDYFKKIECFDSVEISGVEDRFNASLGTYHDLLKIIKDKDFLDNEENEDILEDIVLTLTLFEDREMIEERLKTYAHLFDDKVMKQLKRRRYTGWGRLSRKLINGIRDKQSGKTILDFLKSDGFANRNFMQLIHDDSLTFKEDIQKAQVSGQGDSLHEHIANLAGSPAIKKGILQTVKVVDELVKVMGRHKPENIVIEMARENQTTQKGQKNSRERMKRIEEGIKELGSQILKEHPVENTQLQNEKLYLYYLQNGRDMYVDQELDINRLSDYDVDHIVPQSFLKDDSIDNKVLTRSDKARGKSDNVPSEEVVKKMKNYWRQLLNAKLITQRKFDNLTKAERGGLSELDKAGFIKRQLVETRQITKHVAQILDSRMNTKYDENDKLIREVKVITLKSKLVSDFRKDFQFYKVREINNYHHAHDAYLNAVVGTALIKKYPKLESEFVYGDYKVYDVRKMIAKSEQEIGKATAKYFFYSNIMNFFKTEITLANGEIRKRPLIETNGETGEIVWDKGRDFATVRKVLSMPQVNIVKKTEVQTGGFSKESILPKRNSDKLIARKKDWDPKKYGGFDSPTVAYSVLVVAKVEKGKSKKLKSVKELLGITIMERSSFEKNPIDFLEAKGYKEVKKDLIIKLPKYSLFELENGRKRMLASAGELQKGNELALPSKYVNFLYLASHYEKLKGSPEDNEQKQLFVEQHKHYLDEIIEQISEFSKRVILADANLDKVLSAYNKHRDKPIREQAENIIHLFTLTNLGAPAAFKYFDTTIDRKRYTSTKEVLDATLIHQSITGLYETRIDLSQLGGDGGGSSGSSGSSGGTVSLQDEHRLFDIPVTTSLPDVWLQDFPQAWAETGGLGRAKCQAPIIIDLKPTAVPVSIKQYPMSLEAHMGIRQHIIKFLELGVLRPCRSPWNTPLLPVKKPGTQDYRPVQDLREINKRTVDIHPTVPNPYNLLSTLKPDYSWYTVLDLKDAFFCLPLAPQSQELFAFEWKDPERGISGQLTWTRLPQGFKNSPTLFNEALHRDLTDFRTQHPEVTLLQYVDDLLLAAPTKKACTQGTRHLLQELGEKGYRASAKKAQICQTKVTYLGYILSEGKRWLTPGRIETVARIPPPRNPREVREFLGTAGFCRLWIPGFAELAAPLYALTKPSTPFTWQTEHQLAFEALKKALLSAPALGLPDTSKPFTLFLDERQGIAKGVLTQKLGPWKRPVAYLSKKLDPVAAGWPPCLRIMAATAMLVKDSAKLTLGQPLTVITPHTLEAIVRQPPDRWITNARLTHYQALLLDTDRVQFGPPVTLNPATLLPVPENQPSPHDCRQVLAETHGTREDLKDQELPDADHTWYTDGSSYLDSGTRRAGAAVVDGHNTIWAQSLPPGTSAQKAELIALTKALELSKGKKANIYTDSRYAFATAHTHGSIYERRGWLTSEGKEIKNKAEIIALLKALFLPQEVAIIHCPGHQKGQDPVAVGNRQADRVARQAAMAEVLTLATEPDNTSHITAGKRTADGSEFEKRTADGSEFESPKKKAKVE

SEQ ID NO: 1583 - protein, 2099 aa, synthetic construct
  source 1..2099: note = Description of Artificial Sequence: Synthetic polypeptide
MPAAKRVKLDGGDKKYSIGLDIGTNSVGWAVITDEYKVPSKKFKVLGNTDRHSIKKNLIGALLFDSGETAEATRLKRTARRRYTRRKNRICYLQEIFSNEMAKVDDSFFHRLEESFLVEEDKKHERHPIFGNIVDEVAYHEKYPTIYHLRKKLVDSTDKADLRLIYLALAHMIKFRGHFLIEGDLNPDNSDVDKLFIQLVQTYNQLFEENPINASGVDAKAILSARLSKSRRLENLIAQLPGEKKNGLFGNLIALSLGLTPNFKSNFDLAEDAKLQLSKDTYDDDLDNLLAQIGDQYADLFLAAKNLSDAILLSDILRVNTEITKAPLSASMIKRYDEHHQDLTLLKALVRQQLPEKYKEIFFDQSKNGYAGYIDGGASQEEFYKFIKPILEKMDGTEELLVKLNREDLLRKQRTFDNGSIPHQIHLGELHAILRRQEDFYPFLKDNREKIEKILTFRIPYYVGPLARGNSRFAWMTRKSEETITPWNFEEVVDKGASAQSFIERMTNFDKNLPNEKVLPKHSLLYEYFTVYNELTKVKYVTEGMRKPAFLSGEQKKAIVDLLFKTNRKVTVKQLKEDYFKKIECFDSVEISGVEDRFNASLGTYHDLLKIIKDKDFLDNEENEDILEDIVLTLTLFEDREMIEERLKTYAHLFDDKVMKQLKRRRYTGWGRLSRKLINGIRDKQSGKTILDFLKSDGFANRNFMQLIHDDSLTFKEDIQKAQVSGQGDSLHEHIANLAGSPAIKKGILQTVKVVDELVKVMGRHKPENIVIEMARENQTTQKGQKNSRERMKRIEEGIKELGSQILKEHPVENTQLQNEKLYLYYLQNGRDMYVDQELDINRLSDYDVDHIVPQSFLKDDSIDNKVLTRSDKARGKSDNVPSEEVVKKMKNYWRQLLNAKLITQRKFDNLTKAERGGLSELDKAGFIKRQLVETRQITKHVAQILDSRMNTKYDENDKLIREVKVITLKSKLVSDFRKDFQFYKVREINNYHHAHDAYLNAVVGTALIKKYPKLESEFVYGDYKVYDVRKMIAKSEQEIGKATAKYFFYSNIMNFFKTEITLANGEIRKRPLIETNGETGEIVWDKGRDFATVRKVLSMPQVNIVKKTEVQTGGFSKESILPKRNSDKLIARKKDWDPKKYGGFDSPTVAYSVLVVAKVEKGKSKKLKSVKELLGITIMERSSFEKNPIDFLEAKGYKEVKKDLIIKLPKYSLFELENGRKRMLASAGELQKGNELALPSKYVNFLYLASHYEKLKGSPEDNEQKQLFVEQHKHYLDEIIEQISEFSKRVILADANLDKVLSAYNKHRDKPIREQAENIIHLFTLTNLGAPAAFKYFDTTIDRKRYTSTKEVLDATLIHQSITGLYETRIDLSQLGGDGGEAAAKGSSGGTVSLQDEHRLFDIPVTTSLPDVWLQDFPQAWAETGGLGRAKCQAPIIIDLKPTAVPVSIKQYPMSLEAHMGIRQHIIKFLELGVLRPCRSPWNTPLLPVKKPGTQDYRPVQDLREINKRTVDIHPTVPNPYNLLSTLKPDYSWYTVLDLKDAFFCLPLAPQSQELFAFEWKDPERGISGQLTWTRLPQGFKNSPTLFNEALHRDLTDFRTQHPEVTLLQYVDDLLLAAPTKKACTQGTRHLLQELGEKGYRASAKKAQICQTKVTYLGYILSEGKRWLTPGRIETVARIPPPRNPREVREFLGTAGFCRLWIPGFAELAAPLYALTKPSTPFTWQTEHQLAFEALKKALLSAPALGLPDTSKPFTLFLDERQGIAKGVLTQKLGPWKRPVAYLSKKLDPVAAGWPPCLRIMAATAMLVKDSAKLTLGQPLTVITPHTLEAIVRQPPDRWITNARLTHYQALLLDTDRVQFGPPVTLNPATLLPVPENQPSPHDCRQVLAETHGTREDLKDQELPDADHTWYTDGSSYLDSGTRRAGAAVVDGHNTIWAQSLPPGTSAQKAELIALTKALELSKGKKANIYTDSRYAFATAHTHGSIYERRGWLTSEGKEIKNKAEIIALLKALFLPQEVAIIHCPGHQKGQDPVAVGNRQADRVARQAAMAEVLTLATEPDNTSHITAGKRTADGSEFEKRTADGSEFESPKKKAKVE

SEQ ID NO: 1584 - protein, 2100 aa, synthetic construct
  source 1..2100: note = Description of Artificial Sequence: Synthetic polypeptide
MPAAKRVKLDGGDKKYSIGLDIGTNSVGWAVITDEYKVPSKKFKVLGNTDRHSIKKNLIGALLFDSGETAEATRLKRTARRRYTRRKNRICYLQEIFSNEMAKVDDSFFHRLEESFLVEEDKKHERHPIFGNIVDEVAYHEKYPTIYHLRKKLVDSTDKADLRLIYLALAHMIKFRGHFLIEGDLNPDNSDVDKLFIQLVQTYNQLFEENPINASGVDAKAILSARLSKSRRLENLIAQLPGEKKNGLFGNLIALSLGLTPNFKSNFDLAEDAKLQLSKDTYDDDLDNLLAQIGDQYADLFLAAKNLSDAILLSDILRVNTEITKAPLSASMIKRYDEHHQDLTLLKALVRQQLPEKYKEIFFDQSKNGYAGYIDGGASQEEFYKFIKPILEKMDGTEELLVKLNREDLLRKQRTFDNGSIPHQIHLGELHAILRRQEDFYPFLKDNREKIEKILTFRIPYYVGPLARGNSRFAWMTRKSEETITPWNFEEVVDKGASAQSFIERMTNFDKNLPNEKVLPKHSLLYEYFTVYNELTKVKYVTEGMRKPAFLSGEQKKAIVDLLFKTNRKVTVKQLKEDYFKKIECFDSVEISGVEDRFNASLGTYHDLLKIIKDKDFLDNEENEDILEDIVLTLTLFEDREMIEERLKTYAHLFDDKVMKQLKRRRYTGWGRLSRKLINGIRDKQSGKTILDFLKSDGFANRNFMQLIHDDSLTFKEDIQKAQVSGQGDSLHEHIANLAGSPAIKKGILQTVKVVDELVKVMGRHKPENIVIEMARENQTTQKGQKNSRERMKRIEEGIKELGSQILKEHPVENTQLQNEKLYLYYLQNGRDMYVDQELDINRLSDYDVDHIVPQSFLKDDSIDNKVLTRSDKARGKSDNVPSEEVVKKMKNYWRQLLNAKLITQRKFDNLTKAERGGLSELDKAGFIKRQLVETRQITKHVAQILDSRMNTKYDENDKLIREVKVITLKSKLVSDFRKDFQFYKVREINNYHHAHDAYLNAVVGTALIKKYPKLESEFVYGDYKVYDVRKMIAKSEQEIGKATAKYFFYSNIMNFFKTEITLANGEIRKRPLIETNGETGEIVWDKGRDFATVRKVLSMPQVNIVKKTEVQTGGFSKESILPKRNSDKLIARKKDWDPKKYGGFDSPTVAYSVLVVAKVEKGKSKKLKSVKELLGITIMERSSFEKNPIDFLEAKGYKEVKKDLIIKLPKYSLFELENGRKRMLASAGELQKGNELALPSKYVNFLYLASHYEKLKGSPEDNEQKQLFVEQHKHYLDEIIEQISEFSKRVILADANLDKVLSAYNKHRDKPIREQAENIIHLFTLTNLGAPAAFKYFDTTIDRKRYTSTKEVLDATLIHQSITGLYETRIDLSQLGGDGGGSSGGSPAPGGTVSLQDEHRLFDIPVTTSLPDVWLQDFPQAWAETGGLGRAKCQAPIIIDLKPTAVPVSIKQYPMSLEAHMGIRQHIIKFLELGVLRPCRSPWNTPLLPVKKPGTQDYRPVQDLREINKRTVDIHPTVPNPYNLLSTLKPDYSWYTVLDLKDAFFCLPLAPQSQELFAFEWKDPERGISGQLTWTRLPQGFKNSPTLFNEALHRDLTDFRTQHPEVTLLQYVDDLLLAAPTKKACTQGTRHLLQELGEKGYRASAKKAQICQTKVTYLGYILSEGKRWLTPGRIETVARIPPPRNPREVREFLGTAGFCRLWIPGFAELAAPLYALTKPSTPFTWQTEHQLAFEALKKALLSAPALGLPDTSKPFTLFLDERQGIAKGVLTQKLGPWKRPVAYLSKKLDPVAAGWPPCLRIMAATAMLVKDSAKLTLGQPLTVITPHTLEAIVRQPPDRWITNARLTHYQALLLDTDRVQFGPPVTLNPATLLPVPENQPSPHDCRQVLAETHGTREDLKDQELPDADHTWYTDGSSYLDSGTRRAGAAVVDGHNTIWAQSLPPGTSAQKAELIALTKALELSKGKKANIYTDSRYAFATAHTHGSIYERRGWLTSEGKEIKNKAEIIALLKALFLPQEVAIIHCPGHQKGQDPVAVGNRQADRVARQAAMAEVLTLATEPDNTSHITAGKRTADGSEFEKRTADGSEFESPKKKAKVE

SEQ ID NO: 1585 - protein, 2102 aa, synthetic construct
  source 1..2102: note = Description of Artificial Sequence: Synthetic polypeptide
MPAAKRVKLDGGDKKYSIGLDIGTNSVGWAVITDEYKVPSKKFKVLGNTDRHSIKKNLIGALLFDSGETAEATRLKRTARRRYTRRKNRICYLQEIFSNEMAKVDDSFFHRLEESFLVEEDKKHERHPIFGNIVDEVAYHEKYPTIYHLRKKLVDSTDKADLRLIYLALAHMIKFRGHFLIEGDLNPDNSDVDKLFIQLVQTYNQLFEENPINASGVDAKAILSARLSKSRRLENLIAQLPGEKKNGLFGNLIALSLGLTPNFKSNFDLAEDAKLQLSKDTYDDDLDNLLAQIGDQYADLFLAAKNLSDAILLSDILRVNTEITKAPLSASMIKRYDEHHQDLTLLKALVRQQLPEKYKEIFFDQSKNGYAGYIDGGASQEEFYKFIKPILEKMDGTEELLVKLNREDLLRKQRTFDNGSIPHQIHLGELHAILRRQEDFYPFLKDNREKIEKILTFRIPYYVGPLARGNSRFAWMTRKSEETITPWNFEEVVDKGASAQSFIERMTNFDKNLPNEKVLPKHSLLYEYFTVYNELTKVKYVTEGMRKPAFLSGEQKKAIVDLLFKTNRKVTVKQLKEDYFKKIECFDSVEISGVEDRFNASLGTYHDLLKIIKDKDFLDNEENEDILEDIVLTLTLFEDREMIEERLKTYAHLFDDKVMKQLKRRRYTGWGRLSRKLINGIRDKQSGKTILDFLKSDGFANRNFMQLIHDDSLTFKEDIQKAQVSGQGDSLHEHIANLAGSPAIKKGILQTVKVVDELVKVMGRHKPENIVIEMARENQTTQKGQKNSRERMKRIEEGIKELGSQILKEHPVENTQLQNEKLYLYYLQNGRDMYVDQELDINRLSDYDVDHIVPQSFLKDDSIDNKVLTRSDKARGKSDNVPSEEVVKKMKNYWRQLLNAKLITQRKFDNLTKAERGGLSELDKAGFIKRQLVETRQITKHVAQILDSRMNTKYDENDKLIREVKVITLKSKLVSDFRKDFQFYKVREINNYHHAHDAYLNAVVGTALIKKYPKLESEFVYGDYKVYDVRKMIAKSEQEIGKATAKYFFYSNIMNFFKTEITLANGEIRKRPLIETNGETGEIVWDKGRDFATVRKVLSMPQVNIVKKTEVQTGGFSKESILPKRNSDKLIARKKDWDPKKYGGFDSPTVAYSVLVVAKVEKGKSKKLKSVKELLGITIMERSSFEKNPIDFLEAKGYKEVKKDLIIKLPKYSLFELENGRKRMLASAGELQKGNELALPSKYVNFLYLASHYEKLKGSPEDNEQKQLFVEQHKHYLDEIIEQISEFSKRVILADANLDKVLSAYNKHRDKPIREQAENIIHLFTLTNLGAPAAFKYFDTTIDRKRYTSTKEVLDATLIHQSITGLYETRIDLSQLGGDGGGGGEAAAKGGSGGTVSLQDEHRLFDIPVTTSLPDVWLQDFPQAWAETGGLGRAKCQAPIIIDLKPTAVPVSIKQYPMSLEAHMGIRQHIIKFLELGVLRPCRSPWNTPLLPVKKPGTQDYRPVQDLREINKRTVDIHPTVPNPYNLLSTLKPDYSWYTVLDLKDAFFCLPLAPQSQELFAFEWKDPERGISGQLTWTRLPQGFKNSPTLFNEALHRDLTDFRTQHPEVTLLQYVDDLLLAAPTKKACTQGTRHLLQELGEKGYRASAKKAQICQTKVTYLGYILSEGKRWLTPGRIETVARIPPPRNPREVREFLGTAGFCRLWIPGFAELAAPLYALTKPSTPFTWQTEHQLAFEALKKALLSAPALGLPDTSKPFTLFLDERQGIAKGVLTQKLGPWKRPVAYLSKKLDPVAAGWPPCLRIMAATAMLVKDSAKLTLGQPLTVITPHTLEAIVRQPPDRWITNARLTHYQALLLDTDRVQFGPPVTLNPATLLPVPENQPSPHDCRQVLAETHGTREDLKDQELPDADHTWYTDGSSYLDSGTRRAGAAVVDGHNTIWAQSLPPGTSAQKAELIALTKALELSKGKKANIYTDSRYAFATAHTHGSIYERRGWLTSEGKEIKNKAEIIALLKALFLPQEVAIIHCPGHQKGQDPVAVGNRQADRVARQAAMAEVLTLATEPDNTSHITAGKRTADGSEFEKRTADGSEFESPKKKAKVE

SEQ ID NO: 1586 - protein, 2100 aa, synthetic construct
  source 1..2100: note = Description of Artificial Sequence: Synthetic polypeptide
MPAAKRVKLDGGDKKYSIGLDIGTNSVGWAVITDEYKVPSKKFKVLGNTDRHSIKKNLIGALLFDSGETAEATRLKRTARRRYTRRKNRICYLQEIFSNEMAKVDDSFFHRLEESFLVEEDKKHERHPIFGNIVDEVAYHEKYPTIYHLRKKLVDSTDKADLRLIYLALAHMIKFRGHFLIEGDLNPDNSDVDKLFIQLVQTYNQLFEENPINASGVDAKAILSARLSKSRRLENLIAQLPGEKKNGLFGNLIALSLGLTPNFKSNFDLAEDAKLQLSKDTYDDDLDNLLAQIGDQYADLFLAAKNLSDAILLSDILRVNTEITKAPLSASMIKRYDEHHQDLTLLKALVRQQLPEKYKEIFFDQSKNGYAGYIDGGASQEEFYKFIKPILEKMDGTEELLVKLNREDLLRKQRTFDNGSIPHQIHLGELHAILRRQEDFYPFLKDNREKIEKILTFRIPYYVGPLARGNSRFAWMTRKSEETITPWNFEEVVDKGASAQSFIERMTNFDKNLPNEKVLPKHSLLYEYFTVYNELTKVKYVTEGMRKPAFLSGEQKKAIVDLLFKTNRKVTVKQLKEDYFKKIECFDSVEISGVEDRFNASLGTYHDLLKIIKDKDFLDNEENEDILEDIVLTLTLFEDREMIEERLKTYAHLFDDKVMKQLKRRRYTGWGRLSRKLINGIRDKQSGKTILDFLKSDGFANRNFMQLIHDDSLTFKEDIQKAQVSGQGDSLHEHIANLAGSPAIKKGILQTVKVVDELVKVMGRHKPENIVIEMARENQTTQKGQKNSRERMKRIEEGIKELGSQILKEHPVENTQLQNEKLYLYYLQNGRDMYVDQELDINRLSDYDVDHIVPQSFLKDDSIDNKVLTRSDKARGKSDNVPSEEVVKKMKNYWRQLLNAKLITQRKFDNLTKAERGGLSELDKAGFIKRQLVETRQITKHVAQILDSRMNTKYDENDKLIREVKVITLKSKLVSDFRKDFQFYKVREINNYHHAHDAYLNAVVGTALIKKYPKLESEFVYGDYKVYDVRKMIAKSEQEIGKATAKYFFYSNIMNFFKTEITLANGEIRKRPLIETNGETGEIVWDKGRDFATVRKVLSMPQVNIVKKTEVQTGGFSKESILPKRNSDKLIARKKDWDPKKYGGFDSPTVAYSVLVVAKVEKGKSKKLKSVKELLGITIMERSSFEKNPIDFLEAKGYKEVKKDLIIKLPKYSLFELENGRKRMLASAGELQKGNELALPSKYVNFLYLASHYEKLKGSPEDNEQKQLFVEQHKHYLDEIIEQISEFSKRVILADANLDKVLSAYNKHRDKPIREQAENIIHLFTLTNLGAPAAFKYFDTTIDRKRYTSTKEVLDATLIHQSITGLYETRIDLSQLGGDGGPAPGSSGGSGGTVSLQDEHRLFDIPVTTSLPDVWLQDFPQAWAETGGLGRAKCQAPIIIDLKPTAVPVSIKQYPMSLEAHMGIRQHIIKFLELGVLRPCRSPWNTPLLPVKKPGTQDYRPVQDLREINKRTVDIHPTVPNPYNLLSTLKPDYSWYTVLDLKDAFFCLPLAPQSQELFAFEWKDPERGISGQLTWTRLPQGFKNSPTLFNEALHRDLTDFRTQHPEVTLLQYVDDLLLAAPTKKACTQGTRHLLQELGEKGYRASAKKAQICQTKVTYLGYILSEGKRWLTPGRIETVARIPPPRNPREVREFLGTAGFCRLWIPGFAELAAPLYALTKPSTPFTWQTEHQLAFEALKKALLSAPALGLPDTSKPFTLFLDERQGIAKGVLTQKLGPWKRPVAYLSKKLDPVAAGWPPCLRIMAATAMLVKDSAKLTLGQPLTVITPHTLEAIVRQPPDRWITNARLTHYQALLLDTDRVQFGPPVTLNPATLLPVPENQPSPHDCRQVLAETHGTREDLKDQELPDADHTWYTDGSSYLDSGTRRAGAAVVDGHNTIWAQSLPPGTSAQKAELIALTKALELSKGKKANIYTDSRYAFATAHTHGSIYERRGWLTSEGKEIKNKAEIIALLKALFLPQEVAIIHCPGHQKGQDPVAVGNRQADRVARQAAMAEVLTLATEPDNTSHITAGKRTADGSEFEKRTADGSEFESPKKKAKVE

SEQ ID NO: 1587 - protein, 2101 aa, synthetic construct
  source 1..2101: note = Description of Artificial Sequence: Synthetic polypeptide
MPAAKRVKLDGGDKKYSIGLDIGTNSVGWAVITDEYKVPSKKFKVLGNTDRHSIKKNLIGALLFDSGETAEATRLKRTARRRYTRRKNRICYLQEIFSNEMAKVDDSFFHRLEESFLVEEDKKHERHPIFGNIVDEVAYHEKYPTIYHLRKKLVDSTDKADLRLIYLALAHMIKFRGHFLIEGDLNPDNSDVDKLFIQLVQTYNQLFEENPINASGVDAKAILSARLSKSRRLENLIAQLPGEKKNGLFGNLIALSLGLTPNFKSNFDLAEDAKLQLSKDTYDDDLDNLLAQIGDQYADLFLAAKNLSDAILLSDILRVNTEITKAPLSASMIKRYDEHHQDLTLLKALVRQQLPEKYKEIFFDQSKNGYAGYIDGGASQEEFYKFIKPILEKMDGTEELLVKLNREDLLRKQRTFDNGSIPHQIHLGELHAILRRQEDFYPFLKDNREKIEKILTFRIPYYVGPLARGNSRFAWMTRKSEETITPWNFEEVVDKGASAQSFIERMTNFDKNLPNEKVLPKHSLLYEYFTVYNELTKVKYVTEGMRKPAFLSGEQKKAIVDLLFKTNRKVTVKQLKEDYFKKIECFDSVEISGVEDRFNASLGTYHDLLKIIKDKDFLDNEENEDILEDIVLTLTLFEDREMIEERLKTYAHLFDDKVMKQLKRRRYTGWGRLSRKLINGIRDKQSGKTILDFLKSDGFANRNFMQLIHDDSLTFKEDIQKAQVSGQGDSLHEHIANLAGSPAIKKGILQTVKVVDELVKVMGRHKPENIVIEMARENQTTQKGQKNSRERMKRIEEGIKELGSQILKEHPVENTQLQNEKLYLYYLQNGRDMYVDQELDINRLSDYDVDHIVPQSFLKDDSIDNKVLTRSDKARGKSDNVPSEEVVKKMKNYWRQLLNAKLITQRKFDNLTKAERGGLSELDKAGFIKRQLVETRQITKHVAQILDSRMNTKYDENDKLIREVKVITLKSKLVSDFRKDFQFYKVREINNYHHAHDAYLNAVVGTALIKKYPKLESEFVYGDYKVYDVRKMIAKSEQEIGKATAKYFFYSNIMNFFKTEITLANGEIRKRPLIETNGETGEIVWDKGRDFATVRKVLSMPQVNIVKKTEVQTGGFSKESILPKRNSDKLIARKKDWDPKKYGGFDSPTVAYSVLVVAKVEKGKSKKLKSVKELLGITIMERSSFEKNPIDFLEAKGYKEVKKDLIIKLPKYSLFELENGRKRMLASAGELQKGNELALPSKYVNFLYLASHYEKLKGSPEDNEQKQLFVEQHKHYLDEIIEQISEFSKRVILADANLDKVLSAYNKHRDKPIREQAENIIHLFTLTNLGAPAAFKYFDTTIDRKRYTSTKEVLDATLIHQSITGLYETRIDLSQLGGDGGEAAAKEAAAKGGTVSLQDEHRLFDIPVTTSLPDVWLQDFPQAWAETGGLGRAKCQAPIIIDLKPTAVPVSIKQYPMSLEAHMGIRQHIIKFLELGVLRPCRSPWNTPLLPVKKPGTQDYRPVQDLREINKRTVDIHPTVPNPYNLLSTLKPDYSWYTVLDLKDAFFCLPLAPQSQELFAFEWKDPERGISGQLTWTRLPQGFKNSPTLFNEALHRDLTDFRTQHPEVTLLQYVDDLLLAAPTKKACTQGTRHLLQELGEKGYRASAKKAQICQTKVTYLGYILSEGKRWLTPGRIETVARIPPPRNPREVREFLGTAGFCRLWIPGFAELAAPLYALTKPSTPFTWQTEHQLAFEALKKALLSAPALGLPDTSKPFTLFLDERQGIAKGVLTQKLGPWKRPVAYLSKKLDPVAAGWPPCLRIMAATAMLVKDSAKLTLGQPLTVITPHTLEAIVRQPPDRWITNARLTHYQALLLDTDRVQFGPPVTLNPATLLPVPENQPSPHDCRQVLAETHGTREDLKDQELPDADHTWYTDGSSYLDSGTRRAGAAVVDGHNTIWAQSLPPGTSAQKAELIALTKALELSKGKKANIYTDSRYAFATAHTHGSIYERRGWLTSEGKEIKNKAEIIALLKALFLPQEVAIIHCPGHQKGQDPVAVGNRQADRVARQAAMAEVLTLATEPDNTSHITAGKRTADGSEFEKRTADGSEFESPKKKAKVE

SEQ ID NO: 1588 - protein, 2109 aa, synthetic construct
  source 1..2109: note = Description of Artificial Sequence: Synthetic polypeptide
MPAAKRVKLDGGDKKYSIGLDIGTNSVGWAVITDEYKVPSKKFKVLGNTDRHSIKKNLIGALLFDSGETAEATRLKRTARRRYTRRKNRICYLQEIFSNEMAKVDDSFFHRLEESFLVEEDKKHERHPIFGNIVDEVAYHEKYPTIYHLRKKLVDSTDKADLRLIYLALAHMIKFRGHFLIEGDLNPDNSDVDKLFIQLVQTYNQLFEENPINASGVDAKAILSARLSKSRRLENLIAQLPGEKKNGLFGNLIALSLGLTPNFKSNFDLAEDAKLQLSKDTYDDDLDNLLAQIGDQYADLFLAAKNLSDAILLSDILRVNTEITKAPLSASMIKRYDEHHQDLTLLKALVRQQLPEKYKEIFFDQSKNGYAGYIDGGASQEEFYKFIKPILEKMDGTEELLVKLNREDLLRKQRTFDNGSIPHQIHLGELHAILRRQEDFYPFLKDNREKIEKILTFRIPYYVGPLARGNSRFAWMTRKSEETITPWNFEEVVDKGASAQSFIERMTNFDKNLPNEKVLPKHSLLYEYFTVYNELTKVKYVTEGMRKPAFLSGEQKKAIVDLLFKTNRKVTVKQLKEDYFKKIECFDSVEISGVEDRFNASLGTYHDLLKIIKDKDFLDNEENEDILEDIVLTLTLFEDREMIEERLKTYAHLFDDKVMKQLKRRRYTGWGRLSRKLINGIRDKQSGKTILDFLKSDGFANRNFMQLIHDDSLTFKEDIQKAQVSGQGDSLHEHIANLAGSPAIKKGILQTVKVVDELVKVMGRHKPENIVIEMARENQTTQKGQKNSRERMKRIEEGIKELGSQILKEHPVENTQLQNEKLYLYYLQNGRDMYVDQELDINRLSDYDVDHIVPQSFLKDDSIDNKVLTRSDKARGKSDNVPSEEVVKKMKNYWRQLLNAKLITQRKFDNLTKAERGGLSELDKAGFIKRQLVETRQITKHVAQILDSRMNTKYDENDKLIREVKVITLKSKLVSDFRKDFQFYKVREINNYHHAHDAYLNAVVGTALIKKYPKLESEFVYGDYKVYDVRKMIAKSEQEIGKATAKYFFYSNIMNFFKTEITLANGEIRKRPLIETNGETGEIVWDKGRDFATVRKVLSMPQVNIVKKTEVQTGGFSKESILPKRNSDKLIARKKDWDPKKYGGFDSPTVAYSVLVVAKVEKGKSKKLKSVKELLGITIMERSSFEKNPIDFLEAKGYKEVKKDLIIKLPKYSLFELENGRKRMLASAGELQKGNELALPSKYVNFLYLASHYEKLKGSPEDNEQKQLFVEQHKHYLDEIIEQISEFSKRVILADANLDKVLSAYNKHRDKPIREQAENIIHLFTLTNLGAPAAFKYFDTTIDRKRYTSTKEVLDATLIHQSITGLYETRIDLSQLGGDGGGSSGSSGSSGSSGSSGSSGGTVSLQDEHRLFDIPVTTSLPDVWLQDFPQAWAETGGLGRAKCQAPIIIDLKPTAVPVSIKQYPMSLEAHMGIRQHIIKFLELGVLRPCRSPWNTPLLPVKKPGTQDYRPVQDLREINKRTVDIHPTVPNPYNLLSTLKPDYSWYTVLDLKDAFFCLPLAPQSQELFAFEWKDPERGISGQLTWTRLPQGFKNSPTLFNEALHRDLTDFRTQHPEVTLLQYVDDLLLAAPTKKACTQGTRHLLQELGEKGYRASAKKAQICQTKVTYLGYILSEGKRWLTPGRIETVARIPPPRNPREVREFLGTAGFCRLWIPGFAELAAPLYALTKPSTPFTWQTEHQLAFEALKKALLSAPALGLPDTSKPFTLFLDERQGIAKGVLTQKLGPWKRPVAYLSKKLDPVAAGWPPCLRIMAATAMLVKDSAKLTLGQPLTVITPHTLEAIVRQPPDRWITNARLTHYQALLLDTDRVQFGPPVTLNPATLLPVPENQPSPHDCRQVLAETHGTREDLKDQELPDADHTWYTDGSSYLDSGTRRAGAAVVDGHNTIWAQSLPPGTSAQKAELIALTKALELSKGKKANIYTDSRYAFATAHTHGSIYERRGWLTSEGKEIKNKAEIIALLKALFLPQEVAIIHCPGHQKGQDPVAVGNRQADRVARQAAMAEVLTLATEPDNTSHITAGKRTADGSEFEKRTADGSEFESPKKKAKVE

SEQ ID NO: 1589 - protein, 2102 aa, synthetic construct
  source 1..2102: note = Description of Artificial Sequence: Synthetic polypeptide
MPAAKRVKLDGGDKKYSIGLDIGTNSVGWAVITDEYKVPSKKFKVLGNTDRHSIKKNLIGALLFDSGETAEATRLKRTARRRYTRRKNRICYLQEIFSNEMAKVDDSFFHRLEESFLVEEDKKHERHPIFGNIVDEVAYHEKYPTIYHLRKKLVDSTDKADLRLIYLALAHMIKFRGHFLIEGDLNPDNSDVDKLFIQLVQTYNQLFEENPINASGVDAKAILSARLSKSRRLENLIAQLPGEKKNGLFGNLIALSLGLTPNFKSNFDLAEDAKLQLSKDTYDDDLDNLLAQIGDQYADLFLAAKNLSDAILLSDILRVNTEITKAPLSASMIKRYDEHHQDLTLLKALVRQQLPEKYKEIFFDQSKNGYAGYIDGGASQEEFYKFIKPILEKMDGTEELLVKLNREDLLRKQRTFDNGSIPHQIHLGELHAILRRQEDFYPFLKDNREKIEKILTFRIPYYVGPLARGNSRFAWMTRKSEETITPWNFEEVVDKGASAQSFIERMTNFDKNLPNEKVLPKHSLLYEYFTVYNELTKVKYVTEGMRKPAFLSGEQKKAIVDLLFKTNRKVTVKQLKEDYFKKIECFDSVEISGVEDRFNASLGTYHDLLKIIKDKDFLDNEENEDILEDIVLTLTLFEDREMIEERLKTYAHLFDDKVMKQLKRRRYTGWGRLSRKLINGIRDKQSGKTILDFLKSDGFANRNFMQLIHDDSLTFKEDIQKAQVSGQGDSLHEHIANLAGSPAIKKGILQTVKVVDELVKVMGRHKPENIVIEMARENQTTQKGQKNSRERMKRIEEGIKELGSQILKEHPVENTQLQNEKLYLYYLQNGRDMYVDQELDINRLSDYDVDHIVPQSFLKDDSIDNKVLTRSDKARGKSDNVPSEEVVKKMKNYWRQLLNAKLITQRKFDNLTKAERGGLSELDKAGFIKRQLVETRQITKHVAQILDSRMNTKYDENDKLIREVKVITLKSKLVSDFRKDFQFYKVREINNYHHAHDAYLNAVVGTALIKKYPKLESEFVYGDYKVYDVRKMIAKSEQEIGKATAKYFFYSNIMNFFKTEITLANGEIRKRPLIETNGETGEIVWDKGRDFATVRKVLSMPQVNIVKKTEVQTGGFSKESILPKRNSDKLIARKKDWDPKKYGGFDSPTVAYSVLVVAKVEKGKSKKLKSVKELLGITIMERSSFEKNPIDFLEAKGYKEVKKDLIIKLPKYSLFELENGRKRMLASAGELQKGNELALPSKYVNFLYLASHYEKLKGSPEDNEQKQLFVEQHKHYLDEIIEQISEFSKRVILADANLDKVLSAYNKHRDKPIREQAENIIHLFTLTNLGAPAAFKYFDTTIDRKRYTSTKEVLDATLIHQSITGLYETRIDLSQLGGDGGGGGEAAAKPAPGGTVSLQDEHRLFDIPVTTSLPDVWLQDFPQAWAETGGLGRAKCQAPIIIDLKPTAVPVSIKQYPMSLEAHMGIRQHIIKFLELGVLRPCRSPWNTPLLPVKKPGTQDYRPVQDLREINKRTVDIHPTVPNPYNLLSTLKPDYSWYTVLDLKDAFFCLPLAPQSQELFAFEWKDPERGISGQLTWTRLPQGFKNSPTLFNEALHRDLTDFRTQHPEVTLLQYVDDLLLAAPTKKACTQGTRHLLQELGEKGYRASAKKAQICQTKVTYLGYILSEGKRWLTPGRIETVARIPPPRNPREVREFLGTAGFCRLWIPGFAELAAPLYALTKPSTPFTWQTEHQLAFEALKKALLSAPALGLPDTSKPFTLFLDERQGIAKGVLTQKLGPWKRPVAYLSKKLDPVAAGWPPCLRIMAATAMLVKDSAKLTLGQPLTVITPHTLEAIVRQPPDRWITNARLTHYQALLLDTDRVQFGPPVTLNPATLLPVPENQPSPHDCRQVLAETHGTREDLKDQELPDADHTWYTDGSSYLDSGTRRAGAAVVDGHNTIWAQSLPPGTSAQKAELIALTKALELSKGKKANIYTDSRYAFATAHTHGSIYERRGWLTSEGKEIKNKAEIIALLKALFLPQEVAIIHCPGHQKGQDPVAVGNRQADRVARQAAMAEVLTLATEPDNTSHITAGKRTADGSEFEKRTADGSEFESPKKKAKVE

SEQ ID NO: 1590 - protein, 2097 aa, synthetic construct
  source 1..2097: note = Description of Artificial Sequence: Synthetic polypeptide
MPAAKRVKLDGGDKKYSIGLDIGTNSVGWAVITDEYKVPSKKFKVLGNTDRHSIKKNLIGALLFDSGETAEATRLKRTARRRYTRRKNRICYLQEIFSNEMAKVDDSFFHRLEESFLVEEDKKHERHPIFGNIVDEVAYHEKYPTIYHLRKKLVDSTDKADLRLIYLALAHMIKFRGHFLIEGDLNPDNSDVDKLFIQLVQTYNQLFEENPINASGVDAKAILSARLSKSRRLENLIAQLPGEKKNGLFGNLIALSLGLTPNFKSNFDLAEDAKLQLSKDTYDDDLDNLLAQIGDQYADLFLAAKNLSDAILLSDILRVNTEITKAPLSASMIKRYDEHHQDLTLLKALVRQQLPEKYKEIFFDQSKNGYAGYIDGGASQEEFYKFIKPILEKMDGTEELLVKLNREDLLRKQRTFDNGSIPHQIHLGELHAILRRQEDFYPFLKDNREKIEKILTFRIPYYVGPLARGNSRFAWMTRKSEETITPWNFEEVVDKGASAQSFIERMTNFDKNLPNEKVLPKHSLLYEYFTVYNELTKVKYVTEGMRKPAFLSGEQKKAIVDLLFKTNRKVTVKQLKEDYFKKIECFDSVEISGVEDRFNASLGTYHDLLKIIKDKDFLDNEENEDILEDIVLTLTLFEDREMIEERLKTYAHLFDDKVMKQLKRRRYTGWGRLSRKLINGIRDKQSGKTILDFLKSDGFANRNFMQLIHDDSLTFKEDIQKAQVSGQGDSLHEHIANLAGSPAIKKGILQTVKVVDELVKVMGRHKPENIVIEMARENQTTQKGQKNSRERMKRIEEGIKELGSQILKEHPVENTQLQNEKLYLYYLQNGRDMYVDQELDINRLSDYDVDHIVPQSFLKDDSIDNKVLTRSDKARGKSDNVPSEEVVKKMKNYWRQLLNAKLITQRKFDNLTKAERGGLSELDKAGFIKRQLVETRQITKHVAQILDSRMNTKYDENDKLIREVKVITLKSKLVSDFRKDFQFYKVREINNYHHAHDAYLNAVVGTALIKKYPKLESEFVYGDYKVYDVRKMIAKSEQEIGKATAKYFFYSNIMNFFKTEITLANGEIRKRPLIETNGETGEIVWDKGRDFATVRKVLSMPQVNIVKKTEVQTGGFSKESILPKRNSDKLIARKKDWDPKKYGGFDSPTVAYSVLVVAKVEKGKSKKLKSVKELLGITIMERSSFEKNPIDFLEAKGYKEVKKDLIIKLPKYSLFELENGRKRMLASAGELQKGNELALPSKYVNFLYLASHYEKLKGSPEDNEQKQLFVEQHKHYLDEIIEQISEFSKRVILADANLDKVLSAYNKHRDKPIREQAENIIHLFTLTNLGAPAAFKYFDTTIDRKRYTSTKEVLDATLIHQSITGLYETRIDLSQLGGDGGPAPGGGGGTVSLQDEHRLFDIPVTTSLPDVWLQDFPQAWAETGGLGRAKCQAPIIIDLKPTAVPVSIKQYPMSLEAHMGIRQHIIKFLELGVLRPCRSPWNTPLLPVKKPGTQDYRPVQDLREINKRTVDIHPTVPNPYNLLSTLKPDYSWYTVLDLKDAFFCLPLAPQSQELFAFEWKDPERGISGQLTWTRLPQGFKNSPTLFNEALHRDLTDFRTQHPEVTLLQYVDDLLLAAPTKKACTQGTRHLLQELGEKGYRASAKKAQICQTKVTYLGYILSEGKRWLTPGRIETVARIPPPRNPREVREFLGTAGFCRLWIPGFAELAAPLYALTKPSTPFTWQTEHQLAFEALKKALLSAPALGLPDTSKPFTLFLDERQGIAKGVLTQKLGPWKRPVAYLSKKLDPVAAGWPPCLRIMAATAMLVKDSAKLTLGQPLTVITPHTLEAIVRQPPDRWITNARLTHYQALLLDTDRVQFGPPVTLNPATLLPVPENQPSPHDCRQVLAETHGTREDLKDQELPDADHTWYTDGSSYLDSGTRRAGAAVVDGHNTIWAQSLPPGTSAQKAELIALTKALELSKGKKANIYTDSRYAFATAHTHGSIYERRGWLTSEGKEIKNKAEIIALLKALFLPQEVAIIHCPGHQKGQDPVAVGNRQADRVARQAAMAEVLTLATEPDNTSHITAGKRTADGSEFEKRTADGSEFESPKKKAKVE

SEQ ID NO: 1591 - protein, 2100 aa, synthetic construct
  source 1..2100: note = Description of Artificial Sequence: Synthetic polypeptide
MPAAKRVKLDGGDKKYSIGLDIGTNSVGWAVITDEYKVPSKKFKVLGNTDRHSIKKNLIGALLFDSGETAEATRLKRTARRRYTRRKNRICYLQEIFSNEMAKVDDSFFHRLEESFLVEEDKKHERHPIFGNIVDEVAYHEKYPTIYHLRKKLVDSTDKADLRLIYLALAHMIKFRGHFLIEGDLNPDNSDVDKLFIQLVQTYNQLFEENPINASGVDAKAILSARLSKSRRLENLIAQLPGEKKNGLFGNLIALSLGLTPNFKSNFDLAEDAKLQLSKDTYDDDLDNLLAQIGDQYADLFLAAKNLSDAILLSDILRVNTEITKAPLSASMIKRYDEHHQDLTLLKALVRQQLPEKYKEIFFDQSKNGYAGYIDGGASQEEFYKFIKPILEKMDGTEELLVKLNREDLLRKQRTFDNGSIPHQIHLGELHAILRRQEDFYPFLKDNREKIEKILTFRIPYYVGPLARGNSRFAWMTRKSEETITPWNFEEVVDKGASAQSFIERMTNFDKNLPNEKVLPKHSLLYEYFTVYNELTKVKYVTEGMRKPAFLSGEQKKAIVDLLFKTNRKVTVKQLKEDYFKKIECFDSVEISGVEDRFNASLGTYHDLLKIIKDKDFLDNEENEDILEDIVLTLTLFEDREMIEERLKTYAHLFDDKVMKQLKRRRYTGWGRLSRKLINGIRDKQSGKTILDFLKSDGFANRNFMQLIHDDSLTFKEDIQKAQVSGQGDSLHEHIANLAGSPAIKKGILQTVKVVDELVKVMGRHKPENIVIEMARENQTTQKGQKNSRERMKRIEEGIKELGSQILKEHPVENTQLQNEKLYLYYLQNGRDMYVDQELDINRLSDYDVDHIVPQSFLKDDSIDNKVLTRSDKARGKSDNVPSEEVVKKMKNYWRQLLNAKLITQRKFDNLTKAERGGLSELDKAGFIKRQLVETRQITKHVAQILDSRMNTKYDENDKLIREVKVITLKSKLVSDFRKDFQFYKVREINNYHHAHDAYLNAVVGTALIKKYPKLESEFVYGDYKVYDVRKMIAKSEQEIGKATAKYFFYSNIMNFFKTEITLANGEIRKRPLIETNGETGEIVWDKGRDFATVRKVLSMPQVNIVKKTEVQTGGFSKESILPKRNSDKLIARKKDWDPKKYGGFDSPTVAYSVLVVAKVEKGKSKKLKSVKELLGITIMERSSFEKNPIDFLEAKGYKEVKKDLIIKLPKYSLFELENGRKRMLASAGELQKGNELALPSKYVNFLYLASHYEKLKGSPEDNEQKQLFVEQHKHYLDEIIEQISEFSKRVILADANLDKVLSAYNKHRDKPIREQAENIIHLFTLTNLGAPAAFKYFDTTIDRKRYTSTKEVLDATLIHQSITGLYETRIDLSQLGGDGGGGSPAPGSSGGTVSLQDEHRLFDIPVTTSLPDVWLQDFPQAWAETGGLGRAKCQAPIIIDLKPTAVPVSIKQYPMSLEAHMGIRQHIIKFLELGVLRPCRSPWNTPLLPVKKPGTQDYRPVQDLREINKRTVDIHPTVPNPYNLLSTLKPDYSWYTVLDLKDAFFCLPLAPQSQELFAFEWKDPERGISGQLTWTRLPQGFKNSPTLFNEALHRDLTDFRTQHPEVTLLQYVDDLLLAAPTKKACTQGTRHLLQELGEKGYRASAKKAQICQTKVTYLGYILSEGKRWLTPGRIETVARIPPPRNPREVREFLGTAGFCRLWIPGFAELAAPLYALTKPSTPFTWQTEHQLAFEALKKALLSAPALGLPDTSKPFTLFLDERQGIAKGVLTQKLGPWKRPVAYLSKKLDPVAAGWPPCLRIMAATAMLVKDSAKLTLGQPLTVITPHTLEAIVRQPPDRWITNARLTHYQALLLDTDRVQFGPPVTLNPATLLPVPENQPSPHDCRQVLAETHGTREDLKDQELPDADHTWYTDGSSYLDSGTRRAGAAVVDGHNTIWAQSLPPGTSAQKAELIALTKALELSKGKKANIYTDSRYAFATAHTHGSIYERRGWLTSEGKEIKNKAEIIALLKALFLPQEVAIIHCPGHQKGQDPVAVGNRQADRVARQAAMAEVLTLATEPDNTSHITAGKRTADGSEFEKRTADGSEFESPKKKAKVE

SEQ ID NO: 1592 - protein, 2097 aa, synthetic construct
  source 1..2097: note = Description of Artificial Sequence: Synthetic polypeptide
MPAAKRVKLDGGDKKYSIGLDIGTNSVGWAVITDEYKVPSKKFKVLGNTDRHSIKKNLIGALLFDSGETAEATRLKRTARRRYTRRKNRICYLQEIFSNEMAKVDDSFFHRLEESFLVEEDKKHERHPIFGNIVDEVAYHEKYPTIYHLRKKLVDSTDKADLRLIYLALAHMIKFRGHFLIEGDLNPDNSDVDKLFIQLVQTYNQLFEENPINASGVDAKAILSARLSKSRRLENLIAQLPGEKKNGLFGNLIALSLGLTPNFKSNFDLAEDAKLQLSKDTYDDDLDNLLAQIGDQYADLFLAAKNLSDAILLSDILRVNTEITKAPLSASMIKRYDEHHQDLTLLKALVRQQLPEKYKEIFFDQSKNGYAGYIDGGASQEEFYKFIKPILEKMDGTEELLVKLNREDLLRKQRTFDNGSIPHQIHLGELHAILRRQEDFYPFLKDNREKIEKILTFRIPYYVGPLARGNSRFAWMTRKSEETITPWNFEEVVDKGASAQSFIERMTNFDKNLPNEKVLPKHSLLYEYFTVYNELTKVKYVTEGMRKPAFLSGEQKKAIVDLLFKTNRKVTVKQLKEDYFKKIECFDSVEISGVEDRFNASLGTYHDLLKIIKDKDFLDNEENEDILEDIVLTLTLFEDREMIEERLKTYAHLFDDKVMKQLKRRRYTGWGRLSRKLINGIRDKQSGKTILDFLKSDGFANRNFMQLIHDDSLTFKEDIQKAQVSGQGDSLHEHIANLAGSPAIKKGILQTVKVVDELVKVMGRHKPENIVIEMARENQTTQKGQKNSRERMKRIEEGIKELGSQILKEHPVENTQLQNEKLYLYYLQNGRDMYVDQELDINRLSDYDVDHIVPQSFLKDDSIDNKVLTRSDKARGKSDNVPSEEVVKKMKNYWRQLLNAKLITQRKFDNLTKAERGGLSELDKAGFIKRQLVETRQITKHVAQILDSRMNTKYDENDKLIREVKVITLKSKLVSDFRKDFQFYKVREINNYHHAHDAYLNAVVGTALIKKYPKLESEFVYGDYKVYDVRKMIAKSEQEIGKATAKYFFYSNIMNFFKTEITLANGEIRKRPLIETNGETGEIVWDKGRDFATVRKVLSMPQVNIVKKTEVQTGGFSKESILPKRNSDKLIARKKDWDPKKYGGFDSPTVAYSVLVVAKVEKGKSKKLKSVKELLGITIMERSSFEKNPIDFLEAKGYKEVKKDLIIKLPKYSLFELENGRKRMLASAGELQKGNELALPSKYVNFLYLASHYEKLKGSPEDNEQKQLFVEQHKHYLDEIIEQISEFSKRVILADANLDKVLSAYNKHRDKPIREQAENIIHLFTLTNLGAPAAFKYFDTTIDRKRYTSTKEVLDATLIHQSITGLYETRIDLSQLGGDGGGSSPAPGGTVSLQDEHRLFDIPVTTSLPDVWLQDFPQAWAETGGLGRAKCQAPIIIDLKPTAVPVSIKQYPMSLEAHMGIRQHIIKFLELGVLRPCRSPWNTPLLPVKKPGTQDYRPVQDLREINKRTVDIHPTVPNPYNLLSTLKPDYSWYTVLDLKDAFFCLPLAPQSQELFAFEWKDPERGISGQLTWTRLPQGFKNSPTLFNEALHRDLTDFRTQHPEVTLLQYVDDLLLAAPTKKACTQGTRHLLQELGEKGYRASAKKAQICQTKVTYLGYILSEGKRWLTPGRIETVARIPPPRNPREVREFLGTAGFCRLWIPGFAELAAPLYALTKPSTPFTWQTEHQLAFEALKKALLSAPALGLPDTSKPFTLFLDERQGIAKGVLTQKLGPWKRPVAYLSKKLDPVAAGWPPCLRIMAATAMLVKDSAKLTLGQPLTVITPHTLEAIVRQPPDRWITNARLTHYQALLLDTDRVQFGPPVTLNPATLLPVPENQPSPHDCRQVLAETHGTREDLKDQELPDADHTWYTDGSSYLDSGTRRAGAAVVDGHNTIWAQSLPPGTSAQKAELIALTKALELSKGKKANIYTDSRYAFATAHTHGSIYERRGWLTSEGKEIKNKAEIIALLKALFLPQEVAIIHCPGHQKGQDPVAVGNRQADRVARQAAMAEVLTLATEPDNTSHITAGKRTADGSEFEKRTADGSEFESPKKKAKVE

SEQ ID NO: 1593 - protein, 2102 aa, synthetic construct
  source 1..2102: note = Description of Artificial Sequence: Synthetic polypeptide
MPAAKRVKLDGGDKKYSIGLDIGTNSVGWAVITDEYKVPSKKFKVLGNTDRHSIKKNLIGALLFDSGETAEATRLKRTARRRYTRRKNRICYLQEIFSNEMAKVDDSFFHRLEESFLVEEDKKHERHPIFGNIVDEVAYHEKYPTIYHLRKKLVDSTDKADLRLIYLALAHMIKFRGHFLIEGDLNPDNSDVDKLFIQLVQTYNQLFEENPINASGVDAKAILSARLSKSRRLENLIAQLPGEKKNGLFGNLIALSLGLTPNFKSNFDLAEDAKLQLSKDTYDDDLDNLLAQIGDQYADLFLAAKNLSDAILLSDILRVNTEITKAPLSASMIKRYDEHHQDLTLLKALVRQQLPEKYKEIFFDQSKNGYAGYIDGGASQEEFYKFIKPILEKMDGTEELLVKLNREDLLRKQRTFDNGSIPHQIHLGELHAILRRQEDFYPFLKDNREKIEKILTFRIPYYVGPLARGNSRFAWMTRKSEETITPWNFEEVVDKGASAQSFIERMTNFDKNLPNEKVLPKHSLLYEYFTVYNELTKVKYVTEGMRKPAFLSGEQKKAIVDLLFKTNRKVTVKQLKEDYFKKIECFDSVEISGVEDRFNASLGTYHDLLKIIKDKDFLDNEENEDILEDIVLTLTLFEDREMIEERLKTYAHLFDDKVMKQLKRRRYTGWGRLSRKLINGIRDKQSGKTILDFLKSDGFANRNFMQLIHDDSLTFKEDIQKAQVSGQGDSLHEHIANLAGSPAIKKGILQTVKVVDELVKVMGRHKPENIVIEMARENQTTQKGQKNSRERMKRIEEGIKELGSQILKEHPVENTQLQNEKLYLYYLQNGRDMYVDQELDINRLSDYDVDHIVPQSFLKDDSIDNKVLTRSDKARGKSDNVPSEEVVKKMKNYWRQLLNAKLITQRKFDNLTKAERGGLSELDKAGFIKRQLVETRQITKHVAQILDSRMNTKYDENDKLIREVKVITLKSKLVSDFRKDFQFYKVREINNYHHAHDAYLNAVVGTALIKKYPKLESEFVYGDYKVYDVRKMIAKSEQEIGKATAKYFFYSNIMNFFKTEITLANGEIRKRPLIETNGETGEIVWDKGRDFATVRKVLSMPQVNIVKKTEVQTGGFSKESILPKRNSDKLIARKKDWDPKKYGGFDSPTVAYSVLVVAKVEKGKSKKLKSVKELLGITIMERSSFEKNPIDFLEAKGYKEVKKDLIIKLPKYSLFELENGRKRMLASAGELQKGNELALPSKYVNFLYLASHYEKLKGSPEDNEQKQLFVEQHKHYLDEIIEQISEFSKRVILADANLDKVLSAYNKHRDKPIREQAENIIHLFTLTNLGAPAAFKYFDTTIDRKRYTSTKEVLDATLIHQSITGLYETRIDLSQLGGDGGEAAAKGGGGSSGGTVSLQDEHRLFDIPVTTSLPDVWLQDFPQAWAETGGLGRAKCQAPIIIDLKPTAVPVSIKQYPMSLEAHMGIRQHIIKFLELGVLRPCRSPWNTPLLPVKKPGTQDYRPVQDLREINKRTVDIHPTVPNPYNLLSTLKPDYSWYTVLDLKDAFFCLPLAPQSQELFAFEWKDPERGISGQLTWTRLPQGFKNSPTLFNEALHRDLTDFRTQHPEVTLLQYVDDLLLAAPTKKACTQGTRHLLQELGEKGYRASAKKAQICQTKVTYLGYILSEGKRWLTPGRIETVARIPPPRNPREVREFLGTAGFCRLWIPGFAELAAPLYALTKPSTPFTWQTEHQLAFEALKKALLSAPALGLPDTSKPFTLFLDERQGIAKGVLTQKLGPWKRPVAYLSKKLDPVAAGWPPCLRIMAATAMLVKDSAKLTLGQPLTVITPHTLEAIVRQPPDRWITNARLTHYQALLLDTDRVQFGPPVTLNPATLLPVPENQPSPHDCRQVLAETHGTREDLKDQELPDADHTWYTDGSSYLDSGTRRAGAAVVDGHNTIWAQSLPPGTSAQKAELIALTKALELSKGKKANIYTDSRYAFATAHTHGSIYERRGWLTSEGKEIKNKAEIIALLKALFLPQEVAIIHCPGHQKGQDPVAVGNRQADRVARQAAMAEVLTLATEPDNTSHITAGKRTADGSEFEKRTADGSEFESPKKKAKVE

SEQ ID NO: 1594 - protein, 2103 aa, synthetic construct
  source 1..2103: note = Description of Artificial Sequence: Synthetic polypeptide
MPAAKRVKLDGGDKKYSIGLDIGTNSVGWAVITDEYKVPSKKFKVLGNTDRHSIKKNLIGALLFDSGETAEATRLKRTARRRYTRRKNRICYLQEIFSNEMAKVDDSFFHRLEESFLVEEDKKHERHPIFGNIVDEVAYHEKYPTIYHLRKKLVDSTDKADLRLIYLALAHMIKFRGHFLIEGDLNPDNSDVDKLFIQLVQTYNQLFEENPINASGVDAKAILSARLSKSRRLENLIAQLPGEKKNGLFGNLIALSLGLTPNFKSNFDLAEDAKLQLSKDTYDDDLDNLLAQIGDQYADLFLAAKNLSDAILLSDILRVNTEITKAPLSASMIKRYDEHHQDLTLLKALVRQQLPEKYKEIFFDQSKNGYAGYIDGGASQEEFYKFIKPILEKMDGTEELLVKLNREDLLRKQRTFDNGSIPHQIHLGELHAILRRQEDFYPFLKDNREKIEKILTFRIPYYVGPLARGNSRFAWMTRKSEETITPWNFEEVVDKGASAQSFIERMTNFDKNLPNEKVLPKHSLLYEYFTVYNELTKVKYVTEGMRKPAFLSGEQKKAIVDLLFKTNRKVTVKQLKEDYFKKIECFDSVEISGVEDRFNASLGTYHDLLKIIKDKDFLDNEENEDILEDIVLTLTLFEDREMIEERLKTYAHLFDDKVMKQLKRRRYTGWGRLSRKLINGIRDKQSGKTILDFLKSDGFANRNFMQLIHDDSLTFKEDIQKAQVSGQGDSLHEHIANLAGSPAIKKGILQTVKVVDELVKVMGRHKPENIVIEMARENQTTQKGQKNSRERMKRIEEGIKELGSQILKEHPVENTQLQNEKLYLYYLQNGRDMYVDQELDINRLSDYDVDHIVPQSFLKDDSIDNKVLTRSDKARGKSDNVPSEEVVKKMKNYWRQLLNAKLITQRKFDNLTKAERGGLSELDKAGFIKRQLVETRQITKHVAQILDSRMNTKYDENDKLIREVKVITLKSKLVSDFRKDFQFYKVREINNYHHAHDAYLNAVVGTALIKKYPKLESEFVYGDYKVYDVRKMIAKSEQEIGKATAKYFFYSNIMNFFKTEITLANGEIRKRPLIETNGETGEIVWDKGRDFATVRKVLSMPQVNIVKKTEVQTGGFSKESILPKRNSDKLIARKKDWDPKKYGGFDSPTVAYSVLVVAKVEKGKSKKLKSVKELLGITIMERSSFEKNPIDFLEAKGYKEVKKDLIIKLPKYSLFELENGRKRMLASAGELQKGNELALPSKYVNFLYLASHYEKLKGSPEDNEQKQLFVEQHKHYLDEIIEQISEFSKRVILADANLDKVLSAYNKHRDKPIREQAENIIHLFTLTNLGAPAAFKYFDTTIDRKRYTSTKEVLDATLIHQSITGLYETRIDLSQLGGDGGGSAGSAAGSGEFGGTVSLQDEHRLFDIPVTTSLPDVWLQDFPQAWAETGGLGRAKCQAPIIIDLKPTAVPVSIKQYPMSLEAHMGIRQHIIKFLELGVLRPCRSPWNTPLLPVKKPGTQDYRPVQDLREINKRTVDIHPTVPNPYNLLSTLKPDYSWYTVLDLKDAFFCLPLAPQSQELFAFEWKDPERGISGQLTWTRLPQGFKNSPTLFNEALHRDLTDFRTQHPEVTLLQYVDDLLLAAPTKKACTQGTRHLLQELGEKGYRASAKKAQICQTKVTYLGYILSEGKRWLTPGRIETVARIPPPRNPREVREFLGTAGFCRLWIPGFAELAAPLYALTKPSTPFTWQTEHQLAFEALKKALLSAPALGLPDTSKPFTLFLDERQGIAKGVLTQKLGPWKRPVAYLSKKLDPVAAGWPPCLRIMAATAMLVKDSAKLTLGQPLTVITPHTLEAIVRQPPDRWITNARLTHYQALLLDTDRVQFGPPVTLNPATLLPVPENQPSPHDCRQVLAETHGTREDLKDQELPDADHTWYTDGSSYLDSGTRRAGAAVVDGHNTIWAQSLPPGTSAQKAELIALTKALELSKGKKANIYTDSRYAFATAHTHGSIYERRGWLTSEGKEIKNKAEIIALLKALFLPQEVAIIHCPGHQKGQDPVAVGNRQADRVARQAAMAEVLTLATEPDNTSHITAGKRTADGSEFEKRTADGSEFESPKKKAKVE

SEQ ID NO: 1595 - protein, 2100 aa, synthetic construct
  source 1..2100: note = Description of Artificial Sequence: Synthetic polypeptide
MPAAKRVKLDGGDKKYSIGLDIGTNSVGWAVITDEYKVPSKKFKVLGNTDRHSIKKNLIGALLFDSGETAEATRLKRTARRRYTRRKNRICYLQEIFSNEMAKVDDSFFHRLEESFLVEEDKKHERHPIFGNIVDEVAYHEKYPTIYHLRKKLVDSTDKADLRLIYLALAHMIKFRGHFLIEGDLNPDNSDVDKLFIQLVQTYNQLFEENPINASGVDAKAILSARLSKSRRLENLIAQLPGEKKNGLFGNLIALSLGLTPNFKSNFDLAEDAKLQLSKDTYDDDLDNLLAQIGDQYADLFLAAKNLSDAILLSDILRVNTEITKAPLSASMIKRYDEHHQDLTLLKALVRQQLPEKYKEIFFDQSKNGYAGYIDGGASQEEFYKFIKPILEKMDGTEELLVKLNREDLLRKQRTFDNGSIPHQIHLGELHAILRRQEDFYPFLKDNREKIEKILTFRIPYYVGPLARGNSRFAWMTRKSEETITPWNFEEVVDKGASAQSFIERMTNFDKNLPNEKVLPKHSLLYEYFTVYNELTKVKYVTEGMRKPAFLSGEQKKAIVDLLFKTNRKVTVKQLKEDYFKKIECFDSVEISGVEDRFNASLGTYHDLLKIIKDKDFLDNEENEDILEDIVLTLTLFEDREMIEERLKTYAHLFDDKVMKQLKRRRYTGWGRLSRKLINGIRDKQSGKTILDFLKSDGFANRNFMQLIHDDSLTFKEDIQKAQVSGQGDSLHEHIANLAGSPAIKKGILQTVKVVDELVKVMGRHKPENIVIEMARENQTTQKGQKNSRERMKRIEEGIKELGSQILKEHPVENTQLQNEKLYLYYLQNGRDMYVDQELDINRLSDYDVDHIVPQSFLKDDSIDNKVLTRSDKARGKSDNVPSEEVVKKMKNYWRQLLNAKLITQRKFDNLTKAERGGLSELDKAGFIKRQLVETRQITKHVAQILDSRMNTKYDENDKLIREVKVITLKSKLVSDFRKDFQFYKVREINNYHHAHDAYLNAVVGTALIKKYPKLESEFVYGDYKVYDVRKMIAKSEQEIGKATAKYFFYSNIMNFFKTEITLANGEIRKRPLIETNGETGEIVWDKGRDFATVRKVLSMPQVNIVKKTEVQTGGFSKESILPKRNSDKLIARKKDWDPKKYGGFDSPTVAYSVLVVAKVEKGKSKKLKSVKELLGITIMERSSFEKNPIDFLEAKGYKEVKKDLIIKLPKYSLFELENGRKRMLASAGELQKGNELALPSKYVNFLYLASHYEKLKGSPEDNEQKQLFVEQHKHYLDEIIEQISEFSKRVILADANLDKVLSAYNKHRDKPIREQAENIIHLFTLTNLGAPAAFKYFDTTIDRKRYTSTKEVLDATLIHQSITGLYETRIDLSQLGGDGGGGGPAPGGSGGTVSLQDEHRLFDIPVTTSLPDVWLQDFPQAWAETGGLGRAKCQAPIIIDLKPTAVPVSIKQYPMSLEAHMGIRQHIIKFLELGVLRPCRSPWNTPLLPVKKPGTQDYRPVQDLREINKRTVDIHPTVPNPYNLLSTLKPDYSWYTVLDLKDAFFCLPLAPQSQELFAFEWKDPERGISGQLTWTRLPQGFKNSPTLFNEALHRDLTDFRTQHPEVTLLQYVDDLLLAAPTKKACTQGTRHLLQELGEKGYRASAKKAQICQTKVTYLGYILSEGKRWLTPGRIETVARIPPPRNPREVREFLGTAGFCRLWIPGFAELAAPLYALTKPSTPFTWQTEHQLAFEALKKALLSAPALGLPDTSKPFTLFLDERQGIAKGVLTQKLGPWKRPVAYLSKKLDPVAAGWPPCLRIMAATAMLVKDSAKLTLGQPLTVITPHTLEAIVRQPPDRWITNARLTHYQALLLDTDRVQFGPPVTLNPATLLPVPENQPSPHDCRQVLAETHGTREDLKDQELPDADHTWYTDGSSYLDSGTRRAGAAVVDGHNTIWAQSLPPGTSAQKAELIALTKALELSKGKKANIYTDSRYAFATAHTHGSIYERRGWLTSEGKEIKNKAEIIALLKALFLPQEVAIIHCPGHQKGQDPVAVGNRQADRVARQAAMAEVLTLATEPDNTSHITAGKRTADGSEFEKRTADGSEFESPKKKAKVE

SEQ ID NO: 1596 - protein, 2102 aa, synthetic construct
  source 1..2102: note = Description of Artificial Sequence: Synthetic polypeptide
MPAAKRVKLDGGDKKYSIGLDIGTNSVGWAVITDEYKVPSKKFKVLGNTDRHSIKKNLIGALLFDSGETAEATRLKRTARRRYTRRKNRICYLQEIFSNEMAKVDDSFFHRLEESFLVEEDKKHERHPIFGNIVDEVAYHEKYPTIYHLRKKLVDSTDKADLRLIYLALAHMIKFRGHFLIEGDLNPDNSDVDKLFIQLVQTYNQLFEENPINASGVDAKAILSARLSKSRRLENLIAQLPGEKKNGLFGNLIALSLGLTPNFKSNFDLAEDAKLQLSKDTYDDDLDNLLAQIGDQYADLFLAAKNLSDAILLSDILRVNTEITKAPLSASMIKRYDEHHQDLTLLKALVRQQLPEKYKEIFFDQSKNGYAGYIDGGASQEEFYKFIKPILEKMDGTEELLVKLNREDLLRKQRTFDNGSIPHQIHLGELHAILRRQEDFYPFLKDNREKIEKILTFRIPYYVGPLARGNSRFAWMTRKSEETITPWNFEEVVDKGASAQSFIERMTNFDKNLPNEKVLPKHSLLYEYFTVYNELTKVKYVTEGMRKPAFLSGEQKKAIVDLLFKTNRKVTVKQLKEDYFKKIECFDSVEISGVEDRFNASLGTYHDLLKIIKDKDFLDNEENEDILEDIVLTLTLFEDREMIEERLKTYAHLFDDKVMKQLKRRRYTGWGRLSRKLINGIRDKQSGKTILDFLKSDGFANRNFMQLIHDDSLTFKEDIQKAQVSGQGDSLHEHIANLAGSPAIKKGILQTVKVVDELVKVMGRHKPENIVIEMARENQTTQKGQKNSRERMKRIEEGIKELGSQILKEHPVENTQLQNEKLYLYYLQNGRDMYVDQELDINRLSDYDVDHIVPQSFLKDDSIDNKVLTRSDKARGKSDNVPSEEVVKKMKNYWRQLLNAKLITQRKFDNLTKAERGGLSELDKAGFIKRQLVETRQITKHVAQILDSRMNTKYDENDKLIREVKVITLKSKLVSDFRKDFQFYKVREINNYHHAHDAYLNAVVGTALIKKYPKLESEFVYGDYKVYDVRKMIAKSEQEIGKATAKYFFYSNIMNFFKTEITLANGEIRKRPLIETNGETGEIVWDKGRDFATVRKVLSMPQVNIVKKTEVQTGGFSKESILPKRNSDKLIARKKDWDPKKYGGFDSPTVAYSVLVVAKVEKGKSKKLKSVKELLGITIMERSSFEKNPIDFLEAKGYKEVKKDLIIKLPKYSLFELENGRKRMLASAGELQKGNELALPSKYVNFLYLASHYEKLKGSPEDNEQKQLFVEQHKHYLDEIIEQISEFSKRVILADANLDKVLSAYNKHRDKPIREQAENIIHLFTLTNLGAPAAFKYFDTTIDRKRYTSTKEVLDATLIHQSITGLYETRIDLSQLGGDGGGSSPAPEAAAKGGTVSLQDEHRLFDIPVTTSLPDVWLQDFPQAWAETGGLGRAKCQAPIIIDLKPTAVPVSIKQYPMSLEAHMGIRQHIIKFLELGVLRPCRSPWNTPLLPVKKPGTQDYRPVQDLREINKRTVDIHPTVPNPYNLLSTLKPDYSWYTVLDLKDAFFCLPLAPQSQELFAFEWKDPERGISGQLTWTRLPQGFKNSPTLFNEALHRDLTDFRTQHPEVTLLQYVDDLLLAAPTKKACTQGTRHLLQELGEKGYRASAKKAQICQTKVTYLGYILSEGKRWLTPGRIETVARIPPPRNPREVREFLGTAGFCRLWIPGFAELAAPLYALTKPSTPFTWQTEHQLAFEALKKALLSAPALGLPDTSKPFTLFLDERQGIAKGVLTQKLGPWKRPVAYLSKKLDPVAAGWPPCLRIMAATAMLVKDSAKLTLGQPLTVITPHTLEAIVRQPPDRWITNARLTHYQALLLDTDRVQFGPPVTLNPATLLPVPENQPSPHDCRQVLAETHGTREDLKDQELPDADHTWYTDGSSYLDSGTRRAGAAVVDGHNTIWAQSLPPGTSAQKAELIALTKALELSKGKKANIYTDSRYAFATAHTHGSIYERRGWLTSEGKEIKNKAEIIALLKALFLPQEVAIIHCPGHQKGQDPVAVGNRQADRVARQAAMAEVLTLATEPDNTSHITAGKRTADGSEFEKRTADGSEFESPKKKAKVE

SEQ ID NO: 1597 - protein, 2101 aa, synthetic construct
  source 1..2101: note = Description of Artificial Sequence: Synthetic polypeptide
MPAAKRVKLDGGDKKYSIGLDIGTNSVGWAVITDEYKVPSKKFKVLGNTDRHSIKKNLIGALLFDSGETAEATRLKRTARRRYTRRKNRICYLQEIFSNEMAKVDDSFFHRLEESFLVEEDKKHERHPIFGNIVDEVAYHEKYPTIYHLRKKLVDSTDKADLRLIYLALAHMIKFRGHFLIEGDLNPDNSDVDKLFIQLVQTYNQLFEENPINASGVDAKAILSARLSKSRRLENLIAQLPGEKKNGLFGNLIALSLGLTPNFKSNFDLAEDAKLQLSKDTYDDDLDNLLAQIGDQYADLFLAAKNLSDAILLSDILRVNTEITKAPLSASMIKRYDEHHQDLTLLKALVRQQLPEKYKEIFFDQSKNGYAGYIDGGASQEEFYKFIKPILEKMDGTEELLVKLNREDLLRKQRTFDNGSIPHQIHLGELHAILRRQEDFYPFLKDNREKIEKILTFRIPYYVGPLARGNSRFAWMTRKSEETITPWNFEEVVDKGASAQSFIERMTNFDKNLPNEKVLPKHSLLYEYFTVYNELTKVKYVTEGMRKPAFLSGEQKKAIVDLLFKTNRKVTVKQLKEDYFKKIECFDSVEISGVEDRFNASLGTYHDLLKIIKDKDFLDNEENEDILEDIVLTLTLFEDREMIEERLKTYAHLFDDKVMKQLKRRRYTGWGRLSRKLINGIRDKQSGKTILDFLKSDGFANRNFMQLIHDDSLTFKEDIQKAQVSGQGDSLHEHIANLAGSPAIKKGILQTVKVVDELVKVMGRHKPENIVIEMARENQTTQKGQKNSRERMKRIEEGIKELGSQILKEHPVENTQLQNEKLYLYYLQNGRDMYVDQELDINRLSDYDVDHIVPQSFLKDDSIDNKVLTRSDKARGKSDNVPSEEVVKKMKNYWRQLLNAKLITQRKFDNLTKAERGGLSELDKAGFIKRQLVETRQITKHVAQILDSRMNTKYDENDKLIREVKVITLKSKLVSDFRKDFQFYKVREINNYHHAHDAYLNAVVGTALIKKYPKLESEFVYGDYKVYDVRKMIAKSEQEIGKATAKYFFYSNIMNFFKTEITLANGEIRKRPLIETNGETGEIVWDKGRDFATVRKVLSMPQVNIVKKTEVQTGGFSKESILPKRNSDKLIARKKDWDPKKYGGFDSPTVAYSVLVVAKVEKGKSKKLKSVKELLGITIMERSSFEKNPIDFLEAKGYKEVKKDLIIKLPKYSLFELENGRKRMLASAGELQKGNELALPSKYVNFLYLASHYEKLKGSPEDNEQKQLFVEQHKHYLDEIIEQISEFSKRVILADANLDKVLSAYNKHRDKPIREQAENIIHLFTLTNLGAPAAFKYFDTTIDRKRYTSTKEVLDATLIHQSITGLYETRIDLSQLGGDGGGGGGSGGGGSGGTVSLQDEHRLFDIPVTTSLPDVWLQDFPQAWAETGGLGRAKCQAPIIIDLKPTAVPVSIKQYPMSLEAHMGIRQHIIKFLELGVLRPCRSPWNTPLLPVKKPGTQDYRPVQDLREINKRTVDIHPTVPNPYNLLSTLKPDYSWYTVLDLKDAFFCLPLAPQSQELFAFEWKDPERGISGQLTWTRLPQGFKNSPTLFNEALHRDLTDFRTQHPEVTLLQYVDDLLLAAPTKKACTQGTRHLLQELGEKGYRASAKKAQICQTKVTYLGYILSEGKRWLTPGRIETVARIPPPRNPREVREFLGTAGFCRLWIPGFAELAAPLYALTKPSTPFTWQTEHQLAFEALKKALLSAPALGLPDTSKPFTLFLDERQGIAKGVLTQKLGPWKRPVAYLSKKLDPVAAGWPPCLRIMAATAMLVKDSAKLTLGQPLTVITPHTLEAIVRQPPDRWITNARLTHYQALLLDTDRVQFGPPVTLNPATLLPVPENQPSPHDCRQVLAETHGTREDLKDQELPDADHTWYTDGSSYLDSGTRRAGAAVVDGHNTIWAQSLPPGTSAQKAELIALTKALELSKGKKANIYTDSRYAFATAHTHGSIYERRGWLTSEGKEIKNKAEIIALLKALFLPQEVAIIHCPGHQKGQDPVAVGNRQADRVARQAAMAEVLTLATEPDNTSHITAGKRTADGSEFEKRTADGSEFESPKKKAKVE

SEQ ID NO: 1598 - protein, 2102 aa, synthetic construct
  source 1..2102: note = Description of Artificial Sequence: Synthetic polypeptide
MPAAKRVKLDGGDKKYSIGLDIGTNSVGWAVITDEYKVPSKKFKVLGNTDRHSIKKNLIGALLFDSGETAEATRLKRTARRRYTRRKNRICYLQEIFSNEMAKVDDSFFHRLEESFLVEEDKKHERHPIFGNIVDEVAYHEKYPTIYHLRKKLVDSTDKADLRLIYLALAHMIKFRGHFLIEGDLNPDNSDVDKLFIQLVQTYNQLFEENPINASGVDAKAILSARLSKSRRLENLIAQLPGEKKNGLFGNLIALSLGLTPNFKSNFDLAEDAKLQLSKDTYDDDLDNLLAQIGDQYADLFLAAKNLSDAILLSDILRVNTEITKAPLSASMIKRYDEHHQDLTLLKALVRQQLPEKYKEIFFDQSKNGYAGYIDGGASQEEFYKFIKPILEKMDGTEELLVKLNREDLLRKQRTFDNGSIPHQIHLGELHAILRRQEDFYPFLKDNREKIEKILTFRIPYYVGPLARGNSRFAWMTRKSEETITPWNFEEVVDKGASAQSFIERMTNFDKNLPNEKVLPKHSLLYEYFTVYNELTKVKYVTEGMRKPAFLSGEQKKAIVDLLFKTNRKVTVKQLKEDYFKKIECFDSVEISGVEDRFNASLGTYHDLLKIIKDKDFLDNEENEDILEDIVLTLTLFEDREMIEERLKTYAHLFDDKVMKQLKRRRYTGWGRLSRKLINGIRDKQSGKTILDFLKSDGFANRNFMQLIHDDSLTFKEDIQKAQVSGQGDSLHEHIANLAGSPAIKKGILQTVKVVDELVKVMGRHKPENIVIEMARENQTTQKGQKNSRERMKRIEEGIKELGSQILKEHPVENTQLQNEKLYLYYLQNGRDMYVDQELDINRLSDYDVDHIVPQSFLKDDSIDNKVLTRSDKARGKSDNVPSEEVVKKMKNYWRQLLNAKLITQRKFDNLTKAERGGLSELDKAGFIKRQLVETRQITKHVAQILDSRMNTKYDENDKLIREVKVITLKSKLVSDFRKDFQFYKVREINNYHHAHDAYLNAVVGTALIKKYPKLESEFVYGDYKVYDVRKMIAKSEQEIGKATAKYFFYSNIMNFFKTEITLANGEIRKRPLIETNGETGEIVWDKGRDFATVRKVLSMPQVNIVKKTEVQTGGFSKESILPKRNSDKLIARKKDWDPKKYGGFDSPTVAYSVLVVAKVEKGKSKKLKSVKELLGITIMERSSFEKNPIDFLEAKGYKEVKKDLIIKLPKYSLFELENGRKRMLASAGELQKGNELALPSKYVNFLYLASHYEKLKGSPEDNEQKQLFVEQHKHYLDEIIEQISEFSKRVILADANLDKVLSAYNKHRDKPIREQAENIIHLFTLTNLGAPAAFKYFDTTIDRKRYTSTKEVLDATLIHQSITGLYETRIDLSQLGGDGGGGSPAPEAAAKGGTVSLQDEHRLFDIPVTTSLPDVWLQDFPQAWAETGGLGRAKCQAPIIIDLKPTAVPVSIKQYPMSLEAHMGIRQHIIKFLELGVLRPCRSPWNTPLLPVKKPGTQDYRPVQDLREINKRTVDIHPTVPNPYNLLSTLKPDYSWYTVLDLKDAFFCLPLAPQSQELFAFEWKDPERGISGQLTWTRLPQGFKNSPTLFNEALHRDLTDFRTQHPEVTLLQYVDDLLLAAPTKKACTQGTRHLLQELGEKGYRASAKKAQICQTKVTYLGYILSEGKRWLTPGRIETVARIPPPRNPREVREFLGTAGFCRLWIPGFAELAAPLYALTKPSTPFTWQTEHQLAFEALKKALLSAPALGLPDTSKPFTLFLDERQGIAKGVLTQKLGPWKRPVAYLSKKLDPVAAGWPPCLRIMAATAMLVKDSAKLTLGQPLTVITPHTLEAIVRQPPDRWITNARLTHYQALLLDTDRVQFGPPVTLNPATLLPVPENQPSPHDCRQVLAETHGTREDLKDQELPDADHTWYTDGSSYLDSGTRRAGAAVVDGHNTIWAQSLPPGTSAQKAELIALTKALELSKGKKANIYTDSRYAFATAHTHGSIYERRGWLTSEGKEIKNKAEIIALLKALFLPQEVAIIHCPGHQKGQDPVAVGNRQADRVARQAAMAEVLTLATEPDNTSHITAGKRTADGSEFEKRTADGSEFESPKKKAKVE

SEQ ID NO: 1599 - protein, 2100 aa, synthetic construct
  source 1..2100: note = Description of Artificial Sequence: Synthetic polypeptide
MPAAKRVKLDGGDKKYSIGLDIGTNSVGWAVITDEYKVPSKKFKVLGNTDRHSIKKNLIGALLFDSGETAEATRLKRTARRRYTRRKNRICYLQEIFSNEMAKVDDSFFHRLEESFLVEEDKKHERHPIFGNIVDEVAYHEKYPTIYHLRKKLVDSTDKADLRLIYLALAHMIKFRGHFLIEGDLNPDNSDVDKLFIQLVQTYNQLFEENPINASGVDAKAILSARLSKSRRLENLIAQLPGEKKNGLFGNLIALSLGLTPNFKSNFDLAEDAKLQLSKDTYDDDLDNLLAQIGDQYADLFLAAKNLSDAILLSDILRVNTEITKAPLSASMIKRYDEHHQDLTLLKALVRQQLPEKYKEIFFDQSKNGYAGYIDGGASQEEFYKFIKPILEKMDGTEELLVKLNREDLLRKQRTFDNGSIPHQIHLGELHAILRRQEDFYPFLKDNREKIEKILTFRIPYYVGPLARGNSRFAWMTRKSEETITPWNFEEVVDKGASAQSFIERMTNFDKNLPNEKVLPKHSLLYEYFTVYNELTKVKYVTEGMRKPAFLSGEQKKAIVDLLFKTNRKVTVKQLKEDYFKKIECFDSVEISGVEDRFNASLGTYHDLLKIIKDKDFLDNEENEDILEDIVLTLTLFEDREMIEERLKTYAHLFDDKVMKQLKRRRYTGWGRLSRKLINGIRDKQSGKTILDFLKSDGFANRNFMQLIHDDSLTFKEDIQKAQVSGQGDSLHEHIANLAGSPAIKKGILQTVKVVDELVKVMGRHKPENIVIEMARENQTTQKGQKNSRERMKRIEEGIKELGSQILKEHPVENTQLQNEKLYLYYLQNGRDMYVDQELDINRLSDYDVDHIVPQSFLKDDSIDNKVLTRSDKARGKSDNVPSEEVVKKMKNYWRQLLNAKLITQRKFDNLTKAERGGLSELDKAGFIKRQLVETRQITKHVAQILDSRMNTKYDENDKLIREVKVITLKSKLVSDFRKDFQFYKVREINNYHHAHDAYLNAVVGTALIKKYPKLESEFVYGDYKVYDVRKMIAKSEQEIGKATAKYFFYSNIMNFFKTEITLANGEIRKRPLIETNGETGEIVWDKGRDFATVRKVLSMPQVNIVKKTEVQTGGFSKESILPKRNSDKLIARKKDWDPKKYGGFDSPTVAYSVLVVAKVEKGKSKKLKSVKELLGITIMERSSFEKNPIDFLEAKGYKEVKKDLIIKLPKYSLFELENGRKRMLASAGELQKGNELALPSKYVNFLYLASHYEKLKGSPEDNEQKQLFVEQHKHYLDEIIEQISEFSKRVILADANLDKVLSAYNKHRDKPIREQAENIIHLFTLTNLGAPAAFKYFDTTIDRKRYTSTKEVLDATLIHQSITGLYETRIDLSQLGGDGGPAPGGSGSSGGTVSLQDEHRLFDIPVTTSLPDVWLQDFPQAWAETGGLGRAKCQAPIIIDLKPTAVPVSIKQYPMSLEAHMGIRQHIIKFLELGVLRPCRSPWNTPLLPVKKPGTQDYRPVQDLREINKRTVDIHPTVPNPYNLLSTLKPDYSWYTVLDLKDAFFCLPLAPQSQELFAFEWKDPERGISGQLTWTRLPQGFKNSPTLFNEALHRDLTDFRTQHPEVTLLQYVDDLLLAAPTKKACTQGTRHLLQELGEKGYRASAKKAQICQTKVTYLGYILSEGKRWLTPGRIETVARIPPPRNPREVREFLGTAGFCRLWIPGFAELAAPLYALTKPSTPFTWQTEHQLAFEALKKALLSAPALGLPDTSKPFTLFLDERQGIAKGVLTQKLGPWKRPVAYLSKKLDPVAAGWPPCLRIMAATAMLVKDSAKLTLGQPLTVITPHTLEAIVRQPPDRWITNARLTHYQALLLDTDRVQFGPPVTLNPATLLPVPENQPSPHDCRQVLAETHGTREDLKDQELPDADHTWYTDGSSYLDSGTRRAGAAVVDGHNTIWAQSLPPGTSAQKAELIALTKALELSKGKKANIYTDSRYAFATAHTHGSIYERRGWLTSEGKEIKNKAEIIALLKALFLPQEVAIIHCPGHQKGQDPVAVGNRQADRVARQAAMAEVLTLATEPDNTSHITAGKRTADGSEFEKRTADGSEFESPKKKAKVE

SEQ ID NO: 1600 - protein, 2006 aa, synthetic construct
  source 1..2006: note = Description of Artificial Sequence: Synthetic polypeptide
MPAAKRVKLDGGDKKYSIGLDIGTNSVGWAVITDEYKVPSKKFKVLGNTDRHSIKKNLIGALLFDSGETAEATRLKRTARRRYTRRKNRICYLQEIFSNEMAKVDDSFFHRLEESFLVEEDKKHERHPIFGNIVDEVAYHEKYPTIYHLRKKLVDSTDKADLRLIYLALAHMIKFRGHFLIEGDLNPDNSDVDKLFIQLVQTYNQLFEENPINASGVDAKAILSARLSKSRRLENLIAQLPGEKKNGLFGNLIALSLGLTPNFKSNFDLAEDAKLQLSKDTYDDDLDNLLAQIGDQYADLFLAAKNLSDAILLSDILRVNTEITKAPLSASMIKRYDEHHQDLTLLKALVRQQLPEKYKEIFFDQSKNGYAGYIDGGASQEEFYKFIKPILEKMDGTEELLVKLNREDLLRKQRTFDNGSIPHQIHLGELHAILRRQEDFYPFLKDNREKIEKILTFRIPYYVGPLARGNSRFAWMTRKSEETITPWNFEEVVDKGASAQSFIERMTNFDKNLPNEKVLPKHSLLYEYFTVYNELTKVKYVTEGMRKPAFLSGEQKKAIVDLLFKTNRKVTVKQLKEDYFKKIECFDSVEISGVEDRFNASLGTYHDLLKIIKDKDFLDNEENEDILEDIVLTLTLFEDREMIEERLKTYAHLFDDKVMKQLKRRRYTGWGRLSRKLINGIRDKQSGKTILDFLKSDGFANRNFMQLIHDDSLTFKEDIQKAQVSGQGDSLHEHIANLAGSPAIKKGILQTVKVVDELVKVMGRHKPENIVIEMARENQTTQKGQKNSRERMKRIEEGIKELGSQILKEHPVENTQLQNEKLYLYYLQNGRDMYVDQELDINRLSDYDVDHIVPQSFLKDDSIDNKVLTRSDKARGKSDNVPSEEVVKKMKNYWRQLLNAKLITQRKFDNLTKAERGGLSELDKAGFIKRQLVETRQITKHVAQILDSRMNTKYDENDKLIREVKVITLKSKLVSDFRKDFQFYKVREINNYHHAHDAYLNAVVGTALIKKYPKLESEFVYGDYKVYDVRKMIAKSEQEIGKATAKYFFYSNIMNFFKTEITLANGEIRKRPLIETNGETGEIVWDKGRDFATVRKVLSMPQVNIVKKTEVQTGGFSKESILPKRNSDKLIARKKDWDPKKYGGFDSPTVAYSVLVVAKVEKGKSKKLKSVKELLGITIMERSSFEKNPIDFLEAKGYKEVKKDLIIKLPKYSLFELENGRKRMLASAGELQKGNELALPSKYVNFLYLASHYEKLKGSPEDNEQKQLFVEQHKHYLDEIIEQISEFSKRVILADANLDKVLSAYNKHRDKPIREQAENIIHLFTLTNLGAPAAFKYFDTTIDRKRYTSTKEVLDATLIHQSITGLYETRIDLSQLGGDGGEAAAKGGGPAPGGPLGTSDSPVTHADPIDWKSEEPVWVDQWPLTQEKLSAAQQLVQEQLRLGHIEPSTSAWNSPIFVIKKKSGKWRLLQDLRKVNETMMHMGALQPGLPTPSPIPDKSYIIVIDLKDCFYTIPLAPQDCKRFAFSLPSVNFKEPMQRYQWRVLPQGMTNSPTLCQKFVATAIAPVRQRFPQLYLVHYMDDILLAHTDEHLLYQAFSILKQHLSLNGLVIADEKIQTHFPYNYLGFSLYPRVYNTQLVKLQTDHLKTLNDFQKLLGDINWIRPYLKLPTYTLQPLFDILKGDSDPASPRTLSLEGRTALQSIEEAIRQQQITYCDYQRSWGLYILPTPRAPTGVLYQDKPLRWIYLSATPTKHLLPYYELVAKIIAKGRHEAIQYFGMEPPFICVPYALEQQDWLFQFSDNWSIAFANYPGQITHHYPSDKLLQFASSHAFIFPKIVRRQPIPEATLIFTDGSSNGTAALIINHQTYYAQTSFSSAQVVELFAVHQALLTVPTSFNLFTDSSYVVGALQMIETVPIIGTTSPEVLNLFTLIQQVLHCRQHPCFFGHIRAHSTLPGALVQGNHTADVLTKQVFFQSAGKRTADGSEFEKRTADGSEFESPKKKAKVE

SEQ ID NO: 1601 - protein, 2006 aa, synthetic construct
  source 1..2006: note = Description of Artificial Sequence: Synthetic polypeptide
MPAAKRVKLDGGDKKYSIGLDIGTNSVGWAVITDEYKVPSKKFKVLGNTDRHSIKKNLIGALLFDSGETAEATRLKRTARRRYTRRKNRICYLQEIFSNEMAKVDDSFFHRLEESFLVEEDKKHERHPIFGNIVDEVAYHEKYPTIYHLRKKLVDSTDKADLRLIYLALAHMIKFRGHFLIEGDLNPDNSDVDKLFIQLVQTYNQLFEENPINASGVDAKAILSARLSKSRRLENLIAQLPGEKKNGLFGNLIALSLGLTPNFKSNFDLAEDAKLQLSKDTYDDDLDNLLAQIGDQYADLFLAAKNLSDAILLSDILRVNTEITKAPLSASMIKRYDEHHQDLTLLKALVRQQLPEKYKEIFFDQSKNGYAGYIDGGASQEEFYKFIKPILEKMDGTEELLVKLNREDLLRKQRTFDNGSIPHQIHLGELHAILRRQEDFYPFLKDNREKIEKILTFRIPYYVGPLARGNSRFAWMTRKSEETITPWNFEEVVDKGASAQSFIERMTNFDKNLPNEKVLPKHSLLYEYFTVYNELTKVKYVTEGMRKPAFLSGEQKKAIVDLLFKTNRKVTVKQLKEDYFKKIECFDSVEISGVEDRFNASLGTYHDLLKIIKDKDFLDNEENEDILEDIVLTLTLFEDREMIEERLKTYAHLFDDKVMKQLKRRRYTGWGRLSRKLINGIRDKQSGKTILDFLKSDGFANRNFMQLIHDDSLTFKEDIQKAQVSGQGDSLHEHIANLAGSPAIKKGILQTVKVVDELVKVMGRHKPENIVIEMARENQTTQKGQKNSRERMKRIEEGIKELGSQILKEHPVENTQLQNEKLYLYYLQNGRDMYVDQELDINRLSDYDVDHIVPQSFLKDDSIDNKVLTRSDKARGKSDNVPSEEVVKKMKNYWRQLLNAKLITQRKFDNLTKAERGGLSELDKAGFIKRQLVETRQITKHVAQILDSRMNTKYDENDKLIREVKVITLKSKLVSDFRKDFQFYKVREINNYHHAHDAYLNAVVGTALIKKYPKLESEFVYGDYKVYDVRKMIAKSEQEIGKATAKYFFYSNIMNFFKTEITLANGEIRKRPLIETNGETGEIVWDKGRDFATVRKVLSMPQVNIVKKTEVQTGGFSKESILPKRNSDKLIARKKDWDPKKYGGFDSPTVAYSVLVVAKVEKGKSKKLKSVKELLGITIMERSSFEKNPIDFLEAKGYKEVKKDLIIKLPKYSLFELENGRKRMLASAGELQKGNELALPSKYVNFLYLASHYEKLKGSPEDNEQKQLFVEQHKHYLDEIIEQISEFSKRVILADANLDKVLSAYNKHRDKPIREQAENIIHLFTLTNLGAPAAFKYFDTTIDRKRYTSTKEVLDATLIHQSITGLYETRIDLSQLGGDGGGGSEAAAKGSSGGPLGTSDSPVTHADPIDWKSEEPVWVDQWPLTQEKLSAAQQLVQEQLRLGHIEPSTSAWNSPIFVIKKKSGKWRLLQDLRKVNETMMHMGALQPGLPTPSPIPDKSYIIVIDLKDCFYTIPLAPQDCKRFAFSLPSVNFKEPMQRYQWRVLPQGMTNSPTLCQKFVATAIAPVRQRFPQLYLVHYMDDILLAHTDEHLLYQAFSILKQHLSLNGLVIADEKIQTHFPYNYLGFSLYPRVYNTQLVKLQTDHLKTLNDFQKLLGDINWIRPYLKLPTYTLQPLFDILKGDSDPASPRTLSLEGRTALQSIEEAIRQQQITYCDYQRSWGLYILPTPRAPTGVLYQDKPLRWIYLSATPTKHLLPYYELVAKIIAKGRHEAIQYFGMEPPFICVPYALEQQDWLFQFSDNWSIAFANYPGQITHHYPSDKLLQFASSHAFIFPKIVRRQPIPEATLIFTDGSSNGTAALIINHQTYYAQTSFSSAQVVELFAVHQALLTVPTSFNLFTDSSYVVGALQMIETVPIIGTTSPEVLNLFTLIQQVLHCRQHPCFFGHIRAHSTLPGALVQGNHTADVLTKQVFFQSAGKRTADGSEFEKRTADGSEFESPKKKAKVE

SEQ ID NO: 1602 - protein, 2013 aa, synthetic construct
  source 1..2013: note = Description of Artificial Sequence: Synthetic polypeptide
MPAAKRVKLDGGDKKYSIGLDIGTNSVGWAVITDEYKVPSKKFKVLGNTDRHSIKKNLIGALLFDSGETAEATRLKRTARRRYTRRKNRICYLQEIFSNEMAKVDDSFFHRLEESFLVEEDKKHERHPIFGNIVDEVAYHEKYPTIYHLRKKLVDSTDKADLRLIYLALAHMIKFRGHFLIEGDLNPDNSDVDKLFIQLVQTYNQLFEENPINASGVDAKAILSARLSKSRRLENLIAQLPGEKKNGLFGNLIALSLGLTPNFKSNFDLAEDAKLQLSKDTYDDDLDNLLAQIGDQYADLFLAAKNLSDAILLSDILRVNTEITKAPLSASMIKRYDEHHQDLTLLKALVRQQLPEKYKEIFFDQSKNGYAGYIDGGASQEEFYKFIKPILEKMDGTEELLVKLNREDLLRKQRTFDNGSIPHQIHLGELHAILRRQEDFYPFLKDNREKIEKILTFRIPYYVGPLARGNSRFAWMTRKSEETITPWNFEEVVDKGASAQSFIERMTNFDKNLPNEKVLPKHSLLYEYFTVYNELTKVKYVTEGMRKPAFLSGEQKKAIVDLLFKTNRKVTVKQLKEDYFKKIECFDSVEISGVEDRFNASLGTYHDLLKIIKDKDFLDNEENEDILEDIVLTLTLFEDREMIEERLKTYAHLFDDKVMKQLKRRRYTGWGRLSRKLINGIRDKQSGKTILDFLKSDGFANRNFMQLIHDDSLTFKEDIQKAQVSGQGDSLHEHIANLAGSPAIKKGILQTVKVVDELVKVMGRHKPENIVIEMARENQTTQKGQKNSRERMKRIEEGIKELGSQILKEHPVENTQLQNEKLYLYYLQNGRDMYVDQELDINRLSDYDVDHIVPQSFLKDDSIDNKVLTRSDKARGKSDNVPSEEVVKKMKNYWRQLLNAKLITQRKFDNLTKAERGGLSELDKAGFIKRQLVETRQITKHVAQILDSRMNTKYDENDKLIREVKVITLKSKLVSDFRKDFQFYKVREINNYHHAHDAYLNAVVGTALIKKYPKLESEFVYGDYKVYDVRKMIAKSEQEIGKATAKYFFYSNIMNFFKTEITLANGEIRKRPLIETNGETGEIVWDKGRDFATVRKVLSMPQVNIVKKTEVQTGGFSKESILPKRNSDKLIARKKDWDPKKYGGFDSPTVAYSVLVVAKVEKGKSKKLKSVKELLGITIMERSSFEKNPIDFLEAKGYKEVKKDLIIKLPKYSLFELENGRKRMLASAGELQKGNELALPSKYVNFLYLASHYEKLKGSPEDNEQKQLFVEQHKHYLDEIIEQISEFSKRVILADANLDKVLSAYNKHRDKPIREQAENIIHLFTLTNLGAPAAFKYFDTTIDRKRYTSTKEVLDATLIHQSITGLYETRIDLSQLGGDGGGSSGSSGSSGSSGSSGSSGGPLGTSDSPVTHADPIDWKSEEPVWVDQWPLTQEKLSAAQQLVQEQLRLGHIEPSTSAWNSPIFVIKKKSGKWRLLQDLRKVNETMMHMGALQPGLPTPSPIPDKSYIIVIDLKDCFYTIPLAPQDCKRFAFSLPSVNFKEPMQRYQWRVLPQGMTNSPTLCQKFVATAIAPVRQRFPQLYLVHYMDDILLAHTDEHLLYQAFSILKQHLSLNGLVIADEKIQTHFPYNYLGFSLYPRVYNTQLVKLQTDHLKTLNDFQKLLGDINWIRPYLKLPTYTLQPLFDILKGDSDPASPRTLSLEGRTALQSIEEAIRQQQITYCDYQRSWGLYILPTPRAPTGVLYQDKPLRWIYLSATPTKHLLPYYELVAKIIAKGRHEAIQYFGMEPPFICVPYALEQQDWLFQFSDNWSIAFANYPGQITHHYPSDKLLQFASSHAFIFPKIVRRQPIPEATLIFTDGSSNGTAALIINHQTYYAQTSFSSAQVVELFAVHQALLTVPTSFNLFTDSSYVVGALQMIETVPIIGTTSPEVLNLFTLIQQVLHCRQHPCFFGHIRAHSTLPGALVQGNHTADVLTKQVFFQSAGKRTADGSEFEKRTADGSEFESPKKKAKVE

SEQ ID NO: 1603 - protein, 2001 aa, synthetic construct
  source 1..2001: note = Description of Artificial Sequence: Synthetic polypeptide
MPAAKRVKLDGGDKKYSIGLDIGTNSVGWAVITDEYKVPSKKFKVLGNTDRHSIKKNLIGALLFDSGETAEATRLKRTARRRYTRRKNRICYLQEIFSNEMAKVDDSFFHRLEESFLVEEDKKHERHPIFGNIVDEVAYHEKYPTIYHLRKKLVDSTDKADLRLIYLALAHMIKFRGHFLIEGDLNPDNSDVDKLFIQLVQTYNQLFEENPINASGVDAKAILSARLSKSRRLENLIAQLPGEKKNGLFGNLIALSLGLTPNFKSNFDLAEDAKLQLSKDTYDDDLDNLLAQIGDQYADLFLAAKNLSDAILLSDILRVNTEITKAPLSASMIKRYDEHHQDLTLLKALVRQQLPEKYKEIFFDQSKNGYAGYIDGGASQEEFYKFIKPILEKMDGTEELLVKLNREDLLRKQRTFDNGSIPHQIHLGELHAILRRQEDFYPFLKDNREKIEKILTFRIPYYVGPLARGNSRFAWMTRKSEETITPWNFEEVVDKGASAQSFIERMTNFDKNLPNEKVLPKHSLLYEYFTVYNELTKVKYVTEGMRKPAFLSGEQKKAIVDLLFKTNRKVTVKQLKEDYFKKIECFDSVEISGVEDRFNASLGTYHDLLKIIKDKDFLDNEENEDILEDIVLTLTLFEDREMIEERLKTYAHLFDDKVMKQLKRRRYTGWGRLSRKLINGIRDKQSGKTILDFLKSDGFANRNFMQLIHDDSLTFKEDIQKAQVSGQGDSLHEHIANLAGSPAIKKGILQTVKVVDELVKVMGRHKPENIVIEMARENQTTQKGQKNSRERMKRIEEGIKELGSQILKEHPVENTQLQNEKLYLYYLQNGRDMYVDQELDINRLSDYDVDHIVPQSFLKDDSIDNKVLTRSDKARGKSDNVPSEEVVKKMKNYWRQLLNAKLITQRKFDNLTKAERGGLSELDKAGFIKRQLVETRQITKHVAQILDSRMNTKYDENDKLIREVKVITLKSKLVSDFRKDFQFYKVREINNYHHAHDAYLNAVVGTALIKKYPKLESEFVYGDYKVYDVRKMIAKSEQEIGKATAKYFFYSNIMNFFKTEITLANGEIRKRPLIETNGETGEIVWDKGRDFATVRKVLSMPQVNIVKKTEVQTGGFSKESILPKRNSDKLIARKKDWDPKKYGGFDSPTVAYSVLVVAKVEKGKSKKLKSVKELLGITIMERSSFEKNPIDFLEAKGYKEVKKDLIIKLPKYSLFELENGRKRMLASAGELQKGNELALPSKYVNFLYLASHYEKLKGSPEDNEQKQLFVEQHKHYLDEIIEQISEFSKRVILADANLDKVLSAYNKHRDKPIREQAENIIHLFTLTNLGAPAAFKYFDTTIDRKRYTSTKEVLDATLIHQSITGLYETRIDLSQLGGDGGGSSGSSGGPLGTSDSPVTHADPIDWKSEEPVWVDQWPLTQEKLSAAQQLVQEQLRLGHIEPSTSAWNSPIFVIKKKSGKWRLLQDLRKVNETMMHMGALQPGLPTPSPIPDKSYIIVIDLKDCFYTIPLAPQDCKRFAFSLPSVNFKEPMQRYQWRVLPQGMTNSPTLCQKFVATAIAPVRQRFPQLYLVHYMDDILLAHTDEHLLYQAFSILKQHLSLNGLVIADEKIQTHFPYNYLGFSLYPRVYNTQLVKLQTDHLKTLNDFQKLLGDINWIRPYLKLPTYTLQPLFDILKGDSDPASPRTLSLEGRTALQSIEEAIRQQQITYCDYQRSWGLYILPTPRAPTGVLYQDKPLRWIYLSATPTKHLLPYYELVAKIIAKGRHEAIQYFGMEPPFICVPYALEQQDWLFQFSDNWSIAFANYPGQITHHYPSDKLLQFASSHAFIFPKIVRRQPIPEATLIFTDGSSNGTAALIINHQTYYAQTSFSSAQVVELFAVHQALLTVPTSFNLFTDSSYVVGALQMIETVPIIGTTSPEVLNLFTLIQQVLHCRQHPCFFGHIRAHSTLPGALVQGNHTADVLTKQVFFQSAGKRTADGSEFEKRTADGSEFESPKKKAKVE

SEQ ID NO: 1604 - protein, 2216 aa, synthetic construct
  source 1..2216: note = Description of Artificial Sequence: Synthetic polypeptide
MPAAKRVKLDGGDKKYSIGLDIGTNSVGWAVITDEYKVPSKKFKVLGNTDRHSIKKNLIGALLFDSGETAEATRLKRTARRRYTRRKNRICYLQEIFSNEMAKVDDSFFHRLEESFLVEEDKKHERHPIFGNIVDEVAYHEKYPTIYHLRKKLVDSTDKADLRLIYLALAHMIKFRGHFLIEGDLNPDNSDVDKLFIQLVQTYNQLFEENPINASGVDAKAILSARLSKSRRLENLIAQLPGEKKNGLFGNLIALSLGLTPNFKSNFDLAEDAKLQLSKDTYDDDLDNLLAQIGDQYADLFLAAKNLSDAILLSDILRVNTEITKAPLSASMIKRYDEHHQDLTLLKALVRQQLPEKYKEIFFDQSKNGYAGYIDGGASQEEFYKFIKPILEKMDGTEELLVKLNREDLLRKQRTFDNGSIPHQIHLGELHAILRRQEDFYPFLKDNREKIEKILTFRIPYYVGPLARGNSRFAWMTRKSEETITPWNFEEVVDKGASAQSFIERMTNFDKNLPNEKVLPKHSLLYEYFTVYNELTKVKYVTEGMRKPAFLSGEQKKAIVDLLFKTNRKVTVKQLKEDYFKKIECFDSVEISGVEDRFNASLGTYHDLLKIIKDKDFLDNEENEDILEDIVLTLTLFEDREMIEERLKTYAHLFDDKVMKQLKRRRYTGWGRLSRKLINGIRDKQSGKTILDFLKSDGFANRNFMQLIHDDSLTFKEDIQKAQVSGQGDSLHEHIANLAGSPAIKKGILQTVKVVDELVKVMGRHKPENIVIEMARENQTTQKGQKNSRERMKRIEEGIKELGSQILKEHPVENTQLQNEKLYLYYLQNGRDMYVDQELDINRLSDYDVDHIVPQSFLKDDSIDNKVLTRSDKARGKSDNVPSEEVVKKMKNYWRQLLNAKLITQRKFDNLTKAERGGLSELDKAGFIKRQLVETRQITKHVAQILDSRMNTKYDENDKLIREVKVITLKSKLVSDFRKDFQFYKVREINNYHHAHDAYLNAVVGTALIKKYPKLESEFVYGDYKVYDVRKMIAKSEQEIGKATAKYFFYSNIMNFFKTEITLANGEIRKRPLIETNGETGEIVWDKGRDFATVRKVLSMPQVNIVKKTEVQTGGFSKESILPKRNSDKLIARKKDWDPKKYGGFDSPTVAYSVLVVAKVEKGKSKKLKSVKELLGITIMERSSFEKNPIDFLEAKGYKEVKKDLIIKLPKYSLFELENGRKRMLASAGELQKGNELALPSKYVNFLYLASHYEKLKGSPEDNEQKQLFVEQHKHYLDEIIEQISEFSKRVILADANLDKVLSAYNKHRDKPIREQAENIIHLFTLTNLGAPAAFKYFDTTIDRKRYTSTKEVLDATLIHQSITGLYETRIDLSQLGGDGGPAPGSSGGGGGTLGDQGSRGSDPLPEPRVTLTVEGIPTEFLVNTGAEHSVLTKPMGKMGSKRTVVAGATGSKVYPWTTKRLLKIGQKQVTHSFLVIPECPAPLLGRDLLTKLKAQIQFSTEGPQVTWEDRPAMCLVLNLEEEYRLHEKPVPPSIDPSWLQLFPMVWAEKAGMGLANQVPPVVVELKSDASPVAVRQYPMSKEAREGIRPHIQRFLDLGILVPCQSPWNTPLLPVKKPGTNDYRPVQDLREVNKRVQDIHPTVPNPYNLLSSLPPSHTWYSVLDLKDAFFCLKLHPNSQPLFAFEWRDPEKGNTGQLTWTRLPQGFKNSPTLFDEALHRDLASFRALNPQVVMLQYVDDLLVAAPTYRDCKEGTRRLLQELSKLGYRVSAKKAQLCREEVTYLGYLLKGGKRWLTPARKATVMKIPTPTTPRQVREFLGTAGFCRLWIPGFASLAAPLYPLTREKVPFTWTEAHQEAFGRIKEALLSAPALALPDLTKPFALYVDEKEGVARGVLTQTLGPWRRPVAYLSKKLDPVASGWPTCLKAIAAVALLLKDADKLTLGQNVLVIAPHNLESIVRQPPDRWMTNARMTHYQSLLLNERVSFAPPAILNPATLLPVESDDTPIHICSEILAEETGTRPDLRDQPLPGVPAWYTDGSSFIMDGRRQAGAAIVDNKRTVWASNLPEGTSAQKAELIALTQALRLAEGKSINIYTDSRYAFATAHVHGAIYKQRGLLTSAGKDIKNKEEILALLEAIHLPKRVAIIHCPGHQRGTDPVATGNRKADEAAKQAAQSTRILTETTKNAGKRTADGSEFEKRTADGSEFESPKKKAKVE

SEQ ID NO: 1605 - protein, 2218 aa, synthetic construct
  source 1..2218: note = Description of Artificial Sequence: Synthetic polypeptide
MPAAKRVKLDGGDKKYSIGLDIGTNSVGWAVITDEYKVPSKKFKVLGNTDRHSIKKNLIGALLFDSGETAEATRLKRTARRRYTRRKNRICYLQEIFSNEMAKVDDSFFHRLEESFLVEEDKKHERHPIFGNIVDEVAYHEKYPTIYHLRKKLVDSTDKADLRLIYLALAHMIKFRGHFLIEGDLNPDNSDVDKLFIQLVQTYNQLFEENPINASGVDAKAILSARLSKSRRLENLIAQLPGEKKNGLFGNLIALSLGLTPNFKSNFDLAEDAKLQLSKDTYDDDLDNLLAQIGDQYADLFLAAKNLSDAILLSDILRVNTEITKAPLSASMIKRYDEHHQDLTLLKALVRQQLPEKYKEIFFDQSKNGYAGYIDGGASQEEFYKFIKPILEKMDGTEELLVKLNREDLLRKQRTFDNGSIPHQIHLGELHAILRRQEDFYPFLKDNREKIEKILTFRIPYYVGPLARGNSRFAWMTRKSEETITPWNFEEVVDKGASAQSFIERMTNFDKNLPNEKVLPKHSLLYEYFTVYNELTKVKYVTEGMRKPAFLSGEQKKAIVDLLFKTNRKVTVKQLKEDYFKKIECFDSVEISGVEDRFNASLGTYHDLLKIIKDKDFLDNEENEDILEDIVLTLTLFEDREMIEERLKTYAHLFDDKVMKQLKRRRYTGWGRLSRKLINGIRDKQSGKTILDFLKSDGFANRNFMQLIHDDSLTFKEDIQKAQVSGQGDSLHEHIANLAGSPAIKKGILQTVKVVDELVKVMGRHKPENIVIEMARENQTTQKGQKNSRERMKRIEEGIKELGSQILKEHPVENTQLQNEKLYLYYLQNGRDMYVDQELDINRLSDYDVDHIVPQSFLKDDSIDNKVLTRSDKARGKSDNVPSEEVVKKMKNYWRQLLNAKLITQRKFDNLTKAERGGLSELDKAGFIKRQLVETRQITKHVAQILDSRMNTKYDENDKLIREVKVITLKSKLVSDFRKDFQFYKVREINNYHHAHDAYLNAVVGTALIKKYPKLESEFVYGDYKVYDVRKMIAKSEQEIGKATAKYFFYSNIMNFFKTEITLANGEIRKRPLIETNGETGEIVWDKGRDFATVRKVLSMPQVNIVKKTEVQTGGFSKESILPKRNSDKLIARKKDWDPKKYGGFDSPTVAYSVLVVAKVEKGKSKKLKSVKELLGITIMERSSFEKNPIDFLEAKGYKEVKKDLIIKLPKYSLFELENGRKRMLASAGELQKGNELALPSKYVNFLYLASHYEKLKGSPEDNEQKQLFVEQHKHYLDEIIEQISEFSKRVILADANLDKVLSAYNKHRDKPIREQAENIIHLFTLTNLGAPAAFKYFDTTIDRKRYTSTKEVLDATLIHQSITGLYETRIDLSQLGGDGGPAPGGGEAAAKGGTLGDQGSRGSDPLPEPRVTLTVEGIPTEFLVNTGAEHSVLTKPMGKMGSKRTVVAGATGSKVYPWTTKRLLKIGQKQVTHSFLVIPECPAPLLGRDLLTKLKAQIQFSTEGPQVTWEDRPAMCLVLNLEEEYRLHEKPVPPSIDPSWLQLFPMVWAEKAGMGLANQVPPVVVELKSDASPVAVRQYPMSKEAREGIRPHIQRFLDLGILVPCQSPWNTPLLPVKKPGTNDYRPVQDLREVNKRVQDIHPTVPNPYNLLSSLPPSHTWYSVLDLKDAFFCLKLHPNSQPLFAFEWRDPEKGNTGQLTWTRLPQGFKNSPTLFDEALHRDLASFRALNPQVVMLQYVDDLLVAAPTYRDCKEGTRRLLQELSKLGYRVSAKKAQLCREEVTYLGYLLKGGKRWLTPARKATVMKIPTPTTPRQVREFLGTAGFCRLWIPGFASLAAPLYPLTREKVPFTWTEAHQEAFGRIKEALLSAPALALPDLTKPFALYVDEKEGVARGVLTQTLGPWRRPVAYLSKKLDPVASGWPTCLKAIAAVALLLKDADKLTLGQNVLVIAPHNLESIVRQPPDRWMTNARMTHYQSLLLNERVSFAPPAILNPATLLPVESDDTPIHICSEILAEETGTRPDLRDQPLPGVPAWYTDGSSFIMDGRRQAGAAIVDNKRTVWASNLPEGTSAQKAELIALTQALRLAEGKSINIYTDSRYAFATAHVHGAIYKQRGLLTSAGKDIKNKEEILALLEAIHLPKRVAIIHCPGHQRGTDPVATGNRKADEAAKQAAQSTRILTETTKNAGKRTADGSEFEKRTADGSEFESPKKKAKVE

SEQ ID NO: 1606 - protein, 2218 aa, synthetic construct
  source 1..2218: note = Description of Artificial Sequence: Synthetic polypeptide
MPAAKRVKLDGGDKKYSIGLDIGTNSVGWAVITDEYKVPSKKFKVLGNTDRHSIKKNLIGALLFDSGETAEATRLKRTARRRYTRRKNRICYLQEIFSNEMAKVDDSFFHRLEESFLVEEDKKHERHPIFGNIVDEVAYHEKYPTIYHLRKKLVDSTDKADLRLIYLALAHMIKFRGHFLIEGDLNPDNSDVDKLFIQLVQTYNQLFEENPINASGVDAKAILSARLSKSRRLENLIAQLPGEKKNGLFGNLIALSLGLTPNFKSNFDLAEDAKLQLSKDTYDDDLDNLLAQIGDQYADLFLAAKNLSDAILLSDILRVNTEITKAPLSASMIKRYDEHHQDLTLLKALVRQQLPEKYKEIFFDQSKNGYAGYIDGGASQEEFYKFIKPILEKMDGTEELLVKLNREDLLRKQRTFDNGSIPHQIHLGELHAILRRQEDFYPFLKDNREKIEKILTFRIPYYVGPLARGNSRFAWMTRKSEETITPWNFEEVVDKGASAQSFIERMTNFDKNLPNEKVLPKHSLLYEYFTVYNELTKVKYVTEGMRKPAFLSGEQKKAIVDLLFKTNRKVTVKQLKEDYFKKIECFDSVEISGVEDRFNASLGTYHDLLKIIKDKDFLDNEENEDILEDIVLTLTLFEDREMIEERLKTYAHLFDDKVMKQLKRRRYTGWGRLSRKLINGIRDKQSGKTILDFLKSDGFANRNFMQLIHDDSLTFKEDIQKAQVSGQGDSLHEHIANLAGSPAIKKGILQTVKVVDELVKVMGRHKPENIVIEMARENQTTQKGQKNSRERMKRIEEGIKELGSQILKEHPVENTQLQNEKLYLYYLQNGRDMYVDQELDINRLSDYDVDHIVPQSFLKDDSIDNKVLTRSDKARGKSDNVPSEEVVKKMKNYWRQLLNAKLITQRKFDNLTKAERGGLSELDKAGFIKRQLVETRQITKHVAQILDSRMNTKYDENDKLIREVKVITLKSKLVSDFRKDFQFYKVREINNYHHAHDAYLNAVVGTALIKKYPKLESEFVYGDYKVYDVRKMIAKSEQEIGKATAKYFFYSNIMNFFKTEITLANGEIRKRPLIETNGETGEIVWDKGRDFATVRKVLSMPQVNIVKKTEVQTGGFSKESILPKRNSDKLIARKKDWDPKKYGGFDSPTVAYSVLVVAKVEKGKSKKLKSVKELLGITIMERSSFEKNPIDFLEAKGYKEVKKDLIIKLPKYSLFELENGRKRMLASAGELQKGNELALPSKYVNFLYLASHYEKLKGSPEDNEQKQLFVEQHKHYLDEIIEQISEFSKRVILADANLDKVLSAYNKHRDKPIREQAENIIHLFTLTNLGAPAAFKYFDTTIDRKRYTSTKEVLDATLIHQSITGLYETRIDLSQLGGDGGGGGGSSEAAAKGGTLGDQGSRGSDPLPEPRVTLTVEGIPTEFLVNTGAEHSVLTKPMGKMGSKRTVVAGATGSKVYPWTTKRLLKIGQKQVTHSFLVIPECPAPLLGRDLLTKLKAQIQFSTEGPQVTWEDRPAMCLVLNLEEEYRLHEKPVPPSIDPSWLQLFPMVWAEKAGMGLANQVPPVVVELKSDASPVAVRQYPMSKEAREGIRPHIQRFLDLGILVPCQSPWNTPLLPVKKPGTNDYRPVQDLREVNKRVQDIHPTVPNPYNLLSSLPPSHTWYSVLDLKDAFFCLKLHPNSQPLFAFEWRDPEKGNTGQLTWTRLPQGFKNSPTLFDEALHRDLASFRALNPQVVMLQYVDDLLVAAPTYRDCKEGTRRLLQELSKLGYRVSAKKAQLCREEVTYLGYLLKGGKRWLTPARKATVMKIPTPTTPRQVREFLGTAGFCRLWIPGFASLAAPLYPLTREKVPFTWTEAHQEAFGRIKEALLSAPALALPDLTKPFALYVDEKEGVARGVLTQTLGPWRRPVAYLSKKLDPVASGWPTCLKAIAAVALLLKDADKLTLGQNVLVIAPHNLESIVRQPPDRWMTNARMTHYQSLLLNERVSFAPPAILNPATLLPVESDDTPIHICSEILAEETGTRPDLRDQPLPGVPAWYTDGSSFIMDGRRQAGAAIVDNKRTVWASNLPEGTSAQKAELIALTQALRLAEGKSINIYTDSRYAFATAHVHGAIYKQRGLLTSAGKDIKNKEEILALLEAIHLPKRVAIIHCPGHQRGTDPVATGNRKADEAAKQAAQSTRILTETTKNAGKRTADGSEFEKRTADGSEFESPKKKAKVE

SEQ ID NO: 1607 - protein, 2213 aa, synthetic construct
  source 1..2213: note = Description of Artificial Sequence: Synthetic polypeptide
MPAAKRVKLDGGDKKYSIGLDIGTNSVGWAVITDEYKVPSKKFKVLGNTDRHSIKKNLIGALLFDSGETAEATRLKRTARRRYTRRKNRICYLQEIFSNEMAKVDDSFFHRLEESFLVEEDKKHERHPIFGNIVDEVAYHEKYPTIYHLRKKLVDSTDKADLRLIYLALAHMIKFRGHFLIEGDLNPDNSDVDKLFIQLVQTYNQLFEENPINASGVDAKAILSARLSKSRRLENLIAQLPGEKKNGLFGNLIALSLGLTPNFKSNFDLAEDAKLQLSKDTYDDDLDNLLAQIGDQYADLFLAAKNLSDAILLSDILRVNTEITKAPLSASMIKRYDEHHQDLTLLKALVRQQLPEKYKEIFFDQSKNGYAGYIDGGASQEEFYKFIKPILEKMDGTEELLVKLNREDLLRKQRTFDNGSIPHQIHLGELHAILRRQEDFYPFLKDNREKIEKILTFRIPYYVGPLARGNSRFAWMTRKSEETITPWNFEEVVDKGASAQSFIERMTNFDKNLPNEKVLPKHSLLYEYFTVYNELTKVKYVTEGMRKPAFLSGEQKKAIVDLLFKTNRKVTVKQLKEDYFKKIECFDSVEISGVEDRFNASLGTYHDLLKIIKDKDFLDNEENEDILEDIVLTLTLFEDREMIEERLKTYAHLFDDKVMKQLKRRRYTGWGRLSRKLINGIRDKQSGKTILDFLKSDGFANRNFMQLIHDDSLTFKEDIQKAQVSGQGDSLHEHIANLAGSPAIKKGILQTVKVVDELVKVMGRHKPENIVIEMARENQTTQKGQKNSRERMKRIEEGIKELGSQILKEHPVENTQLQNEKLYLYYLQNGRDMYVDQELDINRLSDYDVDHIVPQSFLKDDSIDNKVLTRSDKARGKSDNVPSEEVVKKMKNYWRQLLNAKLITQRKFDNLTKAERGGLSELDKAGFIKRQLVETRQITKHVAQILDSRMNTKYDENDKLIREVKVITLKSKLVSDFRKDFQFYKVREINNYHHAHDAYLNAVVGTALIKKYPKLESEFVYGDYKVYDVRKMIAKSEQEIGKATAKYFFYSNIMNFFKTEITLANGEIRKRPLIETNGETGEIVWDKGRDFATVRKVLSMPQVNIVKKTEVQTGGFSKESILPKRNSDKLIARKKDWDPKKYGGFDSPTVAYSVLVVAKVEKGKSKKLKSVKELLGITIMERSSFEKNPIDFLEAKGYKEVKKDLIIKLPKYSLFELENGRKRMLASAGELQKGNELALPSKYVNFLYLASHYEKLKGSPEDNEQKQLFVEQHKHYLDEIIEQISEFSKRVILADANLDKVLSAYNKHRDKPIREQAENIIHLFTLTNLGAPAAFKYFDTTIDRKRYTSTKEVLDATLIHQSITGLYETRIDLSQLGGDGGGGSPAPGGTLGDQGSRGSDPLPEPRVTLTVEGIPTEFLVNTGAEHSVLTKPMGKMGSKRTVVAGATGSKVYPWTTKRLLKIGQKQVTHSFLVIPECPAPLLGRDLLTKLKAQIQFSTEGPQVTWEDRPAMCLVLNLEEEYRLHEKPVPPSIDPSWLQLFPMVWAEKAGMGLANQVPPVVVELKSDASPVAVRQYPMSKEAREGIRPHIQRFLDLGILVPCQSPWNTPLLPVKKPGTNDYRPVQDLREVNKRVQDIHPTVPNPYNLLSSLPPSHTWYSVLDLKDAFFCLKLHPNSQPLFAFEWRDPEKGNTGQLTWTRLPQGFKNSPTLFDEALHRDLASFRALNPQVVMLQYVDDLLVAAPTYRDCKEGTRRLLQELSKLGYRVSAKKAQLCREEVTYLGYLLKGGKRWLTPARKATVMKIPTPTTPRQVREFLGTAGFCRLWIPGFASLAAPLYPLTREKVPFTWTEAHQEAFGRIKEALLSAPALALPDLTKPFALYVDEKEGVARGVLTQTLGPWRRPVAYLSKKLDPVASGWPTCLKAIAAVALLLKDADKLTLGQNVLVIAPHNLESIVRQPPDRWMTNARMTHYQSLLLNERVSFAPPAILNPATLLPVESDDTPIHICSEILAEETGTRPDLRDQPLPGVPAWYTDGSSFIMDGRRQAGAAIVDNKRTVWASNLPEGTSAQKAELIALTQALRLAEGKSINIYTDSRYAFATAHVHGAIYKQRGLLTSAGKDIKNKEEILALLEAIHLPKRVAIIHCPGHQRGTDPVATGNRKADEAAKQAAQSTRILTETTKNAGKRTADGSEFEKRTADGSEFESPKKKAKVE

SEQ ID NO: 1608 - protein, 2216 aa, synthetic construct
  source 1..2216: note = Description of Artificial Sequence: Synthetic polypeptide
MPAAKRVKLDGGDKKYSIGLDIGTNSVGWAVITDEYKVPSKKFKVLGNTDRHSIKKNLIGALLFDSGETAEATRLKRTARRRYTRRKNRICYLQEIFSNEMAKVDDSFFHRLEESFLVEEDKKHERHPIFGNIVDEVAYHEKYPTIYHLRKKLVDSTDKADLRLIYLALAHMIKFRGHFLIEGDLNPDNSDVDKLFIQLVQTYNQLFEENPINASGVDAKAILSARLSKSRRLENLIAQLPGEKKNGLFGNLIALSLGLTPNFKSNFDLAEDAKLQLSKDTYDDDLDNLLAQIGDQYADLFLAAKNLSDAILLSDILRVNTEITKAPLSASMIKRYDEHHQDLTLLKALVRQQLPEKYKEIFFDQSKNGYAGYIDGGASQEEFYKFIKPILEKMDGTEELLVKLNREDLLRKQRTFDNGSIPHQIHLGELHAILRRQEDFYPFLKDNREKIEKILTFRIPYYVGPLARGNSRFAWMTRKSEETITPWNFEEVVDKGASAQSFIERMTNFDKNLPNEKVLPKHSLLYEYFTVYNELTKVKYVTEGMRKPAFLSGEQKKAIVDLLFKTNRKVTVKQLKEDYFKKIECFDSVEISGVEDRFNASLGTYHDLLKIIKDKDFLDNEENEDILEDIVLTLTLFEDREMIEERLKTYAHLFDDKVMKQLKRRRYTGWGRLSRKLINGIRDKQSGKTILDFLKSDGFANRNFMQLIHDDSLTFKEDIQKAQVSGQGDSLHEHIANLAGSPAIKKGILQTVKVVDELVKVMGRHKPENIVIEMARENQTTQKGQKNSRERMKRIEEGIKELGSQILKEHPVENTQLQNEKLYLYYLQNGRDMYVDQELDINRLSDYDVDHIVPQSFLKDDSIDNKVLTRSDKARGKSDNVPSEEVVKKMKNYWRQLLNAKLITQRKFDNLTKAERGGLSELDKAGFIKRQLVETRQITKHVAQILDSRMNTKYDENDKLIREVKVITLKSKLVSDFRKDFQFYKVREINNYHHAHDAYLNAVVGTALIKKYPKLESEFVYGDYKVYDVRKMIAKSEQEIGKATAKYFFYSNIMNFFKTEITLANGEIRKRPLIETNGETGEIVWDKGRDFATVRKVLSMPQVNIVKKTEVQTGGFSKESILPKRNSDKLIARKKDWDPKKYGGFDSPTVAYSVLVVAKVEKGKSKKLKSVKELLGITIMERSSFEKNPIDFLEAKGYKEVKKDLIIKLPKYSLFELENGRKRMLASAGELQKGNELALPSKYVNFLYLASHYEKLKGSPEDNEQKQLFVEQHKHYLDEIIEQISEFSKRVILADANLDKVLSAYNKHRDKPIREQAENIIHLFTLTNLGAPAAFKYFDTTIDRKRYTSTKEVLDATLIHQSITGLYETRIDLSQLGGDGGGGSGGGGSSGGTLGDQGSRGSDPLPEPRVTLTVEGIPTEFLVNTGAEHSVLTKPMGKMGSKRTVVAGATGSKVYPWTTKRLLKIGQKQVTHSFLVIPECPAPLLGRDLLTKLKAQIQFSTEGPQVTWEDRPAMCLVLNLEEEYRLHEKPVPPSIDPSWLQLFPMVWAEKAGMGLANQVPPVVVELKSDASPVAVRQYPMSKEAREGIRPHIQRFLDLGILVPCQSPWNTPLLPVKKPGTNDYRPVQDLREVNKRVQDIHPTVPNPYNLLSSLPPSHTWYSVLDLKDAFFCLKLHPNSQPLFAFEWRDPEKGNTGQLTWTRLPQGFKNSPTLFDEALHRDLASFRALNPQVVMLQYVDDLLVAAPTYRDCKEGTRRLLQELSKLGYRVSAKKAQLCREEVTYLGYLLKGGKRWLTPARKATVMKIPTPTTPRQVREFLGTAGFCRLWIPGFASLAAPLYPLTREKVPFTWTEAHQEAFGRIKEALLSAPALALPDLTKPFALYVDEKEGVARGVLTQTLGPWRRPVAYLSKKLDPVASGWPTCLKAIAAVALLLKDADKLTLGQNVLVIAPHNLESIVRQPPDRWMTNARMTHYQSLLLNERVSFAPPAILNPATLLPVESDDTPIHICSEILAEETGTRPDLRDQPLPGVPAWYTDGSSFIMDGRRQAGAAIVDNKRTVWASNLPEGTSAQKAELIALTQALRLAEGKSINIYTDSRYAFATAHVHGAIYKQRGLLTSAGKDIKNKEEILALLEAIHLPKRVAIIHCPGHQRGTDPVATGNRKADEAAKQAAQSTRILTETTKNAGKRTADGSEFEKRTADGSEFESPKKKAKVE

SEQ ID NO: 1609 - protein, 2220 aa, synthetic construct
  source 1..2220: note = Description of Artificial Sequence: Synthetic polypeptide
MPAAKRVKLDGGDKKYSIGLDIGTNSVGWAVITDEYKVPSKKFKVLGNTDRHSIKKNLIGALLFDSGETAEATRLKRTARRRYTRRKNRICYLQEIFSNEMAKVDDSFFHRLEESFLVEEDKKHERHPIFGNIVDEVAYHEKYPTIYHLRKKLVDSTDKADLRLIYLALAHMIKFRGHFLIEGDLNPDNSDVDKLFIQLVQTYNQLFEENPINASGVDAKAILSARLSKSRRLENLIAQLPGEKKNGLFGNLIALSLGLTPNFKSNFDLAEDAKLQLSKDTYDDDLDNLLAQIGDQYADLFLAAKNLSDAILLSDILRVNTEITKAPLSASMIKRYDEHHQDLTLLKALVRQQLPEKYKEIFFDQSKNGYAGYIDGGASQEEFYKFIKPILEKMDGTEELLVKLNREDLLRKQRTFDNGSIPHQIHLGELHAILRRQEDFYPFLKDNREKIEKILTFRIPYYVGPLARGNSRFAWMTRKSEETITPWNFEEVVDKGASAQSFIERMTNFDKNLPNEKVLPKHSLLYEYFTVYNELTKVKYVTEGMRKPAFLSGEQKKAIVDLLFKTNRKVTVKQLKEDYFKKIECFDSVEISGVEDRFNASLGTYHDLLKIIKDKDFLDNEENEDILEDIVLTLTLFEDREMIEERLKTYAHLFDDKVMKQLKRRRYTGWGRLSRKLINGIRDKQSGKTILDFLKSDGFANRNFMQLIHDDSLTFKEDIQKAQVSGQGDSLHEHIANLAGSPAIKKGILQTVKVVDELVKVMGRHKPENIVIEMARENQTTQKGQKNSRERMKRIEEGIKELGSQILKEHPVENTQLQNEKLYLYYLQNGRDMYVDQELDINRLSDYDVDHIVPQSFLKDDSIDNKVLTRSDKARGKSDNVPSEEVVKKMKNYWRQLLNAKLITQRKFDNLTKAERGGLSELDKAGFIKRQLVETRQITKHVAQILDSRMNTKYDENDKLIREVKVITLKSKLVSDFRKDFQFYKVREINNYHHAHDAYLNAVVGTALIKKYPKLESEFVYGDYKVYDVRKMIAKSEQEIGKATAKYFFYSNIMNFFKTEITLANGEIRKRPLIETNGETGEIVWDKGRDFATVRKVLSMPQVNIVKKTEVQTGGFSKESILPKRNSDKLIARKKDWDPKKYGGFDSPTVAYSVLVVAKVEKGKSKKLKSVKELLGITIMERSSFEKNPIDFLEAKGYKEVKKDLIIKLPKYSLFELENGRKRMLASAGELQKGNELALPSKYVNFLYLASHYEKLKGSPEDNEQKQLFVEQHKHYLDEIIEQISEFSKRVILADANLDKVLSAYNKHRDKPIREQAENIIHLFTLTNLGAPAAFKYFDTTIDRKRYTSTKEVLDATLIHQSITGLYETRIDLSQLGGDGGPAPAPAPAPAPAPGGTLGDQGSRGSDPLPEPRVTLTVEGIPTEFLVNTGAEHSVLTKPMGKMGSKRTVVAGATGSKVYPWTTKRLLKIGQKQVTHSFLVIPECPAPLLGRDLLTKLKAQIQFSTEGPQVTWEDRPAMCLVLNLEEEYRLHEKPVPPSIDPSWLQLFPMVWAEKAGMGLANQVPPVVVELKSDASPVAVRQYPMSKEAREGIRPHIQRFLDLGILVPCQSPWNTPLLPVKKPGTNDYRPVQDLREVNKRVQDIHPTVPNPYNLLSSLPPSHTWYSVLDLKDAFFCLKLHPNSQPLFAFEWRDPEKGNTGQLTWTRLPQGFKNSPTLFDEALHRDLASFRALNPQVVMLQYVDDLLVAAPTYRDCKEGTRRLLQELSKLGYRVSAKKAQLCREEVTYLGYLLKGGKRWLTPARKATVMKIPTPTTPRQVREFLGTAGFCRLWIPGFASLAAPLYPLTREKVPFTWTEAHQEAFGRIKEALLSAPALALPDLTKPFALYVDEKEGVARGVLTQTLGPWRRPVAYLSKKLDPVASGWPTCLKAIAAVALLLKDADKLTLGQNVLVIAPHNLESIVRQPPDRWMTNARMTHYQSLLLNERVSFAPPAILNPATLLPVESDDTPIHICSEILAEETGTRPDLRDQPLPGVPAWYTDGSSFIMDGRRQAGAAIVDNKRTVWASNLPEGTSAQKAELIALTQALRLAEGKSINIYTDSRYAFATAHVHGAIYKQRGLLTSAGKDIKNKEEILALLEAIHLPKRVAIIHCPGHQRGTDPVATGNRKADEAAKQAAQSTRILTETTKNAGKRTADGSEFEKRTADGSEFESPKKKAKVE

SEQ ID NO: 1610 - protein, 2127 aa, synthetic construct
  source 1..2127: note = Description of Artificial Sequence: Synthetic polypeptide
MPAAKRVKLDGGDKKYSIGLDIGTNSVGWAVITDEYKVPSKKFKVLGNTDRHSIKKNLIGALLFDSGETAEATRLKRTARRRYTRRKNRICYLQEIFSNEMAKVDDSFFHRLEESFLVEEDKKHERHPIFGNIVDEVAYHEKYPTIYHLRKKLVDSTDKADLRLIYLALAHMIKFRGHFLIEGDLNPDNSDVDKLFIQLVQTYNQLFEENPINASGVDAKAILSARLSKSRRLENLIAQLPGEKKNGLFGNLIALSLGLTPNFKSNFDLAEDAKLQLSKDTYDDDLDNLLAQIGDQYADLFLAAKNLSDAILLSDILRVNTEITKAPLSASMIKRYDEHHQDLTLLKALVRQQLPEKYKEIFFDQSKNGYAGYIDGGASQEEFYKFIKPILEKMDGTEELLVKLNREDLLRKQRTFDNGSIPHQIHLGELHAILRRQEDFYPFLKDNREKIEKILTFRIPYYVGPLARGNSRFAWMTRKSEETITPWNFEEVVDKGASAQSFIERMTNFDKNLPNEKVLPKHSLLYEYFTVYNELTKVKYVTEGMRKPAFLSGEQKKAIVDLLFKTNRKVTVKQLKEDYFKKIECFDSVEISGVEDRFNASLGTYHDLLKIIKDKDFLDNEENEDILEDIVLTLTLFEDREMIEERLKTYAHLFDDKVMKQLKRRRYTGWGRLSRKLINGIRDKQSGKTILDFLKSDGFANRNFMQLIHDDSLTFKEDIQKAQVSGQGDSLHEHIANLAGSPAIKKGILQTVKVVDELVKVMGRHKPENIVIEMARENQTTQKGQKNSRERMKRIEEGIKELGSQILKEHPVENTQLQNEKLYLYYLQNGRDMYVDQELDINRLSDYDVDHIVPQSFLKDDSIDNKVLTRSDKARGKSDNVPSEEVVKKMKNYWRQLLNAKLITQRKFDNLTKAERGGLSELDKAGFIKRQLVETRQITKHVAQILDSRMNTKYDENDKLIREVKVITLKSKLVSDFRKDFQFYKVREINNYHHAHDAYLNAVVGTALIKKYPKLESEFVYGDYKVYDVRKMIAKSEQEIGKATAKYFFYSNIMNFFKTEITLANGEIRKRPLIETNGETGEIVWDKGRDFATVRKVLSMPQVNIVKKTEVQTGGFSKESILPKRNSDKLIARKKDWDPKKYGGFDSPTVAYSVLVVAKVEKGKSKKLKSVKELLGITIMERSSFEKNPIDFLEAKGYKEVKKDLIIKLPKYSLFELENGRKRMLASAGELQKGNELALPSKYVNFLYLASHYEKLKGSPEDNEQKQLFVEQHKHYLDEIIEQISEFSKRVILADANLDKVLSAYNKHRDKPIREQAENIIHLFTLTNLGAPAAFKYFDTTIDRKRYTSTKEVLDATLIHQSITGLYETRIDLSQLGGDGGEAAAKGGSPAPGGLLGRDLLTKLKAQIQFSTEGPQVTWEDRPAMCLVLNLEEEYRLHEKPVPPSIDPSWLQLFPMVWAEKAGMGLANQVPPVVVELKSDASPVAVRQYPMSKEAREGIRPHIQRFLDLGILVPCQSPWNTPLLPVKKPGTNDYRPVQDLREVNKRVQDIHPTVPNPYNLLSSLPPSHTWYSVLDLKDAFFCLKLHPNSQPLFAFEWRDPEKGNTGQLTWTRLPQGFKNSPTLFDEALHRDLASFRALNPQVVMLQYVDDLLVAAPTYRDCKEGTRRLLQELSKLGYRVSAKKAQLCREEVTYLGYLLKGGKRWLTPARKATVMKIPTPTTPRQVREFLGTAGFCRLWIPGFASLAAPLYPLTREKVPFTWTEAHQEAFGRIKEALLSAPALALPDLTKPFALYVDEKEGVARGVLTQTLGPWRRPVAYLSKKLDPVASGWPTCLKAIAAVALLLKDADKLTLGQNVLVIAPHNLESIVRQPPDRWMTNARMTHYQSLLLNERVSFAPPAILNPATLLPVESDDTPIHICSEILAEETGTRPDLRDQPLPGVPAWYTDGSSFIMDGRRQAGAAIVDNKRTVWASNLPEGTSAQKAELIALTQALRLAEGKSINIYTDSRYAFATAHVHGAIYKQRGLLTSAGKDIKNKEEILALLEAIHLPKRVAIIHCPGHQRGTDPVATGNRKADEAAKQAAQSTRILTETTKNAGKRTADGSEFEKRTADGSEFESPKKKAKVE

SEQ ID NO: 1611 - protein, 2125 aa, synthetic construct
  source 1..2125: note = Description of Artificial Sequence: Synthetic polypeptide
MPAAKRVKLDGGDKKYSIGLDIGTNSVGWAVITDEYKVPSKKFKVLGNTDRHSIKKNLIGALLFDSGETAEATRLKRTARRRYTRRKNRICYLQEIFSNEMAKVDDSFFHRLEESFLVEEDKKHERHPIFGNIVDEVAYHEKYPTIYHLRKKLVDSTDKADLRLIYLALAHMIKFRGHFLIEGDLNPDNSDVDKLFIQLVQTYNQLFEENPINASGVDAKAILSARLSKSRRLENLIAQLPGEKKNGLFGNLIALSLGLTPNFKSNFDLAEDAKLQLSKDTYDDDLDNLLAQIGDQYADLFLAAKNLSDAILLSDILRVNTEITKAPLSASMIKRYDEHHQDLTLLKALVRQQLPEKYKEIFFDQSKNGYAGYIDGGASQEEFYKFIKPILEKMDGTEELLVKLNREDLLRKQRTFDNGSIPHQIHLGELHAILRRQEDFYPFLKDNREKIEKILTFRIPYYVGPLARGNSRFAWMTRKSEETITPWNFEEVVDKGASAQSFIERMTNFDKNLPNEKVLPKHSLLYEYFTVYNELTKVKYVTEGMRKPAFLSGEQKKAIVDLLFKTNRKVTVKQLKEDYFKKIECFDSVEISGVEDRFNASLGTYHDLLKIIKDKDFLDNEENEDILEDIVLTLTLFEDREMIEERLKTYAHLFDDKVMKQLKRRRYTGWGRLSRKLINGIRDKQSGKTILDFLKSDGFANRNFMQLIHDDSLTFKEDIQKAQVSGQGDSLHEHIANLAGSPAIKKGILQTVKVVDELVKVMGRHKPENIVIEMARENQTTQKGQKNSRERMKRIEEGIKELGSQILKEHPVENTQLQNEKLYLYYLQNGRDMYVDQELDINRLSDYDVDHIVPQSFLKDDSIDNKVLTRSDKARGKSDNVPSEEVVKKMKNYWRQLLNAKLITQRKFDNLTKAERGGLSELDKAGFIKRQLVETRQITKHVAQILDSRMNTKYDENDKLIREVKVITLKSKLVSDFRKDFQFYKVREINNYHHAHDAYLNAVVGTALIKKYPKLESEFVYGDYKVYDVRKMIAKSEQEIGKATAKYFFYSNIMNFFKTEITLANGEIRKRPLIETNGETGEIVWDKGRDFATVRKVLSMPQVNIVKKTEVQTGGFSKESILPKRNSDKLIARKKDWDPKKYGGFDSPTVAYSVLVVAKVEKGKSKKLKSVKELLGITIMERSSFEKNPIDFLEAKGYKEVKKDLIIKLPKYSLFELENGRKRMLASAGELQKGNELALPSKYVNFLYLASHYEKLKGSPEDNEQKQLFVEQHKHYLDEIIEQISEFSKRVILADANLDKVLSAYNKHRDKPIREQAENIIHLFTLTNLGAPAAFKYFDTTIDRKRYTSTKEVLDATLIHQSITGLYETRIDLSQLGGDGGGGGGGSGSSGGLLGRDLLTKLKAQIQFSTEGPQVTWEDRPAMCLVLNLEEEYRLHEKPVPPSIDPSWLQLFPMVWAEKAGMGLANQVPPVVVELKSDASPVAVRQYPMSKEAREGIRPHIQRFLDLGILVPCQSPWNTPLLPVKKPGTNDYRPVQDLREVNKRVQDIHPTVPNPYNLLSSLPPSHTWYSVLDLKDAFFCLKLHPNSQPLFAFEWRDPEKGNTGQLTWTRLPQGFKNSPTLFDEALHRDLASFRALNPQVVMLQYVDDLLVAAPTYRDCKEGTRRLLQELSKLGYRVSAKKAQLCREEVTYLGYLLKGGKRWLTPARKATVMKIPTPTTPRQVREFLGTAGFCRLWIPGFASLAAPLYPLTREKVPFTWTEAHQEAFGRIKEALLSAPALALPDLTKPFALYVDEKEGVARGVLTQTLGPWRRPVAYLSKKLDPVASGWPTCLKAIAAVALLLKDADKLTLGQNVLVIAPHNLESIVRQPPDRWMTNARMTHYQSLLLNERVSFAPPAILNPATLLPVESDDTPIHICSEILAEETGTRPDLRDQPLPGVPAWYTDGSSFIMDGRRQAGAAIVDNKRTVWASNLPEGTSAQKAELIALTQALRLAEGKSINIYTDSRYAFATAHVHGAIYKQRGLLTSAGKDIKNKEEILALLEAIHLPKRVAIIHCPGHQRGTDPVATGNRKADEAAKQAAQSTRILTETTKNAGKRTADGSEFEKRTADGSEFESPKKKAKVE

SEQ ID NO: 1612 - protein, 2127 aa, synthetic construct
  source 1..2127: note = Description of Artificial Sequence: Synthetic polypeptide
MPAAKRVKLDGGDKKYSIGLDIGTNSVGWAVITDEYKVPSKKFKVLGNTDRHSIKKNLIGALLFDSGETAEATRLKRTARRRYTRRKNRICYLQEIFSNEMAKVDDSFFHRLEESFLVEEDKKHERHPIFGNIVDEVAYHEKYPTIYHLRKKLVDSTDKADLRLIYLALAHMIKFRGHFLIEGDLNPDNSDVDKLFIQLVQTYNQLFEENPINASGVDAKAILSARLSKSRRLENLIAQLPGEKKNGLFGNLIALSLGLTPNFKSNFDLAEDAKLQLSKDTYDDDLDNLLAQIGDQYADLFLAAKNLSDAILLSDILRVNTEITKAPLSASMIKRYDEHHQDLTLLKALVRQQLPEKYKEIFFDQSKNGYAGYIDGGASQEEFYKFIKPILEKMDGTEELLVKLNREDLLRKQRTFDNGSIPHQIHLGELHAILRRQEDFYPFLKDNREKIEKILTFRIPYYVGPLARGNSRFAWMTRKSEETITPWNFEEVVDKGASAQSFIERMTNFDKNLPNEKVLPKHSLLYEYFTVYNELTKVKYVTEGMRKPAFLSGEQKKAIVDLLFKTNRKVTVKQLKEDYFKKIECFDSVEISGVEDRFNASLGTYHDLLKIIKDKDFLDNEENEDILEDIVLTLTLFEDREMIEERLKTYAHLFDDKVMKQLKRRRYTGWGRLSRKLINGIRDKQSGKTILDFLKSDGFANRNFMQLIHDDSLTFKEDIQKAQVSGQGDSLHEHIANLAGSPAIKKGILQTVKVVDELVKVMGRHKPENIVIEMARENQTTQKGQKNSRERMKRIEEGIKELGSQILKEHPVENTQLQNEKLYLYYLQNGRDMYVDQELDINRLSDYDVDHIVPQSFLKDDSIDNKVLTRSDKARGKSDNVPSEEVVKKMKNYWRQLLNAKLITQRKFDNLTKAERGGLSELDKAGFIKRQLVETRQITKHVAQILDSRMNTKYDENDKLIREVKVITLKSKLVSDFRKDFQFYKVREINNYHHAHDAYLNAVVGTALIKKYPKLESEFVYGDYKVYDVRKMIAKSEQEIGKATAKYFFYSNIMNFFKTEITLANGEIRKRPLIETNGETGEIVWDKGRDFATVRKVLSMPQVNIVKKTEVQTGGFSKESILPKRNSDKLIARKKDWDPKKYGGFDSPTVAYSVLVVAKVEKGKSKKLKSVKELLGITIMERSSFEKNPIDFLEAKGYKEVKKDLIIKLPKYSLFELENGRKRMLASAGELQKGNELALPSKYVNFLYLASHYEKLKGSPEDNEQKQLFVEQHKHYLDEIIEQISEFSKRVILADANLDKVLSAYNKHRDKPIREQAENIIHLFTLTNLGAPAAFKYFDTTIDRKRYTSTKEVLDATLIHQSITGLYETRIDLSQLGGDGGEAAAKGGGPAPGGLLGRDLLTKLKAQIQFSTEGPQVTWEDRPAMCLVLNLEEEYRLHEKPVPPSIDPSWLQLFPMVWAEKAGMGLANQVPPVVVELKSDASPVAVRQYPMSKEAREGIRPHIQRFLDLGILVPCQSPWNTPLLPVKKPGTNDYRPVQDLREVNKRVQDIHPTVPNPYNLLSSLPPSHTWYSVLDLKDAFFCLKLHPNSQPLFAFEWRDPEKGNTGQLTWTRLPQGFKNSPTLFDEALHRDLASFRALNPQVVMLQYVDDLLVAAPTYRDCKEGTRRLLQELSKLGYRVSAKKAQLCREEVTYLGYLLKGGKRWLTPARKATVMKIPTPTTPRQVREFLGTAGFCRLWIPGFASLAAPLYPLTREKVPFTWTEAHQEAFGRIKEALLSAPALALPDLTKPFALYVDEKEGVARGVLTQTLGPWRRPVAYLSKKLDPVASGWPTCLKAIAAVALLLKDADKLTLGQNVLVIAPHNLESIVRQPPDRWMTNARMTHYQSLLLNERVSFAPPAILNPATLLPVESDDTPIHICSEILAEETGTRPDLRDQPLPGVPAWYTDGSSFIMDGRRQAGAAIVDNKRTVWASNLPEGTSAQKAELIALTQALRLAEGKSINIYTDSRYAFATAHVHGAIYKQRGLLTSAGKDIKNKEEILALLEAIHLPKRVAIIHCPGHQRGTDPVATGNRKADEAAKQAAQSTRILTETTKNAGKRTADGSEFEKRTADGSEFESPKKKAKVE

SEQ ID NO: 1613 - protein, 2127 aa, synthetic construct
  source 1..2127: note = Description of Artificial Sequence: Synthetic polypeptide
MPAAKRVKLDGGDKKYSIGLDIGTNSVGWAVITDEYKVPSKKFKVLGNTDRHSIKKNLIGALLFDSGETAEATRLKRTARRRYTRRKNRICYLQEIFSNEMAKVDDSFFHRLEESFLVEEDKKHERHPIFGNIVDEVAYHEKYPTIYHLRKKLVDSTDKADLRLIYLALAHMIKFRGHFLIEGDLNPDNSDVDKLFIQLVQTYNQLFEENPINASGVDAKAILSARLSKSRRLENLIAQLPGEKKNGLFGNLIALSLGLTPNFKSNFDLAEDAKLQLSKDTYDDDLDNLLAQIGDQYADLFLAAKNLSDAILLSDILRVNTEITKAPLSASMIKRYDEHHQDLTLLKALVRQQLPEKYKEIFFDQSKNGYAGYIDGGASQEEFYKFIKPILEKMDGTEELLVKLNREDLLRKQRTFDNGSIPHQIHLGELHAILRRQEDFYPFLKDNREKIEKILTFRIPYYVGPLARGNSRFAWMTRKSEETITPWNFEEVVDKGASAQSFIERMTNFDKNLPNEKVLPKHSLLYEYFTVYNELTKVKYVTEGMRKPAFLSGEQKKAIVDLLFKTNRKVTVKQLKEDYFKKIECFDSVEISGVEDRFNASLGTYHDLLKIIKDKDFLDNEENEDILEDIVLTLTLFEDREMIEERLKTYAHLFDDKVMKQLKRRRYTGWGRLSRKLINGIRDKQSGKTILDFLKSDGFANRNFMQLIHDDSLTFKEDIQKAQVSGQGDSLHEHIANLAGSPAIKKGILQTVKVVDELVKVMGRHKPENIVIEMARENQTTQKGQKNSRERMKRIEEGIKELGSQILKEHPVENTQLQNEKLYLYYLQNGRDMYVDQELDINRLSDYDVDHIVPQSFLKDDSIDNKVLTRSDKARGKSDNVPSEEVVKKMKNYWRQLLNAKLITQRKFDNLTKAERGGLSELDKAGFIKRQLVETRQITKHVAQILDSRMNTKYDENDKLIREVKVITLKSKLVSDFRKDFQFYKVREINNYHHAHDAYLNAVVGTALIKKYPKLESEFVYGDYKVYDVRKMIAKSEQEIGKATAKYFFYSNIMNFFKTEITLANGEIRKRPLIETNGETGEIVWDKGRDFATVRKVLSMPQVNIVKKTEVQTGGFSKESILPKRNSDKLIARKKDWDPKKYGGFDSPTVAYSVLVVAKVEKGKSKKLKSVKELLGITIMERSSFEKNPIDFLEAKGYKEVKKDLIIKLPKYSLFELENGRKRMLASAGELQKGNELALPSKYVNFLYLASHYEKLKGSPEDNEQKQLFVEQHKHYLDEIIEQISEFSKRVILADANLDKVLSAYNKHRDKPIREQAENIIHLFTLTNLGAPAAFKYFDTTIDRKRYTSTKEVLDATLIHQSITGLYETRIDLSQLGGDGGEAAAKPAPGSSGGLLGRDLLTKLKAQIQFSTEGPQVTWEDRPAMCLVLNLEEEYRLHEKPVPPSIDPSWLQLFPMVWAEKAGMGLANQVPPVVVELKSDASPVAVRQYPMSKEAREGIRPHIQRFLDLGILVPCQSPWNTPLLPVKKPGTNDYRPVQDLREVNKRVQDIHPTVPNPYNLLSSLPPSHTWYSVLDLKDAFFCLKLHPNSQPLFAFEWRDPEKGNTGQLTWTRLPQGFKNSPTLFDEALHRDLASFRALNPQVVMLQYVDDLLVAAPTYRDCKEGTRRLLQELSKLGYRVSAKKAQLCREEVTYLGYLLKGGKRWLTPARKATVMKIPTPTTPRQVREFLGTAGFCRLWIPGFASLAAPLYPLTREKVPFTWTEAHQEAFGRIKEALLSAPALALPDLTKPFALYVDEKEGVARGVLTQTLGPWRRPVAYLSKKLDPVASGWPTCLKAIAAVALLLKDADKLTLGQNVLVIAPHNLESIVRQPPDRWMTNARMTHYQSLLLNERVSFAPPAILNPATLLPVESDDTPIHICSEILAEETGTRPDLRDQPLPGVPAWYTDGSSFIMDGRRQAGAAIVDNKRTVWASNLPEGTSAQKAELIALTQALRLAEGKSINIYTDSRYAFATAHVHGAIYKQRGLLTSAGKDIKNKEEILALLEAIHLPKRVAIIHCPGHQRGTDPVATGNRKADEAAKQAAQSTRILTETTKNAGKRTADGSEFEKRTADGSEFESPKKKAKVE

SEQ ID NO: 1614 - protein, 2127 aa, synthetic construct
  source 1..2127: note = Description of Artificial Sequence: Synthetic polypeptide
MPAAKRVKLDGGDKKYSIGLDIGTNSVGWAVITDEYKVPSKKFKVLGNTDRHSIKKNLIGALLFDSGETAEATRLKRTARRRYTRRKNRICYLQEIFSNEMAKVDDSFFHRLEESFLVEEDKKHERHPIFGNIVDEVAYHEKYPTIYHLRKKLVDSTDKADLRLIYLALAHMIKFRGHFLIEGDLNPDNSDVDKLFIQLVQTYNQLFEENPINASGVDAKAILSARLSKSRRLENLIAQLPGEKKNGLFGNLIALSLGLTPNFKSNFDLAEDAKLQLSKDTYDDDLDNLLAQIGDQYADLFLAAKNLSDAILLSDILRVNTEITKAPLSASMIKRYDEHHQDLTLLKALVRQQLPEKYKEIFFDQSKNGYAGYIDGGASQEEFYKFIKPILEKMDGTEELLVKLNREDLLRKQRTFDNGSIPHQIHLGELHAILRRQEDFYPFLKDNREKIEKILTFRIPYYVGPLARGNSRFAWMTRKSEETITPWNFEEVVDKGASAQSFIERMTNFDKNLPNEKVLPKHSLLYEYFTVYNELTKVKYVTEGMRKPAFLSGEQKKAIVDLLFKTNRKVTVKQLKEDYFKKIECFDSVEISGVEDRFNASLGTYHDLLKIIKDKDFLDNEENEDILEDIVLTLTLFEDREMIEERLKTYAHLFDDKVMKQLKRRRYTGWGRLSRKLINGIRDKQSGKTILDFLKSDGFANRNFMQLIHDDSLTFKEDIQKAQVSGQGDSLHEHIANLAGSPAIKKGILQTVKVVDELVKVMGRHKPENIVIEMARENQTTQKGQKNSRERMKRIEEGIKELGSQILKEHPVENTQLQNEKLYLYYLQNGRDMYVDQELDINRLSDYDVDHIVPQSFLKDDSIDNKVLTRSDKARGKSDNVPSEEVVKKMKNYWRQLLNAKLITQRKFDNLTKAERGGLSELDKAGFIKRQLVETRQITKHVAQILDSRMNTKYDENDKLIREVKVITLKSKLVSDFRKDFQFYKVREINNYHHAHDAYLNAVVGTALIKKYPKLESEFVYGDYKVYDVRKMIAKSEQEIGKATAKYFFYSNIMNFFKTEITLANGEIRKRPLIETNGETGEIVWDKGRDFATVRKVLSMPQVNIVKKTEVQTGGFSKESILPKRNSDKLIARKKDWDPKKYGGFDSPTVAYSVLVVAKVEKGKSKKLKSVKELLGITIMERSSFEKNPIDFLEAKGYKEVKKDLIIKLPKYSLFELENGRKRMLASAGELQKGNELALPSKYVNFLYLASHYEKLKGSPEDNEQKQLFVEQHKHYLDEIIEQISEFSKRVILADANLDKVLSAYNKHRDKPIREQAENIIHLFTLTNLGAPAAFKYFDTTIDRKRYTSTKEVLDATLIHQSITGLYETRIDLSQLGGDGGPAPGGSEAAAKGGLLGRDLLTKLKAQIQFSTEGPQVTWEDRPAMCLVLNLEEEYRLHEKPVPPSIDPSWLQLFPMVWAEKAGMGLANQVPPVVVELKSDASPVAVRQYPMSKEAREGIRPHIQRFLDLGILVPCQSPWNTPLLPVKKPGTNDYRPVQDLREVNKRVQDIHPTVPNPYNLLSSLPPSHTWYSVLDLKDAFFCLKLHPNSQPLFAFEWRDPEKGNTGQLTWTRLPQGFKNSPTLFDEALHRDLASFRALNPQVVMLQYVDDLLVAAPTYRDCKEGTRRLLQELSKLGYRVSAKKAQLCREEVTYLGYLLKGGKRWLTPARKATVMKIPTPTTPRQVREFLGTAGFCRLWIPGFASLAAPLYPLTREKVPFTWTEAHQEAFGRIKEALLSAPALALPDLTKPFALYVDEKEGVARGVLTQTLGPWRRPVAYLSKKLDPVASGWPTCLKAIAAVALLLKDADKLTLGQNVLVIAPHNLESIVRQPPDRWMTNARMTHYQSLLLNERVSFAPPAILNPATLLPVESDDTPIHICSEILAEETGTRPDLRDQPLPGVPAWYTDGSSFIMDGRRQAGAAIVDNKRTVWASNLPEGTSAQKAELIALTQALRLAEGKSINIYTDSRYAFATAHVHGAIYKQRGLLTSAGKDIKNKEEILALLEAIHLPKRVAIIHCPGHQRGTDPVATGNRKADEAAKQAAQSTRILTETTKNAGKRTADGSEFEKRTADGSEFESPKKKAKVE

SEQ ID NO: 1615 - protein, 2134 aa, synthetic construct
  source 1..2134: note = Description of Artificial Sequence: Synthetic polypeptide
MPAAKRVKLDGGDKKYSIGLDIGTNSVGWAVITDEYKVPSKKFKVLGNTDRHSIKKNLIGALLFDSGETAEATRLKRTARRRYTRRKNRICYLQEIFSNEMAKVDDSFFHRLEESFLVEEDKKHERHPIFGNIVDEVAYHEKYPTIYHLRKKLVDSTDKADLRLIYLALAHMIKFRGHFLIEGDLNPDNSDVDKLFIQLVQTYNQLFEENPINASGVDAKAILSARLSKSRRLENLIAQLPGEKKNGLFGNLIALSLGLTPNFKSNFDLAEDAKLQLSKDTYDDDLDNLLAQIGDQYADLFLAAKNLSDAILLSDILRVNTEITKAPLSASMIKRYDEHHQDLTLLKALVRQQLPEKYKEIFFDQSKNGYAGYIDGGASQEEFYKFIKPILEKMDGTEELLVKLNREDLLRKQRTFDNGSIPHQIHLGELHAILRRQEDFYPFLKDNREKIEKILTFRIPYYVGPLARGNSRFAWMTRKSEETITPWNFEEVVDKGASAQSFIERMTNFDKNLPNEKVLPKHSLLYEYFTVYNELTKVKYVTEGMRKPAFLSGEQKKAIVDLLFKTNRKVTVKQLKEDYFKKIECFDSVEISGVEDRFNASLGTYHDLLKIIKDKDFLDNEENEDILEDIVLTLTLFEDREMIEERLKTYAHLFDDKVMKQLKRRRYTGWGRLSRKLINGIRDKQSGKTILDFLKSDGFANRNFMQLIHDDSLTFKEDIQKAQVSGQGDSLHEHIANLAGSPAIKKGILQTVKVVDELVKVMGRHKPENIVIEMARENQTTQKGQKNSRERMKRIEEGIKELGSQILKEHPVENTQLQNEKLYLYYLQNGRDMYVDQELDINRLSDYDVDHIVPQSFLKDDSIDNKVLTRSDKARGKSDNVPSEEVVKKMKNYWRQLLNAKLITQRKFDNLTKAERGGLSELDKAGFIKRQLVETRQITKHVAQILDSRMNTKYDENDKLIREVKVITLKSKLVSDFRKDFQFYKVREINNYHHAHDAYLNAVVGTALIKKYPKLESEFVYGDYKVYDVRKMIAKSEQEIGKATAKYFFYSNIMNFFKTEITLANGEIRKRPLIETNGETGEIVWDKGRDFATVRKVLSMPQVNIVKKTEVQTGGFSKESILPKRNSDKLIARKKDWDPKKYGGFDSPTVAYSVLVVAKVEKGKSKKLKSVKELLGITIMERSSFEKNPIDFLEAKGYKEVKKDLIIKLPKYSLFELENGRKRMLASAGELQKGNELALPSKYVNFLYLASHYEKLKGSPEDNEQKQLFVEQHKHYLDEIIEQISEFSKRVILADANLDKVLSAYNKHRDKPIREQAENIIHLFTLTNLGAPAAFKYFDTTIDRKRYTSTKEVLDATLIHQSITGLYETRIDLSQLGGDGGGSSGSSGSSGSSGSSGSSGGLLGRDLLTKLKAQIQFSTEGPQVTWEDRPAMCLVLNLEEEYRLHEKPVPPSIDPSWLQLFPMVWAEKAGMGLANQVPPVVVELKSDASPVAVRQYPMSKEAREGIRPHIQRFLDLGILVPCQSPWNTPLLPVKKPGTNDYRPVQDLREVNKRVQDIHPTVPNPYNLLSSLPPSHTWYSVLDLKDAFFCLKLHPNSQPLFAFEWRDPEKGNTGQLTWTRLPQGFKNSPTLFDEALHRDLASFRALNPQVVMLQYVDDLLVAAPTYRDCKEGTRRLLQELSKLGYRVSAKKAQLCREEVTYLGYLLKGGKRWLTPARKATVMKIPTPTTPRQVREFLGTAGFCRLWIPGFASLAAPLYPLTREKVPFTWTEAHQEAFGRIKEALLSAPALALPDLTKPFALYVDEKEGVARGVLTQTLGPWRRPVAYLSKKLDPVASGWPTCLKAIAAVALLLKDADKLTLGQNVLVIAPHNLESIVRQPPDRWMTNARMTHYQSLLLNERVSFAPPAILNPATLLPVESDDTPIHICSEILAEETGTRPDLRDQPLPGVPAWYTDGSSFIMDGRRQAGAAIVDNKRTVWASNLPEGTSAQKAELIALTQALRLAEGKSINIYTDSRYAFATAHVHGAIYKQRGLLTSAGKDIKNKEEILALLEAIHLPKRVAIIHCPGHQRGTDPVATGNRKADEAAKQAAQSTRILTETTKNAGKRTADGSEFEKRTADGSEFESPKKKAKVE

SEQ ID NO: 1616 - protein, 2123 aa, synthetic construct
  source 1..2123: note = Description of Artificial Sequence: Synthetic polypeptide
MPAAKRVKLDGGDKKYSIGLDIGTNSVGWAVITDEYKVPSKKFKVLGNTDRHSIKKNLIGALLFDSGETAEATRLKRTARRRYTRRKNRICYLQEIFSNEMAKVDDSFFHRLEESFLVEEDKKHERHPIFGNIVDEVAYHEKYPTIYHLRKKLVDSTDKADLRLIYLALAHMIKFRGHFLIEGDLNPDNSDVDKLFIQLVQTYNQLFEENPINASGVDAKAILSARLSKSRRLENLIAQLPGEKKNGLFGNLIALSLGLTPNFKSNFDLAEDAKLQLSKDTYDDDLDNLLAQIGDQYADLFLAAKNLSDAILLSDILRVNTEITKAPLSASMIKRYDEHHQDLTLLKALVRQQLPEKYKEIFFDQSKNGYAGYIDGGASQEEFYKFIKPILEKMDGTEELLVKLNREDLLRKQRTFDNGSIPHQIHLGELHAILRRQEDFYPFLKDNREKIEKILTFRIPYYVGPLARGNSRFAWMTRKSEETITPWNFEEVVDKGASAQSFIERMTNFDKNLPNEKVLPKHSLLYEYFTVYNELTKVKYVTEGMRKPAFLSGEQKKAIVDLLFKTNRKVTVKQLKEDYFKKIECFDSVEISGVEDRFNASLGTYHDLLKIIKDKDFLDNEENEDILEDIVLTLTLFEDREMIEERLKTYAHLFDDKVMKQLKRRRYTGWGRLSRKLINGIRDKQSGKTILDFLKSDGFANRNFMQLIHDDSLTFKEDIQKAQVSGQGDSLHEHIANLAGSPAIKKGILQTVKVVDELVKVMGRHKPENIVIEMARENQTTQKGQKNSRERMKRIEEGIKELGSQILKEHPVENTQLQNEKLYLYYLQNGRDMYVDQELDINRLSDYDVDHIVPQSFLKDDSIDNKVLTRSDKARGKSDNVPSEEVVKKMKNYWRQLLNAKLITQRKFDNLTKAERGGLSELDKAGFIKRQLVETRQITKHVAQILDSRMNTKYDENDKLIREVKVITLKSKLVSDFRKDFQFYKVREINNYHHAHDAYLNAVVGTALIKKYPKLESEFVYGDYKVYDVRKMIAKSEQEIGKATAKYFFYSNIMNFFKTEITLANGEIRKRPLIETNGETGEIVWDKGRDFATVRKVLSMPQVNIVKKTEVQTGGFSKESILPKRNSDKLIARKKDWDPKKYGGFDSPTVAYSVLVVAKVEKGKSKKLKSVKELLGITIMERSSFEKNPIDFLEAKGYKEVKKDLIIKLPKYSLFELENGRKRMLASAGELQKGNELALPSKYVNFLYLASHYEKLKGSPEDNEQKQLFVEQHKHYLDEIIEQISEFSKRVILADANLDKVLSAYNKHRDKPIREQAENIIHLFTLTNLGAPAAFKYFDTTIDRKRYTSTKEVLDATLIHQSITGLYETRIDLSQLGGDGGPAPAPAPGGLLGRDLLTKLKAQIQFSTEGPQVTWEDRPAMCLVLNLEEEYRLHEKPVPPSIDPSWLQLFPMVWAEKAGMGLANQVPPVVVELKSDASPVAVRQYPMSKEAREGIRPHIQRFLDLGILVPCQSPWNTPLLPVKKPGTNDYRPVQDLREVNKRVQDIHPTVPNPYNLLSSLPPSHTWYSVLDLKDAFFCLKLHPNSQPLFAFEWRDPEKGNTGQLTWTRLPQGFKNSPTLFNEALHRDLASFRALNPQVVMLQYVDDLLVAAPTYRDCKEGTRRLLQELSKLGYRVSAKKAQLCREEVTYLGYLLKGGKRWLTPARKATVMKIPTPTTPRQVREFLGTAGFCRLWIPGFASLAAPLYPLTRPKVPFTWTEAHQEAFGRIKEALLSAPALALPDLTKPFALYVDEKEGVARGVLTQTLGPWRRPVAYLSKKLDPVASGWPTCLKAIAAVALLLKDADKLTLGQNVLVIAPHNLESIVRQPPDRWMTNARMTHYQSLLLNERVSFAPPAILNPATLLPVESDDTPIHICSEILAEETGTRPDLRDQPLPGVPAWYTDGSSFIMDGRRQAGAAIVDNKRTVWASNLPEGTSAQKAELIALTQALRLAEGKSINIYTDSRYAFATAHVHGAIYKQRGWLTSAGKDIKNKEEILALLEAIHLPKRVAIIHCPGHQRGTDPVATGNRKADEAAKQAAQSTRILTETTKNAGKRTADGSEFEKRTADGSEFESPKKKAKVE

SEQ ID NO: 1617 - protein, 2131 aa, synthetic construct
  source 1..2131: note = Description of Artificial Sequence: Synthetic polypeptide
MPAAKRVKLDGGDKKYSIGLDIGTNSVGWAVITDEYKVPSKKFKVLGNTDRHSIKKNLIGALLFDSGETAEATRLKRTARRRYTRRKNRICYLQEIFSNEMAKVDDSFFHRLEESFLVEEDKKHERHPIFGNIVDEVAYHEKYPTIYHLRKKLVDSTDKADLRLIYLALAHMIKFRGHFLIEGDLNPDNSDVDKLFIQLVQTYNQLFEENPINASGVDAKAILSARLSKSRRLENLIAQLPGEKKNGLFGNLIALSLGLTPNFKSNFDLAEDAKLQLSKDTYDDDLDNLLAQIGDQYADLFLAAKNLSDAILLSDILRVNTEITKAPLSASMIKRYDEHHQDLTLLKALVRQQLPEKYKEIFFDQSKNGYAGYIDGGASQEEFYKFIKPILEKMDGTEELLVKLNREDLLRKQRTFDNGSIPHQIHLGELHAILRRQEDFYPFLKDNREKIEKILTFRIPYYVGPLARGNSRFAWMTRKSEETITPWNFEEVVDKGASAQSFIERMTNFDKNLPNEKVLPKHSLLYEYFTVYNELTKVKYVTEGMRKPAFLSGEQKKAIVDLLFKTNRKVTVKQLKEDYFKKIECFDSVEISGVEDRFNASLGTYHDLLKIIKDKDFLDNEENEDILEDIVLTLTLFEDREMIEERLKTYAHLFDDKVMKQLKRRRYTGWGRLSRKLINGIRDKQSGKTILDFLKSDGFANRNFMQLIHDDSLTFKEDIQKAQVSGQGDSLHEHIANLAGSPAIKKGILQTVKVVDELVKVMGRHKPENIVIEMARENQTTQKGQKNSRERMKRIEEGIKELGSQILKEHPVENTQLQNEKLYLYYLQNGRDMYVDQELDINRLSDYDVDHIVPQSFLKDDSIDNKVLTRSDKARGKSDNVPSEEVVKKMKNYWRQLLNAKLITQRKFDNLTKAERGGLSELDKAGFIKRQLVETRQITKHVAQILDSRMNTKYDENDKLIREVKVITLKSKLVSDFRKDFQFYKVREINNYHHAHDAYLNAVVGTALIKKYPKLESEFVYGDYKVYDVRKMIAKSEQEIGKATAKYFFYSNIMNFFKTEITLANGEIRKRPLIETNGETGEIVWDKGRDFATVRKVLSMPQVNIVKKTEVQTGGFSKESILPKRNSDKLIARKKDWDPKKYGGFDSPTVAYSVLVVAKVEKGKSKKLKSVKELLGITIMERSSFEKNPIDFLEAKGYKEVKKDLIIKLPKYSLFELENGRKRMLASAGELQKGNELALPSKYVNFLYLASHYEKLKGSPEDNEQKQLFVEQHKHYLDEIIEQISEFSKRVILADANLDKVLSAYNKHRDKPIREQAENIIHLFTLTNLGAPAAFKYFDTTIDRKRYTSTKEVLDATLIHQSITGLYETRIDLSQLGGDGGGSSGSSGSSGSSGSSGGLLGRDLLTKLKAQIQFSTEGPQVTWEDRPAMCLVLNLEEEYRLHEKPVPPSIDPSWLQLFPMVWAEKAGMGLANQVPPVVVELKSDASPVAVRQYPMSKEAREGIRPHIQRFLDLGILVPCQSPWNTPLLPVKKPGTNDYRPVQDLREVNKRVQDIHPTVPNPYNLLSSLPPSHTWYSVLDLKDAFFCLKLHPNSQPLFAFEWRDPEKGNTGQLTWTRLPQGFKNSPTLFNEALHRDLASFRALNPQVVMLQYVDDLLVAAPTYRDCKEGTRRLLQELSKLGYRVSAKKAQLCREEVTYLGYLLKGGKRWLTPARKATVMKIPTPTTPRQVREFLGTAGFCRLWIPGFASLAAPLYPLTRPKVPFTWTEAHQEAFGRIKEALLSAPALALPDLTKPFALYVDEKEGVARGVLTQTLGPWRRPVAYLSKKLDPVASGWPTCLKAIAAVALLLKDADKLTLGQNVLVIAPHNLESIVRQPPDRWMTNARMTHYQSLLLNERVSFAPPAILNPATLLPVESDDTPIHICSEILAEETGTRPDLRDQPLPGVPAWYTDGSSFIMDGRRQAGAAIVDNKRTVWASNLPEGTSAQKAELIALTQALRLAEGKSINIYTDSRYAFATAHVHGAIYKQRGWLTSAGKDIKNKEEILALLEAIHLPKRVAIIHCPGHQRGTDPVATGNRKADEAAKQAAQSTRILTETTKNAGKRTADGSEFEKRTADGSEFESPKKKAKVE

SEQ ID NO: 1618 - protein, 2127 aa, synthetic construct
  source 1..2127: note = Description of Artificial Sequence: Synthetic polypeptide
MPAAKRVKLDGGDKKYSIGLDIGTNSVGWAVITDEYKVPSKKFKVLGNTDRHSIKKNLIGALLFDSGETAEATRLKRTARRRYTRRKNRICYLQEIFSNEMAKVDDSFFHRLEESFLVEEDKKHERHPIFGNIVDEVAYHEKYPTIYHLRKKLVDSTDKADLRLIYLALAHMIKFRGHFLIEGDLNPDNSDVDKLFIQLVQTYNQLFEENPINASGVDAKAILSARLSKSRRLENLIAQLPGEKKNGLFGNLIALSLGLTPNFKSNFDLAEDAKLQLSKDTYDDDLDNLLAQIGDQYADLFLAAKNLSDAILLSDILRVNTEITKAPLSASMIKRYDEHHQDLTLLKALVRQQLPEKYKEIFFDQSKNGYAGYIDGGASQEEFYKFIKPILEKMDGTEELLVKLNREDLLRKQRTFDNGSIPHQIHLGELHAILRRQEDFYPFLKDNREKIEKILTFRIPYYVGPLARGNSRFAWMTRKSEETITPWNFEEVVDKGASAQSFIERMTNFDKNLPNEKVLPKHSLLYEYFTVYNELTKVKYVTEGMRKPAFLSGEQKKAIVDLLFKTNRKVTVKQLKEDYFKKIECFDSVEISGVEDRFNASLGTYHDLLKIIKDKDFLDNEENEDILEDIVLTLTLFEDREMIEERLKTYAHLFDDKVMKQLKRRRYTGWGRLSRKLINGIRDKQSGKTILDFLKSDGFANRNFMQLIHDDSLTFKEDIQKAQVSGQGDSLHEHIANLAGSPAIKKGILQTVKVVDELVKVMGRHKPENIVIEMARENQTTQKGQKNSRERMKRIEEGIKELGSQILKEHPVENTQLQNEKLYLYYLQNGRDMYVDQELDINRLSDYDVDHIVPQSFLKDDSIDNKVLTRSDKARGKSDNVPSEEVVKKMKNYWRQLLNAKLITQRKFDNLTKAERGGLSELDKAGFIKRQLVETRQITKHVAQILDSRMNTKYDENDKLIREVKVITLKSKLVSDFRKDFQFYKVREINNYHHAHDAYLNAVVGTALIKKYPKLESEFVYGDYKVYDVRKMIAKSEQEIGKATAKYFFYSNIMNFFKTEITLANGEIRKRPLIETNGETGEIVWDKGRDFATVRKVLSMPQVNIVKKTEVQTGGFSKESILPKRNSDKLIARKKDWDPKKYGGFDSPTVAYSVLVVAKVEKGKSKKLKSVKELLGITIMERSSFEKNPIDFLEAKGYKEVKKDLIIKLPKYSLFELENGRKRMLASAGELQKGNELALPSKYVNFLYLASHYEKLKGSPEDNEQKQLFVEQHKHYLDEIIEQISEFSKRVILADANLDKVLSAYNKHRDKPIREQAENIIHLFTLTNLGAPAAFKYFDTTIDRKRYTSTKEVLDATLIHQSITGLYETRIDLSQLGGDGGEAAAKPAPGSSGGLLGRDLLTKLKAQIQFSTEGPQVTWEDRPAMCLVLNLEEEYRLHEKPVPPSIDPSWLQLFPMVWAEKAGMGLANQVPPVVVELKSDASPVAVRQYPMSKEAREGIRPHIQRFLDLGILVPCQSPWNTPLLPVKKPGTNDYRPVQDLREVNKRVQDIHPTVPNPYNLLSSLPPSHTWYSVLDLKDAFFCLKLHPNSQPLFAFEWRDPEKGNTGQLTWTRLPQGFKNSPTLFNEALHRDLASFRALNPQVVMLQYVDDLLVAAPTYRDCKEGTRRLLQELSKLGYRVSAKKAQLCREEVTYLGYLLKGGKRWLTPARKATVMKIPTPTTPRQVREFLGTAGFCRLWIPGFASLAAPLYPLTRPKVPFTWTEAHQEAFGRIKEALLSAPALALPDLTKPFALYVDEKEGVARGVLTQTLGPWRRPVAYLSKKLDPVASGWPTCLKAIAAVALLLKDADKLTLGQNVLVIAPHNLESIVRQPPDRWMTNARMTHYQSLLLNERVSFAPPAILNPATLLPVESDDTPIHICSEILAEETGTRPDLRDQPLPGVPAWYTDGSSFIMDGRRQAGAAIVDNKRTVWASNLPEGTSAQKAELIALTQALRLAEGKSINIYTDSRYAFATAHVHGAIYKQRGWLTSAGKDIKNKEEILALLEAIHLPKRVAIIHCPGHQRGTDPVATGNRKADEAAKQAAQSTRILTETTKNAGKRTADGSEFEKRTADGSEFESPKKKAKVE

SEQ ID NO: 1619 - protein, 2127 aa, synthetic construct
  source 1..2127: note = Description of Artificial Sequence: Synthetic polypeptide
MPAAKRVKLDGGDKKYSIGLDIGTNSVGWAVITDEYKVPSKKFKVLGNTDRHSIKKNLIGALLFDSGETAEATRLKRTARRRYTRRKNRICYLQEIFSNEMAKVDDSFFHRLEESFLVEEDKKHERHPIFGNIVDEVAYHEKYPTIYHLRKKLVDSTDKADLRLIYLALAHMIKFRGHFLIEGDLNPDNSDVDKLFIQLVQTYNQLFEENPINASGVDAKAILSARLSKSRRLENLIAQLPGEKKNGLFGNLIALSLGLTPNFKSNFDLAEDAKLQLSKDTYDDDLDNLLAQIGDQYADLFLAAKNLSDAILLSDILRVNTEITKAPLSASMIKRYDEHHQDLTLLKALVRQQLPEKYKEIFFDQSKNGYAGYIDGGASQEEFYKFIKPILEKMDGTEELLVKLNREDLLRKQRTFDNGSIPHQIHLGELHAILRRQEDFYPFLKDNREKIEKILTFRIPYYVGPLARGNSRFAWMTRKSEETITPWNFEEVVDKGASAQSFIERMTNFDKNLPNEKVLPKHSLLYEYFTVYNELTKVKYVTEGMRKPAFLSGEQKKAIVDLLFKTNRKVTVKQLKEDYFKKIECFDSVEISGVEDRFNASLGTYHDLLKIIKDKDFLDNEENEDILEDIVLTLTLFEDREMIEERLKTYAHLFDDKVMKQLKRRRYTGWGRLSRKLINGIRDKQSGKTILDFLKSDGFANRNFMQLIHDDSLTFKEDIQKAQVSGQGDSLHEHIANLAGSPAIKKGILQTVKVVDELVKVMGRHKPENIVIEMARENQTTQKGQKNSRERMKRIEEGIKELGSQILKEHPVENTQLQNEKLYLYYLQNGRDMYVDQELDINRLSDYDVDHIVPQSFLKDDSIDNKVLTRSDKARGKSDNVPSEEVVKKMKNYWRQLLNAKLITQRKFDNLTKAERGGLSELDKAGFIKRQLVETRQITKHVAQILDSRMNTKYDENDKLIREVKVITLKSKLVSDFRKDFQFYKVREINNYHHAHDAYLNAVVGTALIKKYPKLESEFVYGDYKVYDVRKMIAKSEQEIGKATAKYFFYSNIMNFFKTEITLANGEIRKRPLIETNGETGEIVWDKGRDFATVRKVLSMPQVNIVKKTEVQTGGFSKESILPKRNSDKLIARKKDWDPKKYGGFDSPTVAYSVLVVAKVEKGKSKKLKSVKELLGITIMERSSFEKNPIDFLEAKGYKEVKKDLIIKLPKYSLFELENGRKRMLASAGELQKGNELALPSKYVNFLYLASHYEKLKGSPEDNEQKQLFVEQHKHYLDEIIEQISEFSKRVILADANLDKVLSAYNKHRDKPIREQAENIIHLFTLTNLGAPAAFKYFDTTIDRKRYTSTKEVLDATLIHQSITGLYETRIDLSQLGGDGGPAPAPAPAPAPGGLLGRDLLTKLKAQIQFSTEGPQVTWEDRPAMCLVLNLEEEYRLHEKPVPPSIDPSWLQLFPMVWAEKAGMGLANQVPPVVVELKSDASPVAVRQYPMSKEAREGIRPHIQRFLDLGILVPCQSPWNTPLLPVKKPGTNDYRPVQDLREVNKRVQDIHPTVPNPYNLLSSLPPSHTWYSVLDLKDAFFCLKLHPNSQPLFAFEWRDPEKGNTGQLTWTRLPQGFKNSPTLFNEALHRDLASFRALNPQVVMLQYVDDLLVAAPTYRDCKEGTRRLLQELSKLGYRVSAKKAQLCREEVTYLGYLLKGGKRWLTPARKATVMKIPTPTTPRQVREFLGTAGFCRLWIPGFASLAAPLYPLTRPKVPFTWTEAHQEAFGRIKEALLSAPALALPDLTKPFALYVDEKEGVARGVLTQTLGPWRRPVAYLSKKLDPVASGWPTCLKAIAAVALLLKDADKLTLGQNVLVIAPHNLESIVRQPPDRWMTNARMTHYQSLLLNERVSFAPPAILNPATLLPVESDDTPIHICSEILAEETGTRPDLRDQPLPGVPAWYTDGSSFIMDGRRQAGAAIVDNKRTVWASNLPEGTSAQKAELIALTQALRLAEGKSINIYTDSRYAFATAHVHGAIYKQRGWLTSAGKDIKNKEEILALLEAIHLPKRVAIIHCPGHQRGTDPVATGNRKADEAAKQAAQSTRILTETTKNAGKRTADGSEFEKRTADGSEFESPKKKAKVE

SEQ ID NO: 1620 - protein, 2127 aa, synthetic construct
  source 1..2127: note = Description of Artificial Sequence: Synthetic polypeptide
MPAAKRVKLDGGDKKYSIGLDIGTNSVGWAVITDEYKVPSKKFKVLGNTDRHSIKKNLIGALLFDSGETAEATRLKRTARRRYTRRKNRICYLQEIFSNEMAKVDDSFFHRLEESFLVEEDKKHERHPIFGNIVDEVAYHEKYPTIYHLRKKLVDSTDKADLRLIYLALAHMIKFRGHFLIEGDLNPDNSDVDKLFIQLVQTYNQLFEENPINASGVDAKAILSARLSKSRRLENLIAQLPGEKKNGLFGNLIALSLGLTPNFKSNFDLAEDAKLQLSKDTYDDDLDNLLAQIGDQYADLFLAAKNLSDAILLSDILRVNTEITKAPLSASMIKRYDEHHQDLTLLKALVRQQLPEKYKEIFFDQSKNGYAGYIDGGASQEEFYKFIKPILEKMDGTEELLVKLNREDLLRKQRTFDNGSIPHQIHLGELHAILRRQEDFYPFLKDNREKIEKILTFRIPYYVGPLARGNSRFAWMTRKSEETITPWNFEEVVDKGASAQSFIERMTNFDKNLPNEKVLPKHSLLYEYFTVYNELTKVKYVTEGMRKPAFLSGEQKKAIVDLLFKTNRKVTVKQLKEDYFKKIECFDSVEISGVEDRFNASLGTYHDLLKIIKDKDFLDNEENEDILEDIVLTLTLFEDREMIEERLKTYAHLFDDKVMKQLKRRRYTGWGRLSRKLINGIRDKQSGKTILDFLKSDGFANRNFMQLIHDDSLTFKEDIQKAQVSGQGDSLHEHIANLAGSPAIKKGILQTVKVVDELVKVMGRHKPENIVIEMARENQTTQKGQKNSRERMKRIEEGIKELGSQILKEHPVENTQLQNEKLYLYYLQNGRDMYVDQELDINRLSDYDVDHIVPQSFLKDDSIDNKVLTRSDKARGKSDNVPSEEVVKKMKNYWRQLLNAKLITQRKFDNLTKAERGGLSELDKAGFIKRQLVETRQITKHVAQILDSRMNTKYDENDKLIREVKVITLKSKLVSDFRKDFQFYKVREINNYHHAHDAYLNAVVGTALIKKYPKLESEFVYGDYKVYDVRKMIAKSEQEIGKATAKYFFYSNIMNFFKTEITLANGEIRKRPLIETNGETGEIVWDKGRDFATVRKVLSMPQVNIVKKTEVQTGGFSKESILPKRNSDKLIARKKDWDPKKYGGFDSPTVAYSVLVVAKVEKGKSKKLKSVKELLGITIMERSSFEKNPIDFLEAKGYKEVKKDLIIKLPKYSLFELENGRKRMLASAGELQKGNELALPSKYVNFLYLASHYEKLKGSPEDNEQKQLFVEQHKHYLDEIIEQISEFSKRVILADANLDKVLSAYNKHRDKPIREQAENIIHLFTLTNLGAPAAFKYFDTTIDRKRYTSTKEVLDATLIHQSITGLYETRIDLSQLGGDGGGGSPAPEAAAKGGLLGRDLLTKLKAQIQFSTEGPQVTWEDRPAMCLVLNLEEEYRLHEKPVPPSIDPSWLQLFPMVWAEKAGMGLANQVPPVVVELKSDASPVAVRQYPMSKEAREGIRPHIQRFLDLGILVPCQSPWNTPLLPVKKPGTNDYRPVQDLREVNKRVQDIHPTVPNPYNLLSSLPPSHTWYSVLDLKDAFFCLKLHPNSQPLFAFEWRDPEKGNTGQLTWTRLPQGFKNSPTLFNEALHRDLASFRALNPQVVMLQYVDDLLVAAPTYRDCKEGTRRLLQELSKLGYRVSAKKAQLCREEVTYLGYLLKGGKRWLTPARKATVMKIPTPTTPRQVREFLGTAGFCRLWIPGFASLAAPLYPLTRPKVPFTWTEAHQEAFGRIKEALLSAPALALPDLTKPFALYVDEKEGVARGVLTQTLGPWRRPVAYLSKKLDPVASGWPTCLKAIAAVALLLKDADKLTLGQNVLVIAPHNLESIVRQPPDRWMTNARMTHYQSLLLNERVSFAPPAILNPATLLPVESDDTPIHICSEILAEETGTRPDLRDQPLPGVPAWYTDGSSFIMDGRRQAGAAIVDNKRTVWASNLPEGTSAQKAELIALTQALRLAEGKSINIYTDSRYAFATAHVHGAIYKQRGWLTSAGKDIKNKEEILALLEAIHLPKRVAIIHCPGHQRGTDPVATGNRKADEAAKQAAQSTRILTETTKNAGKRTADGSEFEKRTADGSEFESPKKKAKVE

SEQ ID NO: 1621 - protein, 2146 aa, synthetic construct
  source 1..2146: note = Description of Artificial Sequence: Synthetic polypeptide
MPAAKRVKLDGGDKKYSIGLDIGTNSVGWAVITDEYKVPSKKFKVLGNTDRHSIKKNLIGALLFDSGETAEATRLKRTARRRYTRRKNRICYLQEIFSNEMAKVDDSFFHRLEESFLVEEDKKHERHPIFGNIVDEVAYHEKYPTIYHLRKKLVDSTDKADLRLIYLALAHMIKFRGHFLIEGDLNPDNSDVDKLFIQLVQTYNQLFEENPINASGVDAKAILSARLSKSRRLENLIAQLPGEKKNGLFGNLIALSLGLTPNFKSNFDLAEDAKLQLSKDTYDDDLDNLLAQIGDQYADLFLAAKNLSDAILLSDILRVNTEITKAPLSASMIKRYDEHHQDLTLLKALVRQQLPEKYKEIFFDQSKNGYAGYIDGGASQEEFYKFIKPILEKMDGTEELLVKLNREDLLRKQRTFDNGSIPHQIHLGELHAILRRQEDFYPFLKDNREKIEKILTFRIPYYVGPLARGNSRFAWMTRKSEETITPWNFEEVVDKGASAQSFIERMTNFDKNLPNEKVLPKHSLLYEYFTVYNELTKVKYVTEGMRKPAFLSGEQKKAIVDLLFKTNRKVTVKQLKEDYFKKIECFDSVEISGVEDRFNASLGTYHDLLKIIKDKDFLDNEENEDILEDIVLTLTLFEDREMIEERLKTYAHLFDDKVMKQLKRRRYTGWGRLSRKLINGIRDKQSGKTILDFLKSDGFANRNFMQLIHDDSLTFKEDIQKAQVSGQGDSLHEHIANLAGSPAIKKGILQTVKVVDELVKVMGRHKPENIVIEMARENQTTQKGQKNSRERMKRIEEGIKELGSQILKEHPVENTQLQNEKLYLYYLQNGRDMYVDQELDINRLSDYDVDHIVPQSFLKDDSIDNKVLTRSDKARGKSDNVPSEEVVKKMKNYWRQLLNAKLITQRKFDNLTKAERGGLSELDKAGFIKRQLVETRQITKHVAQILDSRMNTKYDENDKLIREVKVITLKSKLVSDFRKDFQFYKVREINNYHHAHDAYLNAVVGTALIKKYPKLESEFVYGDYKVYDVRKMIAKSEQEIGKATAKYFFYSNIMNFFKTEITLANGEIRKRPLIETNGETGEIVWDKGRDFATVRKVLSMPQVNIVKKTEVQTGGFSKESILPKRNSDKLIARKKDWDPKKYGGFDSPTVAYSVLVVAKVEKGKSKKLKSVKELLGITIMERSSFEKNPIDFLEAKGYKEVKKDLIIKLPKYSLFELENGRKRMLASAGELQKGNELALPSKYVNFLYLASHYEKLKGSPEDNEQKQLFVEQHKHYLDEIIEQISEFSKRVILADANLDKVLSAYNKHRDKPIREQAENIIHLFTLTNLGAPAAFKYFDTTIDRKRYTSTKEVLDATLIHQSITGLYETRIDLSQLGGDGGEAAAKEAAAKEAAAKEAAAKEAAAKEAAAKGGLLGRDLLTKLKAQIQFSTEGPQVTWEDRPAMCLVLNLEEEYRLHEKPVPPSIDPSWLQLFPMVWAEKAGMGLANQVPPVVVELKSDASPVAVRQYPMSKEAREGIRPHIQRFLDLGILVPCQSPWNTPLLPVKKPGTNDYRPVQDLREVNKRVQDIHPTVPNPYNLLSSLPPSHTWYSVLDLKDAFFCLKLHPNSQPLFAFEWRDPEKGNTGQLTWTRLPQGFKNSPTLFNEALHRDLASFRALNPQVVMLQYVDDLLVAAPTYRDCKEGTRRLLQELSKLGYRVSAKKAQLCREEVTYLGYLLKGGKRWLTPARKATVMKIPTPTTPRQVREFLGTAGFCRLWIPGFASLAAPLYPLTRPKVPFTWTEAHQEAFGRIKEALLSAPALALPDLTKPFALYVDEKEGVARGVLTQTLGPWRRPVAYLSKKLDPVASGWPTCLKAIAAVALLLKDADKLTLGQNVLVIAPHNLESIVRQPPDRWMTNARMTHYQSLLLNERVSFAPPAILNPATLLPVESDDTPIHICSEILAEETGTRPDLRDQPLPGVPAWYTDGSSFIMDGRRQAGAAIVDNKRTVWASNLPEGTSAQKAELIALTQALRLAEGKSINIYTDSRYAFATAHVHGAIYKQRGWLTSAGKDIKNKEEILALLEAIHLPKRVAIIHCPGHQRGTDPVATGNRKADEAAKQAAQSTRILTETTKNAGKRTADGSEFEKRTADGSEFESPKKKAKVE

SEQ ID NO: 1622 - protein, 2162 aa, synthetic construct
  source 1..2162: note = Description of Artificial Sequence: Synthetic polypeptide
MPAAKRVKLDGGDKKYSIGLDIGTNSVGWAVITDEYKVPSKKFKVLGNTDRHSIKKNLIGALLFDSGETAEATRLKRTARRRYTRRKNRICYLQEIFSNEMAKVDDSFFHRLEESFLVEEDKKHERHPIFGNIVDEVAYHEKYPTIYHLRKKLVDSTDKADLRLIYLALAHMIKFRGHFLIEGDLNPDNSDVDKLFIQLVQTYNQLFEENPINASGVDAKAILSARLSKSRRLENLIAQLPGEKKNGLFGNLIALSLGLTPNFKSNFDLAEDAKLQLSKDTYDDDLDNLLAQIGDQYADLFLAAKNLSDAILLSDILRVNTEITKAPLSASMIKRYDEHHQDLTLLKALVRQQLPEKYKEIFFDQSKNGYAGYIDGGASQEEFYKFIKPILEKMDGTEELLVKLNREDLLRKQRTFDNGSIPHQIHLGELHAILRRQEDFYPFLKDNREKIEKILTFRIPYYVGPLARGNSRFAWMTRKSEETITPWNFEEVVDKGASAQSFIERMTNFDKNLPNEKVLPKHSLLYEYFTVYNELTKVKYVTEGMRKPAFLSGEQKKAIVDLLFKTNRKVTVKQLKEDYFKKIECFDSVEISGVEDRFNASLGTYHDLLKIIKDKDFLDNEENEDILEDIVLTLTLFEDREMIEERLKTYAHLFDDKVMKQLKRRRYTGWGRLSRKLINGIRDKQSGKTILDFLKSDGFANRNFMQLIHDDSLTFKEDIQKAQVSGQGDSLHEHIANLAGSPAIKKGILQTVKVVDELVKVMGRHKPENIVIEMARENQTTQKGQKNSRERMKRIEEGIKELGSQILKEHPVENTQLQNEKLYLYYLQNGRDMYVDQELDINRLSDYDVDHIVPQSFLKDDSIDNKVLTRSDKARGKSDNVPSEEVVKKMKNYWRQLLNAKLITQRKFDNLTKAERGGLSELDKAGFIKRQLVETRQITKHVAQILDSRMNTKYDENDKLIREVKVITLKSKLVSDFRKDFQFYKVREINNYHHAHDAYLNAVVGTALIKKYPKLESEFVYGDYKVYDVRKMIAKSEQEIGKATAKYFFYSNIMNFFKTEITLANGEIRKRPLIETNGETGEIVWDKGRDFATVRKVLSMPQVNIVKKTEVQTGGFSKESILPKRNSDKLIARKKDWDPKKYGGFDSPTVAYSVLVVAKVEKGKSKKLKSVKELLGITIMERSSFEKNPIDFLEAKGYKEVKKDLIIKLPKYSLFELENGRKRMLASAGELQKGNELALPSKYVNFLYLASHYEKLKGSPEDNEQKQLFVEQHKHYLDEIIEQISEFSKRVILADANLDKVLSAYNKHRDKPIREQAENIIHLFTLTNLGAPAAFKYFDTTIDRKRYTSTKEVLDATLIHQSITGLYETRIDLSQLGGDGGAEAAAKEAAAKEAAAKEAAAKALEAEAAAKEAAAKEAAAKEAAAKAGGLLGRDLLTKLKAQIQFSTEGPQVTWEDRPAMCLVLNLEEEYRLHEKPVPPSIDPSWLQLFPMVWAEKAGMGLANQVPPVVVELKSDASPVAVRQYPMSKEAREGIRPHIQRFLDLGILVPCQSPWNTPLLPVKKPGTNDYRPVQDLREVNKRVQDIHPTVPNPYNLLSSLPPSHTWYSVLDLKDAFFCLKLHPNSQPLFAFEWRDPEKGNTGQLTWTRLPQGFKNSPTLFNEALHRDLASFRALNPQVVMLQYVDDLLVAAPTYRDCKEGTRRLLQELSKLGYRVSAKKAQLCREEVTYLGYLLKGGKRWLTPARKATVMKIPTPTTPRQVREFLGTAGFCRLWIPGFASLAAPLYPLTRPKVPFTWTEAHQEAFGRIKEALLSAPALALPDLTKPFALYVDEKEGVARGVLTQTLGPWRRPVAYLSKKLDPVASGWPTCLKAIAAVALLLKDADKLTLGQNVLVIAPHNLESIVRQPPDRWMTNARMTHYQSLLLNERVSFAPPAILNPATLLPVESDDTPIHICSEILAEETGTRPDLRDQPLPGVPAWYTDGSSFIMDGRRQAGAAIVDNKRTVWASNLPEGTSAQKAELIALTQALRLAEGKSINIYTDSRYAFATAHVHGAIYKQRGWLTSAGKDIKNKEEILALLEAIHLPKRVAIIHCPGHQRGTDPVATGNRKADEAAKQAAQSTRILTETTKNAGKRTADGSEFEKRTADGSEFESPKKKAKVE

SEQ ID NO: 1623 - protein, 2127 aa, synthetic construct
  source 1..2127: note = Description of Artificial Sequence: Synthetic polypeptide
MPAAKRVKLDGGDKKYSIGLDIGTNSVGWAVITDEYKVPSKKFKVLGNTDRHSIKKNLIGALLFDSGETAEATRLKRTARRRYTRRKNRICYLQEIFSNEMAKVDDSFFHRLEESFLVEEDKKHERHPIFGNIVDEVAYHEKYPTIYHLRKKLVDSTDKADLRLIYLALAHMIKFRGHFLIEGDLNPDNSDVDKLFIQLVQTYNQLFEENPINASGVDAKAILSARLSKSRRLENLIAQLPGEKKNGLFGNLIALSLGLTPNFKSNFDLAEDAKLQLSKDTYDDDLDNLLAQIGDQYADLFLAAKNLSDAILLSDILRVNTEITKAPLSASMIKRYDEHHQDLTLLKALVRQQLPEKYKEIFFDQSKNGYAGYIDGGASQEEFYKFIKPILEKMDGTEELLVKLNREDLLRKQRTFDNGSIPHQIHLGELHAILRRQEDFYPFLKDNREKIEKILTFRIPYYVGPLARGNSRFAWMTRKSEETITPWNFEEVVDKGASAQSFIERMTNFDKNLPNEKVLPKHSLLYEYFTVYNELTKVKYVTEGMRKPAFLSGEQKKAIVDLLFKTNRKVTVKQLKEDYFKKIECFDSVEISGVEDRFNASLGTYHDLLKIIKDKDFLDNEENEDILEDIVLTLTLFEDREMIEERLKTYAHLFDDKVMKQLKRRRYTGWGRLSRKLINGIRDKQSGKTILDFLKSDGFANRNFMQLIHDDSLTFKEDIQKAQVSGQGDSLHEHIANLAGSPAIKKGILQTVKVVDELVKVMGRHKPENIVIEMARENQTTQKGQKNSRERMKRIEEGIKELGSQILKEHPVENTQLQNEKLYLYYLQNGRDMYVDQELDINRLSDYDVDHIVPQSFLKDDSIDNKVLTRSDKARGKSDNVPSEEVVKKMKNYWRQLLNAKLITQRKFDNLTKAERGGLSELDKAGFIKRQLVETRQITKHVAQILDSRMNTKYDENDKLIREVKVITLKSKLVSDFRKDFQFYKVREINNYHHAHDAYLNAVVGTALIKKYPKLESEFVYGDYKVYDVRKMIAKSEQEIGKATAKYFFYSNIMNFFKTEITLANGEIRKRPLIETNGETGEIVWDKGRDFATVRKVLSMPQVNIVKKTEVQTGGFSKESILPKRNSDKLIARKKDWDPKKYGGFDSPTVAYSVLVVAKVEKGKSKKLKSVKELLGITIMERSSFEKNPIDFLEAKGYKEVKKDLIIKLPKYSLFELENGRKRMLASAGELQKGNELALPSKYVNFLYLASHYEKLKGSPEDNEQKQLFVEQHKHYLDEIIEQISEFSKRVILADANLDKVLSAYNKHRDKPIREQAENIIHLFTLTNLGAPAAFKYFDTTIDRKRYTSTKEVLDATLIHQSITGLYETRIDLSQLGGDGGGSSEAAAKGGSGGLLGRDLLTKLKAQIQFSTEGPQVTWEDRPAMCLVLNLEEEYRLHEKPVPPSIDPSWLQLFPMVWAEKAGMGLANQVPPVVVELKSDASPVAVRQYPMSKEAREGIRPHIQRFLDLGILVPCQSPWNTPLLPVKKPGTNDYRPVQDLREVNKRVQDIHPTVPNPYNLLSSLPPSHTWYSVLDLKDAFFCLKLHPNSQPLFAFEWRDPEKGNTGQLTWTRLPQGFKNSPTLFNEALHRDLASFRALNPQVVMLQYVDDLLVAAPTYRDCKEGTRRLLQELSKLGYRVSAKKAQLCREEVTYLGYLLKGGKRWLTPARKATVMKIPTPTTPRQVREFLGTAGFCRLWIPGFASLAAPLYPLTRPKVPFTWTEAHQEAFGRIKEALLSAPALALPDLTKPFALYVDEKEGVARGVLTQTLGPWRRPVAYLSKKLDPVASGWPTCLKAIAAVALLLKDADKLTLGQNVLVIAPHNLESIVRQPPDRWMTNARMTHYQSLLLNERVSFAPPAILNPATLLPVESDDTPIHICSEILAEETGTRPDLRDQPLPGVPAWYTDGSSFIMDGRRQAGAAIVDNKRTVWASNLPEGTSAQKAELIALTQALRLAEGKSINIYTDSRYAFATAHVHGAIYKQRGWLTSAGKDIKNKEEILALLEAIHLPKRVAIIHCPGHQRGTDPVATGNRKADEAAKQAAQSTRILTETTKNAGKRTADGSEFEKRTADGSEFESPKKKAKVE

SEQ ID NO: 1624 - protein, 2127 aa, synthetic construct
  source 1..2127: note = Description of Artificial Sequence: Synthetic polypeptide
MPAAKRVKLDGGDKKYSIGLDIGTNSVGWAVITDEYKVPSKKFKVLGNTDRHSIKKNLIGALLFDSGETAEATRLKRTARRRYTRRKNRICYLQEIFSNEMAKVDDSFFHRLEESFLVEEDKKHERHPIFGNIVDEVAYHEKYPTIYHLRKKLVDSTDKADLRLIYLALAHMIKFRGHFLIEGDLNPDNSDVDKLFIQLVQTYNQLFEENPINASGVDAKAILSARLSKSRRLENLIAQLPGEKKNGLFGNLIALSLGLTPNFKSNFDLAEDAKLQLSKDTYDDDLDNLLAQIGDQYADLFLAAKNLSDAILLSDILRVNTEITKAPLSASMIKRYDEHHQDLTLLKALVRQQLPEKYKEIFFDQSKNGYAGYIDGGASQEEFYKFIKPILEKMDGTEELLVKLNREDLLRKQRTFDNGSIPHQIHLGELHAILRRQEDFYPFLKDNREKIEKILTFRIPYYVGPLARGNSRFAWMTRKSEETITPWNFEEVVDKGASAQSFIERMTNFDKNLPNEKVLPKHSLLYEYFTVYNELTKVKYVTEGMRKPAFLSGEQKKAIVDLLFKTNRKVTVKQLKEDYFKKIECFDSVEISGVEDRFNASLGTYHDLLKIIKDKDFLDNEENEDILEDIVLTLTLFEDREMIEERLKTYAHLFDDKVMKQLKRRRYTGWGRLSRKLINGIRDKQSGKTILDFLKSDGFANRNFMQLIHDDSLTFKEDIQKAQVSGQGDSLHEHIANLAGSPAIKKGILQTVKVVDELVKVMGRHKPENIVIEMARENQTTQKGQKNSRERMKRIEEGIKELGSQILKEHPVENTQLQNEKLYLYYLQNGRDMYVDQELDINRLSDYDVDHIVPQSFLKDDSIDNKVLTRSDKARGKSDNVPSEEVVKKMKNYWRQLLNAKLITQRKFDNLTKAERGGLSELDKAGFIKRQLVETRQITKHVAQILDSRMNTKYDENDKLIREVKVITLKSKLVSDFRKDFQFYKVREINNYHHAHDAYLNAVVGTALIKKYPKLESEFVYGDYKVYDVRKMIAKSEQEIGKATAKYFFYSNIMNFFKTEITLANGEIRKRPLIETNGETGEIVWDKGRDFATVRKVLSMPQVNIVKKTEVQTGGFSKESILPKRNSDKLIARKKDWDPKKYGGFDSPTVAYSVLVVAKVEKGKSKKLKSVKELLGITIMERSSFEKNPIDFLEAKGYKEVKKDLIIKLPKYSLFELENGRKRMLASAGELQKGNELALPSKYVNFLYLASHYEKLKGSPEDNEQKQLFVEQHKHYLDEIIEQISEFSKRVILADANLDKVLSAYNKHRDKPIREQAENIIHLFTLTNLGAPAAFKYFDTTIDRKRYTSTKEVLDATLIHQSITGLYETRIDLSQLGGDGGEAAAKGSSPAPGGLLGRDLLTKLKAQIQFSTEGPQVTWEDRPAMCLVLNLEEEYRLHEKPVPPSIDPSWLQLFPMVWAEKAGMGLANQVPPVVVELKSDASPVAVRQYPMSKEAREGIRPHIQRFLDLGILVPCQSPWNTPLLPVKKPGTNDYRPVQDLREVNKRVQDIHPTVPNPYNLLSSLPPSHTWYSVLDLKDAFFCLKLHPNSQPLFAFEWRDPEKGNTGQLTWTRLPQGFKNSPTLFNEALHRDLASFRALNPQVVMLQYVDDLLVAAPTYRDCKEGTRRLLQELSKLGYRVSAKKAQLCREEVTYLGYLLKGGKRWLTPARKATVMKIPTPTTPRQVREFLGTAGFCRLWIPGFASLAAPLYPLTRPKVPFTWTEAHQEAFGRIKEALLSAPALALPDLTKPFALYVDEKEGVARGVLTQTLGPWRRPVAYLSKKLDPVASGWPTCLKAIAAVALLLKDADKLTLGQNVLVIAPHNLESIVRQPPDRWMTNARMTHYQSLLLNERVSFAPPAILNPATLLPVESDDTPIHICSEILAEETGTRPDLRDQPLPGVPAWYTDGSSFIMDGRRQAGAAIVDNKRTVWASNLPEGTSAQKAELIALTQALRLAEGKSINIYTDSRYAFATAHVHGAIYKQRGWLTSAGKDIKNKEEILALLEAIHLPKRVAIIHCPGHQRGTDPVATGNRKADEAAKQAAQSTRILTETTKNAGKRTADGSEFEKRTADGSEFESPKKKAKVE

SEQ ID NO: 1625 - protein, 2122 aa, synthetic construct
  source 1..2122: note = Description of Artificial Sequence: Synthetic polypeptide
MPAAKRVKLDGGDKKYSIGLDIGTNSVGWAVITDEYKVPSKKFKVLGNTDRHSIKKNLIGALLFDSGETAEATRLKRTARRRYTRRKNRICYLQEIFSNEMAKVDDSFFHRLEESFLVEEDKKHERHPIFGNIVDEVAYHEKYPTIYHLRKKLVDSTDKADLRLIYLALAHMIKFRGHFLIEGDLNPDNSDVDKLFIQLVQTYNQLFEENPINASGVDAKAILSARLSKSRRLENLIAQLPGEKKNGLFGNLIALSLGLTPNFKSNFDLAEDAKLQLSKDTYDDDLDNLLAQIGDQYADLFLAAKNLSDAILLSDILRVNTEITKAPLSASMIKRYDEHHQDLTLLKALVRQQLPEKYKEIFFDQSKNGYAGYIDGGASQEEFYKFIKPILEKMDGTEELLVKLNREDLLRKQRTFDNGSIPHQIHLGELHAILRRQEDFYPFLKDNREKIEKILTFRIPYYVGPLARGNSRFAWMTRKSEETITPWNFEEVVDKGASAQSFIERMTNFDKNLPNEKVLPKHSLLYEYFTVYNELTKVKYVTEGMRKPAFLSGEQKKAIVDLLFKTNRKVTVKQLKEDYFKKIECFDSVEISGVEDRFNASLGTYHDLLKIIKDKDFLDNEENEDILEDIVLTLTLFEDREMIEERLKTYAHLFDDKVMKQLKRRRYTGWGRLSRKLINGIRDKQSGKTILDFLKSDGFANRNFMQLIHDDSLTFKEDIQKAQVSGQGDSLHEHIANLAGSPAIKKGILQTVKVVDELVKVMGRHKPENIVIEMARENQTTQKGQKNSRERMKRIEEGIKELGSQILKEHPVENTQLQNEKLYLYYLQNGRDMYVDQELDINRLSDYDVDHIVPQSFLKDDSIDNKVLTRSDKARGKSDNVPSEEVVKKMKNYWRQLLNAKLITQRKFDNLTKAERGGLSELDKAGFIKRQLVETRQITKHVAQILDSRMNTKYDENDKLIREVKVITLKSKLVSDFRKDFQFYKVREINNYHHAHDAYLNAVVGTALIKKYPKLESEFVYGDYKVYDVRKMIAKSEQEIGKATAKYFFYSNIMNFFKTEITLANGEIRKRPLIETNGETGEIVWDKGRDFATVRKVLSMPQVNIVKKTEVQTGGFSKESILPKRNSDKLIARKKDWDPKKYGGFDSPTVAYSVLVVAKVEKGKSKKLKSVKELLGITIMERSSFEKNPIDFLEAKGYKEVKKDLIIKLPKYSLFELENGRKRMLASAGELQKGNELALPSKYVNFLYLASHYEKLKGSPEDNEQKQLFVEQHKHYLDEIIEQISEFSKRVILADANLDKVLSAYNKHRDKPIREQAENIIHLFTLTNLGAPAAFKYFDTTIDRKRYTSTKEVLDATLIHQSITGLYETRIDLSQLGGDGGGSSGSSGGLLGRDLLTKLKAQIQFSTEGPQVTWEDRPAMCLVLNLEEEYRLHEKPVPPSIDPSWLQLFPMVWAEKAGMGLANQVPPVVVELKSDASPVAVRQYPMSKEAREGIRPHIQRFLDLGILVPCQSPWNTPLLPVKKPGTNDYRPVQDLREVNKRVQDIHPTVPNPYNLLSSLPPSHTWYSVLDLKDAFFCLKLHPNSQPLFAFEWRDPEKGNTGQLTWTRLPQGFKNSPTLFNEALHRDLASFRALNPQVVMLQYVDDLLVAAPTYRDCKEGTRRLLQELSKLGYRVSAKKAQLCREEVTYLGYLLKGGKRWLTPARKATVMKIPTPTTPRQVREFLGTAGFCRLWIPGFASLAAPLYPLTRPKVPFTWTEAHQEAFGRIKEALLSAPALALPDLTKPFALYVDEKEGVARGVLTQTLGPWRRPVAYLSKKLDPVASGWPTCLKAIAAVALLLKDADKLTLGQNVLVIAPHNLESIVRQPPDRWMTNARMTHYQSLLLNERVSFAPPAILNPATLLPVESDDTPIHICSEILAEETGTRPDLRDQPLPGVPAWYTDGSSFIMDGRRQAGAAIVDNKRTVWASNLPEGTSAQKAELIALTQALRLAEGKSINIYTDSRYAFATAHVHGAIYKQRGWLTSAGKDIKNKEEILALLEAIHLPKRVAIIHCPGHQRGTDPVATGNRKADEAAKQAAQSTRILTETTKNAGKRTADGSEFEKRTADGSEFESPKKKAKVE

SEQ ID NO: 1626 - protein, 2122 aa, synthetic construct
  source 1..2122: note = Description of Artificial Sequence: Synthetic polypeptide
MPAAKRVKLDGGDKKYSIGLDIGTNSVGWAVITDEYKVPSKKFKVLGNTDRHSIKKNLIGALLFDSGETAEATRLKRTARRRYTRRKNRICYLQEIFSNEMAKVDDSFFHRLEESFLVEEDKKHERHPIFGNIVDEVAYHEKYPTIYHLRKKLVDSTDKADLRLIYLALAHMIKFRGHFLIEGDLNPDNSDVDKLFIQLVQTYNQLFEENPINASGVDAKAILSARLSKSRRLENLIAQLPGEKKNGLFGNLIALSLGLTPNFKSNFDLAEDAKLQLSKDTYDDDLDNLLAQIGDQYADLFLAAKNLSDAILLSDILRVNTEITKAPLSASMIKRYDEHHQDLTLLKALVRQQLPEKYKEIFFDQSKNGYAGYIDGGASQEEFYKFIKPILEKMDGTEELLVKLNREDLLRKQRTFDNGSIPHQIHLGELHAILRRQEDFYPFLKDNREKIEKILTFRIPYYVGPLARGNSRFAWMTRKSEETITPWNFEEVVDKGASAQSFIERMTNFDKNLPNEKVLPKHSLLYEYFTVYNELTKVKYVTEGMRKPAFLSGEQKKAIVDLLFKTNRKVTVKQLKEDYFKKIECFDSVEISGVEDRFNASLGTYHDLLKIIKDKDFLDNEENEDILEDIVLTLTLFEDREMIEERLKTYAHLFDDKVMKQLKRRRYTGWGRLSRKLINGIRDKQSGKTILDFLKSDGFANRNFMQLIHDDSLTFKEDIQKAQVSGQGDSLHEHIANLAGSPAIKKGILQTVKVVDELVKVMGRHKPENIVIEMARENQTTQKGQKNSRERMKRIEEGIKELGSQILKEHPVENTQLQNEKLYLYYLQNGRDMYVDQELDINRLSDYDVDHIVPQSFLKDDSIDNKVLTRSDKARGKSDNVPSEEVVKKMKNYWRQLLNAKLITQRKFDNLTKAERGGLSELDKAGFIKRQLVETRQITKHVAQILDSRMNTKYDENDKLIREVKVITLKSKLVSDFRKDFQFYKVREINNYHHAHDAYLNAVVGTALIKKYPKLESEFVYGDYKVYDVRKMIAKSEQEIGKATAKYFFYSNIMNFFKTEITLANGEIRKRPLIETNGETGEIVWDKGRDFATVRKVLSMPQVNIVKKTEVQTGGFSKESILPKRNSDKLIARKKDWDPKKYGGFDSPTVAYSVLVVAKVEKGKSKKLKSVKELLGITIMERSSFEKNPIDFLEAKGYKEVKKDLIIKLPKYSLFELENGRKRMLASAGELQKGNELALPSKYVNFLYLASHYEKLKGSPEDNEQKQLFVEQHKHYLDEIIEQISEFSKRVILADANLDKVLSAYNKHRDKPIREQAENIIHLFTLTNLGAPAAFKYFDTTIDRKRYTSTKEVLDATLIHQSITGLYETRIDLSQLGGDGGGGSGGGGGLLGRDLLTKLKAQIQFSTEGPQVTWEDRPAMCLVLNLEEEYRLHEKPVPPSIDPSWLQLFPMVWAEKAGMGLANQVPPVVVELKSDASPVAVRQYPMSKEAREGIRPHIQRFLDLGILVPCQSPWNTPLLPVKKPGTNDYRPVQDLREVNKRVQDIHPTVPNPYNLLSSLPPSHTWYSVLDLKDAFFCLKLHPNSQPLFAFEWRDPEKGNTGQLTWTRLPQGFKNSPTLFNEALHRDLASFRALNPQVVMLQYVDDLLVAAPTYRDCKEGTRRLLQELSKLGYRVSAKKAQLCREEVTYLGYLLKGGKRWLTPARKATVMKIPTPTTPRQVREFLGTAGFCRLWIPGFASLAAPLYPLTRPKVPFTWTEAHQEAFGRIKEALLSAPALALPDLTKPFALYVDEKEGVARGVLTQTLGPWRRPVAYLSKKLDPVASGWPTCLKAIAAVALLLKDADKLTLGQNVLVIAPHNLESIVRQPPDRWMTNARMTHYQSLLLNERVSFAPPAILNPATLLPVESDDTPIHICSEILAEETGTRPDLRDQPLPGVPAWYTDGSSFIMDGRRQAGAAIVDNKRTVWASNLPEGTSAQKAELIALTQALRLAEGKSINIYTDSRYAFATAHVHGAIYKQRGWLTSAGKDIKNKEEILALLEAIHLPKRVAIIHCPGHQRGTDPVATGNRKADEAAKQAAQSTRILTETTKNAGKRTADGSEFEKRTADGSEFESPKKKAKVE

SEQ ID NO: 1627 - protein, 2122 aa, synthetic construct
  source 1..2122: note = Description of Artificial Sequence: Synthetic polypeptide
MPAAKRVKLDGGDKKYSIGLDIGTNSVGWAVITDEYKVPSKKFKVLGNTDRHSIKKNLIGALLFDSGETAEATRLKRTARRRYTRRKNRICYLQEIFSNEMAKVDDSFFHRLEESFLVEEDKKHERHPIFGNIVDEVAYHEKYPTIYHLRKKLVDSTDKADLRLIYLALAHMIKFRGHFLIEGDLNPDNSDVDKLFIQLVQTYNQLFEENPINASGVDAKAILSARLSKSRRLENLIAQLPGEKKNGLFGNLIALSLGLTPNFKSNFDLAEDAKLQLSKDTYDDDLDNLLAQIGDQYADLFLAAKNLSDAILLSDILRVNTEITKAPLSASMIKRYDEHHQDLTLLKALVRQQLPEKYKEIFFDQSKNGYAGYIDGGASQEEFYKFIKPILEKMDGTEELLVKLNREDLLRKQRTFDNGSIPHQIHLGELHAILRRQEDFYPFLKDNREKIEKILTFRIPYYVGPLARGNSRFAWMTRKSEETITPWNFEEVVDKGASAQSFIERMTNFDKNLPNEKVLPKHSLLYEYFTVYNELTKVKYVTEGMRKPAFLSGEQKKAIVDLLFKTNRKVTVKQLKEDYFKKIECFDSVEISGVEDRFNASLGTYHDLLKIIKDKDFLDNEENEDILEDIVLTLTLFEDREMIEERLKTYAHLFDDKVMKQLKRRRYTGWGRLSRKLINGIRDKQSGKTILDFLKSDGFANRNFMQLIHDDSLTFKEDIQKAQVSGQGDSLHEHIANLAGSPAIKKGILQTVKVVDELVKVMGRHKPENIVIEMARENQTTQKGQKNSRERMKRIEEGIKELGSQILKEHPVENTQLQNEKLYLYYLQNGRDMYVDQELDINRLSDYDVDHIVPQSFLKDDSIDNKVLTRSDKARGKSDNVPSEEVVKKMKNYWRQLLNAKLITQRKFDNLTKAERGGLSELDKAGFIKRQLVETRQITKHVAQILDSRMNTKYDENDKLIREVKVITLKSKLVSDFRKDFQFYKVREINNYHHAHDAYLNAVVGTALIKKYPKLESEFVYGDYKVYDVRKMIAKSEQEIGKATAKYFFYSNIMNFFKTEITLANGEIRKRPLIETNGETGEIVWDKGRDFATVRKVLSMPQVNIVKKTEVQTGGFSKESILPKRNSDKLIARKKDWDPKKYGGFDSPTVAYSVLVVAKVEKGKSKKLKSVKELLGITIMERSSFEKNPIDFLEAKGYKEVKKDLIIKLPKYSLFELENGRKRMLASAGELQKGNELALPSKYVNFLYLASHYEKLKGSPEDNEQKQLFVEQHKHYLDEIIEQISEFSKRVILADANLDKVLSAYNKHRDKPIREQAENIIHLFTLTNLGAPAAFKYFDTTIDRKRYTSTKEVLDATLIHQSITGLYETRIDLSQLGGDGGPAPGSSGGLLGRDLLTKLKAQIQFSTEGPQVTWEDRPAMCLVLNLEEEYRLHEKPVPPSIDPSWLQLFPMVWAEKAGMGLANQVPPVVVELKSDASPVAVRQYPMSKEAREGIRPHIQRFLDLGILVPCQSPWNTPLLPVKKPGTNDYRPVQDLREVNKRVQDIHPTVPNPYNLLSSLPPSHTWYSVLDLKDAFFCLKLHPNSQPLFAFEWRDPEKGNTGQLTWTRLPQGFKNSPTLFNEALHRDLASFRALNPQVVMLQYVDDLLVAAPTYRDCKEGTRRLLQELSKLGYRVSAKKAQLCREEVTYLGYLLKGGKRWLTPARKATVMKIPTPTTPRQVREFLGTAGFCRLWIPGFASLAAPLYPLTRPKVPFTWTEAHQEAFGRIKEALLSAPALALPDLTKPFALYVDEKEGVARGVLTQTLGPWRRPVAYLSKKLDPVASGWPTCLKAIAAVALLLKDADKLTLGQNVLVIAPHNLESIVRQPPDRWMTNARMTHYQSLLLNERVSFAPPAILNPATLLPVESDDTPIHICSEILAEETGTRPDLRDQPLPGVPAWYTDGSSFIMDGRRQAGAAIVDNKRTVWASNLPEGTSAQKAELIALTQALRLAEGKSINIYTDSRYAFATAHVHGAIYKQRGWLTSAGKDIKNKEEILALLEAIHLPKRVAIIHCPGHQRGTDPVATGNRKADEAAKQAAQSTRILTETTKNAGKRTADGSEFEKRTADGSEFESPKKKAKVE

SEQ ID NO: 1628 - protein, 2122 aa, synthetic construct
  source 1..2122: note = Description of Artificial Sequence: Synthetic polypeptide
MPAAKRVKLDGGDKKYSIGLDIGTNSVGWAVITDEYKVPSKKFKVLGNTDRHSIKKNLIGALLFDSGETAEATRLKRTARRRYTRRKNRICYLQEIFSNEMAKVDDSFFHRLEESFLVEEDKKHERHPIFGNIVDEVAYHEKYPTIYHLRKKLVDSTDKADLRLIYLALAHMIKFRGHFLIEGDLNPDNSDVDKLFIQLVQTYNQLFEENPINASGVDAKAILSARLSKSRRLENLIAQLPGEKKNGLFGNLIALSLGLTPNFKSNFDLAEDAKLQLSKDTYDDDLDNLLAQIGDQYADLFLAAKNLSDAILLSDILRVNTEITKAPLSASMIKRYDEHHQDLTLLKALVRQQLPEKYKEIFFDQSKNGYAGYIDGGASQEEFYKFIKPILEKMDGTEELLVKLNREDLLRKQRTFDNGSIPHQIHLGELHAILRRQEDFYPFLKDNREKIEKILTFRIPYYVGPLARGNSRFAWMTRKSEETITPWNFEEVVDKGASAQSFIERMTNFDKNLPNEKVLPKHSLLYEYFTVYNELTKVKYVTEGMRKPAFLSGEQKKAIVDLLFKTNRKVTVKQLKEDYFKKIECFDSVEISGVEDRFNASLGTYHDLLKIIKDKDFLDNEENEDILEDIVLTLTLFEDREMIEERLKTYAHLFDDKVMKQLKRRRYTGWGRLSRKLINGIRDKQSGKTILDFLKSDGFANRNFMQLIHDDSLTFKEDIQKAQVSGQGDSLHEHIANLAGSPAIKKGILQTVKVVDELVKVMGRHKPENIVIEMARENQTTQKGQKNSRERMKRIEEGIKELGSQILKEHPVENTQLQNEKLYLYYLQNGRDMYVDQELDINRLSDYDVDHIVPQSFLKDDSIDNKVLTRSDKARGKSDNVPSEEVVKKMKNYWRQLLNAKLITQRKFDNLTKAERGGLSELDKAGFIKRQLVETRQITKHVAQILDSRMNTKYDENDKLIREVKVITLKSKLVSDFRKDFQFYKVREINNYHHAHDAYLNAVVGTALIKKYPKLESEFVYGDYKVYDVRKMIAKSEQEIGKATAKYFFYSNIMNFFKTEITLANGEIRKRPLIETNGETGEIVWDKGRDFATVRKVLSMPQVNIVKKTEVQTGGFSKESILPKRNSDKLIARKKDWDPKKYGGFDSPTVAYSVLVVAKVEKGKSKKLKSVKELLGITIMERSSFEKNPIDFLEAKGYKEVKKDLIIKLPKYSLFELENGRKRMLASAGELQKGNELALPSKYVNFLYLASHYEKLKGSPEDNEQKQLFVEQHKHYLDEIIEQISEFSKRVILADANLDKVLSAYNKHRDKPIREQAENIIHLFTLTNLGAPAAFKYFDTTIDRKRYTSTKEVLDATLIHQSITGLYETRIDLSQLGGDGGGGGGGGGGLLGRDLLTKLKAQIQFSTEGPQVTWEDRPAMCLVLNLEEEYRLHEKPVPPSIDPSWLQLFPMVWAEKAGMGLANQVPPVVVELKSDASPVAVRQYPMSKEAREGIRPHIQRFLDLGILVPCQSPWNTPLLPVKKPGTNDYRPVQDLREVNKRVQDIHPTVPNPYNLLSSLPPSHTWYSVLDLKDAFFCLKLHPNSQPLFAFEWRDPEKGNTGQLTWTRLPQGFKNSPTLFNEALHRDLASFRALNPQVVMLQYVDDLLVAAPTYRDCKEGTRRLLQELSKLGYRVSAKKAQLCREEVTYLGYLLKGGKRWLTPARKATVMKIPTPTTPRQVREFLGTAGFCRLWIPGFASLAAPLYPLTRPKVPFTWTEAHQEAFGRIKEALLSAPALALPDLTKPFALYVDEKEGVARGVLTQTLGPWRRPVAYLSKKLDPVASGWPTCLKAIAAVALLLKDADKLTLGQNVLVIAPHNLESIVRQPPDRWMTNARMTHYQSLLLNERVSFAPPAILNPATLLPVESDDTPIHICSEILAEETGTRPDLRDQPLPGVPAWYTDGSSFIMDGRRQAGAAIVDNKRTVWASNLPEGTSAQKAELIALTQALRLAEGKSINIYTDSRYAFATAHVHGAIYKQRGWLTSAGKDIKNKEEILALLEAIHLPKRVAIIHCPGHQRGTDPVATGNRKADEAAKQAAQSTRILTETTKNAGKRTADGSEFEKRTADGSEFESPKKKAKVE

SEQ ID NO: 1629 - protein, 2124 aa, synthetic construct
  source 1..2124: note = Description of Artificial Sequence: Synthetic polypeptide
MPAAKRVKLDGGDKKYSIGLDIGTNSVGWAVITDEYKVPSKKFKVLGNTDRHSIKKNLIGALLFDSGETAEATRLKRTARRRYTRRKNRICYLQEIFSNEMAKVDDSFFHRLEESFLVEEDKKHERHPIFGNIVDEVAYHEKYPTIYHLRKKLVDSTDKADLRLIYLALAHMIKFRGHFLIEGDLNPDNSDVDKLFIQLVQTYNQLFEENPINASGVDAKAILSARLSKSRRLENLIAQLPGEKKNGLFGNLIALSLGLTPNFKSNFDLAEDAKLQLSKDTYDDDLDNLLAQIGDQYADLFLAAKNLSDAILLSDILRVNTEITKAPLSASMIKRYDEHHQDLTLLKALVRQQLPEKYKEIFFDQSKNGYAGYIDGGASQEEFYKFIKPILEKMDGTEELLVKLNREDLLRKQRTFDNGSIPHQIHLGELHAILRRQEDFYPFLKDNREKIEKILTFRIPYYVGPLARGNSRFAWMTRKSEETITPWNFEEVVDKGASAQSFIERMTNFDKNLPNEKVLPKHSLLYEYFTVYNELTKVKYVTEGMRKPAFLSGEQKKAIVDLLFKTNRKVTVKQLKEDYFKKIECFDSVEISGVEDRFNASLGTYHDLLKIIKDKDFLDNEENEDILEDIVLTLTLFEDREMIEERLKTYAHLFDDKVMKQLKRRRYTGWGRLSRKLINGIRDKQSGKTILDFLKSDGFANRNFMQLIHDDSLTFKEDIQKAQVSGQGDSLHEHIANLAGSPAIKKGILQTVKVVDELVKVMGRHKPENIVIEMARENQTTQKGQKNSRERMKRIEEGIKELGSQILKEHPVENTQLQNEKLYLYYLQNGRDMYVDQELDINRLSDYDVDHIVPQSFLKDDSIDNKVLTRSDKARGKSDNVPSEEVVKKMKNYWRQLLNAKLITQRKFDNLTKAERGGLSELDKAGFIKRQLVETRQITKHVAQILDSRMNTKYDENDKLIREVKVITLKSKLVSDFRKDFQFYKVREINNYHHAHDAYLNAVVGTALIKKYPKLESEFVYGDYKVYDVRKMIAKSEQEIGKATAKYFFYSNIMNFFKTEITLANGEIRKRPLIETNGETGEIVWDKGRDFATVRKVLSMPQVNIVKKTEVQTGGFSKESILPKRNSDKLIARKKDWDPKKYGGFDSPTVAYSVLVVAKVEKGKSKKLKSVKELLGITIMERSSFEKNPIDFLEAKGYKEVKKDLIIKLPKYSLFELENGRKRMLASAGELQKGNELALPSKYVNFLYLASHYEKLKGSPEDNEQKQLFVEQHKHYLDEIIEQISEFSKRVILADANLDKVLSAYNKHRDKPIREQAENIIHLFTLTNLGAPAAFKYFDTTIDRKRYTSTKEVLDATLIHQSITGLYETRIDLSQLGGDGGGGGEAAAKGGLLGRDLLTKLKAQIQFSTEGPQVTWEDRPAMCLVLNLEEEYRLHEKPVPPSIDPSWLQLFPMVWAEKAGMGLANQVPPVVVELKSDASPVAVRQYPMSKEAREGIRPHIQRFLDLGILVPCQSPWNTPLLPVKKPGTNDYRPVQDLREVNKRVQDIHPTVPNPYNLLSSLPPSHTWYSVLDLKDAFFCLKLHPNSQPLFAFEWRDPEKGNTGQLTWTRLPQGFKNSPTLFNEALHRDLASFRALNPQVVMLQYVDDLLVAAPTYRDCKEGTRRLLQELSKLGYRVSAKKAQLCREEVTYLGYLLKGGKRWLTPARKATVMKIPTPTTPRQVREFLGTAGFCRLWIPGFASLAAPLYPLTRPKVPFTWTEAHQEAFGRIKEALLSAPALALPDLTKPFALYVDEKEGVARGVLTQTLGPWRRPVAYLSKKLDPVASGWPTCLKAIAAVALLLKDADKLTLGQNVLVIAPHNLESIVRQPPDRWMTNARMTHYQSLLLNERVSFAPPAILNPATLLPVESDDTPIHICSEILAEETGTRPDLRDQPLPGVPAWYTDGSSFIMDGRRQAGAAIVDNKRTVWASNLPEGTSAQKAELIALTQALRLAEGKSINIYTDSRYAFATAHVHGAIYKQRGWLTSAGKDIKNKEEILALLEAIHLPKRVAIIHCPGHQRGTDPVATGNRKADEAAKQAAQSTRILTETTKNAGKRTADGSEFEKRTADGSEFESPKKKAKVE

SEQ ID NO: 1630 - protein, 2124 aa, synthetic construct
  source 1..2124: note = Description of Artificial Sequence: Synthetic polypeptide
MPAAKRVKLDGGDKKYSIGLDIGTNSVGWAVITDEYKVPSKKFKVLGNTDRHSIKKNLIGALLFDSGETAEATRLKRTARRRYTRRKNRICYLQEIFSNEMAKVDDSFFHRLEESFLVEEDKKHERHPIFGNIVDEVAYHEKYPTIYHLRKKLVDSTDKADLRLIYLALAHMIKFRGHFLIEGDLNPDNSDVDKLFIQLVQTYNQLFEENPINASGVDAKAILSARLSKSRRLENLIAQLPGEKKNGLFGNLIALSLGLTPNFKSNFDLAEDAKLQLSKDTYDDDLDNLLAQIGDQYADLFLAAKNLSDAILLSDILRVNTEITKAPLSASMIKRYDEHHQDLTLLKALVRQQLPEKYKEIFFDQSKNGYAGYIDGGASQEEFYKFIKPILEKMDGTEELLVKLNREDLLRKQRTFDNGSIPHQIHLGELHAILRRQEDFYPFLKDNREKIEKILTFRIPYYVGPLARGNSRFAWMTRKSEETITPWNFEEVVDKGASAQSFIERMTNFDKNLPNEKVLPKHSLLYEYFTVYNELTKVKYVTEGMRKPAFLSGEQKKAIVDLLFKTNRKVTVKQLKEDYFKKIECFDSVEISGVEDRFNASLGTYHDLLKIIKDKDFLDNEENEDILEDIVLTLTLFEDREMIEERLKTYAHLFDDKVMKQLKRRRYTGWGRLSRKLINGIRDKQSGKTILDFLKSDGFANRNFMQLIHDDSLTFKEDIQKAQVSGQGDSLHEHIANLAGSPAIKKGILQTVKVVDELVKVMGRHKPENIVIEMARENQTTQKGQKNSRERMKRIEEGIKELGSQILKEHPVENTQLQNEKLYLYYLQNGRDMYVDQELDINRLSDYDVDHIVPQSFLKDDSIDNKVLTRSDKARGKSDNVPSEEVVKKMKNYWRQLLNAKLITQRKFDNLTKAERGGLSELDKAGFIKRQLVETRQITKHVAQILDSRMNTKYDENDKLIREVKVITLKSKLVSDFRKDFQFYKVREINNYHHAHDAYLNAVVGTALIKKYPKLESEFVYGDYKVYDVRKMIAKSEQEIGKATAKYFFYSNIMNFFKTEITLANGEIRKRPLIETNGETGEIVWDKGRDFATVRKVLSMPQVNIVKKTEVQTGGFSKESILPKRNSDKLIARKKDWDPKKYGGFDSPTVAYSVLVVAKVEKGKSKKLKSVKELLGITIMERSSFEKNPIDFLEAKGYKEVKKDLIIKLPKYSLFELENGRKRMLASAGELQKGNELALPSKYVNFLYLASHYEKLKGSPEDNEQKQLFVEQHKHYLDEIIEQISEFSKRVILADANLDKVLSAYNKHRDKPIREQAENIIHLFTLTNLGAPAAFKYFDTTIDRKRYTSTKEVLDATLIHQSITGLYETRIDLSQLGGDGGEAAAKGSSGGLLGRDLLTKLKAQIQFSTEGPQVTWEDRPAMCLVLNLEEEYRLHEKPVPPSIDPSWLQLFPMVWAEKAGMGLANQVPPVVVELKSDASPVAVRQYPMSKEAREGIRPHIQRFLDLGILVPCQSPWNTPLLPVKKPGTNDYRPVQDLREVNKRVQDIHPTVPNPYNLLSSLPPSHTWYSVLDLKDAFFCLKLHPNSQPLFAFEWRDPEKGNTGQLTWTRLPQGFKNSPTLFNEALHRDLASFRALNPQVVMLQYVDDLLVAAPTYRDCKEGTRRLLQELSKLGYRVSAKKAQLCREEVTYLGYLLKGGKRWLTPARKATVMKIPTPTTPRQVREFLGTAGFCRLWIPGFASLAAPLYPLTRPKVPFTWTEAHQEAFGRIKEALLSAPALALPDLTKPFALYVDEKEGVARGVLTQTLGPWRRPVAYLSKKLDPVASGWPTCLKAIAAVALLLKDADKLTLGQNVLVIAPHNLESIVRQPPDRWMTNARMTHYQSLLLNERVSFAPPAILNPATLLPVESDDTPIHICSEILAEETGTRPDLRDQPLPGVPAWYTDGSSFIMDGRRQAGAAIVDNKRTVWASNLPEGTSAQKAELIALTQALRLAEGKSINIYTDSRYAFATAHVHGAIYKQRGWLTSAGKDIKNKEEILALLEAIHLPKRVAIIHCPGHQRGTDPVATGNRKADEAAKQAAQSTRILTETTKNAGKRTADGSEFEKRTADGSEFESPKKKAKVE

SEQ ID NO: 1631 - protein, 2119 aa, synthetic construct
  source 1..2119: note = Description of Artificial Sequence: Synthetic polypeptide
MPAAKRVKLDGGDKKYSIGLDIGTNSVGWAVITDEYKVPSKKFKVLGNTDRHSIKKNLIGALLFDSGETAEATRLKRTARRRYTRRKNRICYLQEIFSNEMAKVDDSFFHRLEESFLVEEDKKHERHPIFGNIVDEVAYHEKYPTIYHLRKKLVDSTDKADLRLIYLALAHMIKFRGHFLIEGDLNPDNSDVDKLFIQLVQTYNQLFEENPINASGVDAKAILSARLSKSRRLENLIAQLPGEKKNGLFGNLIALSLGLTPNFKSNFDLAEDAKLQLSKDTYDDDLDNLLAQIGDQYADLFLAAKNLSDAILLSDILRVNTEITKAPLSASMIKRYDEHHQDLTLLKALVRQQLPEKYKEIFFDQSKNGYAGYIDGGASQEEFYKFIKPILEKMDGTEELLVKLNREDLLRKQRTFDNGSIPHQIHLGELHAILRRQEDFYPFLKDNREKIEKILTFRIPYYVGPLARGNSRFAWMTRKSEETITPWNFEEVVDKGASAQSFIERMTNFDKNLPNEKVLPKHSLLYEYFTVYNELTKVKYVTEGMRKPAFLSGEQKKAIVDLLFKTNRKVTVKQLKEDYFKKIECFDSVEISGVEDRFNASLGTYHDLLKIIKDKDFLDNEENEDILEDIVLTLTLFEDREMIEERLKTYAHLFDDKVMKQLKRRRYTGWGRLSRKLINGIRDKQSGKTILDFLKSDGFANRNFMQLIHDDSLTFKEDIQKAQVSGQGDSLHEHIANLAGSPAIKKGILQTVKVVDELVKVMGRHKPENIVIEMARENQTTQKGQKNSRERMKRIEEGIKELGSQILKEHPVENTQLQNEKLYLYYLQNGRDMYVDQELDINRLSDYDVDHIVPQSFLKDDSIDNKVLTRSDKARGKSDNVPSEEVVKKMKNYWRQLLNAKLITQRKFDNLTKAERGGLSELDKAGFIKRQLVETRQITKHVAQILDSRMNTKYDENDKLIREVKVITLKSKLVSDFRKDFQFYKVREINNYHHAHDAYLNAVVGTALIKKYPKLESEFVYGDYKVYDVRKMIAKSEQEIGKATAKYFFYSNIMNFFKTEITLANGEIRKRPLIETNGETGEIVWDKGRDFATVRKVLSMPQVNIVKKTEVQTGGFSKESILPKRNSDKLIARKKDWDPKKYGGFDSPTVAYSVLVVAKVEKGKSKKLKSVKELLGITIMERSSFEKNPIDFLEAKGYKEVKKDLIIKLPKYSLFELENGRKRMLASAGELQKGNELALPSKYVNFLYLASHYEKLKGSPEDNEQKQLFVEQHKHYLDEIIEQISEFSKRVILADANLDKVLSAYNKHRDKPIREQAENIIHLFTLTNLGAPAAFKYFDTTIDRKRYTSTKEVLDATLIHQSITGLYETRIDLSQLGGDGGPAPGGLLGRDLLTKLKAQIQFSTEGPQVTWEDRPAMCLVLNLEEEYRLHEKPVPPSIDPSWLQLFPMVWAEKAGMGLANQVPPVVVELKSDASPVAVRQYPMSKEAREGIRPHIQRFLDLGILVPCQSPWNTPLLPVKKPGTNDYRPVQDLREVNKRVQDIHPTVPNPYNLLSSLPPSHTWYSVLDLKDAFFCLKLHPNSQPLFAFEWRDPEKGNTGQLTWTRLPQGFKNSPTLFNEALHRDLASFRALNPQVVMLQYVDDLLVAAPTYRDCKEGTRRLLQELSKLGYRVSAKKAQLCREEVTYLGYLLKGGKRWLTPARKATVMKIPTPTTPRQVREFLGTAGFCRLWIPGFASLAAPLYPLTRPKVPFTWTEAHQEAFGRIKEALLSAPALALPDLTKPFALYVDEKEGVARGVLTQTLGPWRRPVAYLSKKLDPVASGWPTCLKAIAAVALLLKDADKLTLGQNVLVIAPHNLESIVRQPPDRWMTNARMTHYQSLLLNERVSFAPPAILNPATLLPVESDDTPIHICSEILAEETGTRPDLRDQPLPGVPAWYTDGSSFIMDGRRQAGAAIVDNKRTVWASNLPEGTSAQKAELIALTQALRLAEGKSINIYTDSRYAFATAHVHGAIYKQRGWLTSAGKDIKNKEEILALLEAIHLPKRVAIIHCPGHQRGTDPVATGNRKADEAAKQAAQSTRILTETTKNAGKRTADGSEFEKRTADGSEFESPKKKAKVE

SEQ ID NO: 1632 - protein, 2141 aa, synthetic construct
  source 1..2141: note = Description of Artificial Sequence: Synthetic polypeptide
MPAAKRVKLDGGDKKYSIGLDIGTNSVGWAVITDEYKVPSKKFKVLGNTDRHSIKKNLIGALLFDSGETAEATRLKRTARRRYTRRKNRICYLQEIFSNEMAKVDDSFFHRLEESFLVEEDKKHERHPIFGNIVDEVAYHEKYPTIYHLRKKLVDSTDKADLRLIYLALAHMIKFRGHFLIEGDLNPDNSDVDKLFIQLVQTYNQLFEENPINASGVDAKAILSARLSKSRRLENLIAQLPGEKKNGLFGNLIALSLGLTPNFKSNFDLAEDAKLQLSKDTYDDDLDNLLAQIGDQYADLFLAAKNLSDAILLSDILRVNTEITKAPLSASMIKRYDEHHQDLTLLKALVRQQLPEKYKEIFFDQSKNGYAGYIDGGASQEEFYKFIKPILEKMDGTEELLVKLNREDLLRKQRTFDNGSIPHQIHLGELHAILRRQEDFYPFLKDNREKIEKILTFRIPYYVGPLARGNSRFAWMTRKSEETITPWNFEEVVDKGASAQSFIERMTNFDKNLPNEKVLPKHSLLYEYFTVYNELTKVKYVTEGMRKPAFLSGEQKKAIVDLLFKTNRKVTVKQLKEDYFKKIECFDSVEISGVEDRFNASLGTYHDLLKIIKDKDFLDNEENEDILEDIVLTLTLFEDREMIEERLKTYAHLFDDKVMKQLKRRRYTGWGRLSRKLINGIRDKQSGKTILDFLKSDGFANRNFMQLIHDDSLTFKEDIQKAQVSGQGDSLHEHIANLAGSPAIKKGILQTVKVVDELVKVMGRHKPENIVIEMARENQTTQKGQKNSRERMKRIEEGIKELGSQILKEHPVENTQLQNEKLYLYYLQNGRDMYVDQELDINRLSDYDVDHIVPQSFLKDDSIDNKVLTRSDKARGKSDNVPSEEVVKKMKNYWRQLLNAKLITQRKFDNLTKAERGGLSELDKAGFIKRQLVETRQITKHVAQILDSRMNTKYDENDKLIREVKVITLKSKLVSDFRKDFQFYKVREINNYHHAHDAYLNAVVGTALIKKYPKLESEFVYGDYKVYDVRKMIAKSEQEIGKATAKYFFYSNIMNFFKTEITLANGEIRKRPLIETNGETGEIVWDKGRDFATVRKVLSMPQVNIVKKTEVQTGGFSKESILPKRNSDKLIARKKDWDPKKYGGFDSPTVAYSVLVVAKVEKGKSKKLKSVKELLGITIMERSSFEKNPIDFLEAKGYKEVKKDLIIKLPKYSLFELENGRKRMLASAGELQKGNELALPSKYVNFLYLASHYEKLKGSPEDNEQKQLFVEQHKHYLDEIIEQISEFSKRVILADANLDKVLSAYNKHRDKPIREQAENIIHLFTLTNLGAPAAFKYFDTTIDRKRYTSTKEVLDATLIHQSITGLYETRIDLSQLGGDGGEAAAKEAAAKEAAAKEAAAKEAAAKGGLLGRDLLTKLKAQIQFSTEGPQVTWEDRPAMCLVLNLEEEYRLHEKPVPPSIDPSWLQLFPMVWAEKAGMGLANQVPPVVVELKSDASPVAVRQYPMSKEAREGIRPHIQRFLDLGILVPCQSPWNTPLLPVKKPGTNDYRPVQDLREVNKRVQDIHPTVPNPYNLLSSLPPSHTWYSVLDLKDAFFCLKLHPNSQPLFAFEWRDPEKGNTGQLTWTRLPQGFKNSPTLFNEALHRDLASFRALNPQVVMLQYVDDLLVAAPTYRDCKEGTRRLLQELSKLGYRVSAKKAQLCREEVTYLGYLLKGGKRWLTPARKATVMKIPTPTTPRQVREFLGTAGFCRLWIPGFASLAAPLYPLTRPKVPFTWTEAHQEAFGRIKEALLSAPALALPDLTKPFALYVDEKEGVARGVLTQTLGPWRRPVAYLSKKLDPVASGWPTCLKAIAAVALLLKDADKLTLGQNVLVIAPHNLESIVRQPPDRWMTNARMTHYQSLLLNERVSFAPPAILNPATLLPVESDDTPIHICSEILAEETGTRPDLRDQPLPGVPAWYTDGSSFIMDGRRQAGAAIVDNKRTVWASNLPEGTSAQKAELIALTQALRLAEGKSINIYTDSRYAFATAHVHGAIYKQRGWLTSAGKDIKNKEEILALLEAIHLPKRVAIIHCPGHQRGTDPVATGNRKADEAAKQAAQSTRILTETTKNAGKRTADGSEFEKRTADGSEFESPKKKAKVE

SEQ ID NO: 1633 - protein, 2122 aa, synthetic construct
  source 1..2122: note = Description of Artificial Sequence: Synthetic polypeptide
MPAAKRVKLDGGDKKYSIGLDIGTNSVGWAVITDEYKVPSKKFKVLGNTDRHSIKKNLIGALLFDSGETAEATRLKRTARRRYTRRKNRICYLQEIFSNEMAKVDDSFFHRLEESFLVEEDKKHERHPIFGNIVDEVAYHEKYPTIYHLRKKLVDSTDKADLRLIYLALAHMIKFRGHFLIEGDLNPDNSDVDKLFIQLVQTYNQLFEENPINASGVDAKAILSARLSKSRRLENLIAQLPGEKKNGLFGNLIALSLGLTPNFKSNFDLAEDAKLQLSKDTYDDDLDNLLAQIGDQYADLFLAAKNLSDAILLSDILRVNTEITKAPLSASMIKRYDEHHQDLTLLKALVRQQLPEKYKEIFFDQSKNGYAGYIDGGASQEEFYKFIKPILEKMDGTEELLVKLNREDLLRKQRTFDNGSIPHQIHLGELHAILRRQEDFYPFLKDNREKIEKILTFRIPYYVGPLARGNSRFAWMTRKSEETITPWNFEEVVDKGASAQSFIERMTNFDKNLPNEKVLPKHSLLYEYFTVYNELTKVKYVTEGMRKPAFLSGEQKKAIVDLLFKTNRKVTVKQLKEDYFKKIECFDSVEISGVEDRFNASLGTYHDLLKIIKDKDFLDNEENEDILEDIVLTLTLFEDREMIEERLKTYAHLFDDKVMKQLKRRRYTGWGRLSRKLINGIRDKQSGKTILDFLKSDGFANRNFMQLIHDDSLTFKEDIQKAQVSGQGDSLHEHIANLAGSPAIKKGILQTVKVVDELVKVMGRHKPENIVIEMARENQTTQKGQKNSRERMKRIEEGIKELGSQILKEHPVENTQLQNEKLYLYYLQNGRDMYVDQELDINRLSDYDVDHIVPQSFLKDDSIDNKVLTRSDKARGKSDNVPSEEVVKKMKNYWRQLLNAKLITQRKFDNLTKAERGGLSELDKAGFIKRQLVETRQITKHVAQILDSRMNTKYDENDKLIREVKVITLKSKLVSDFRKDFQFYKVREINNYHHAHDAYLNAVVGTALIKKYPKLESEFVYGDYKVYDVRKMIAKSEQEIGKATAKYFFYSNIMNFFKTEITLANGEIRKRPLIETNGETGEIVWDKGRDFATVRKVLSMPQVNIVKKTEVQTGGFSKESILPKRNSDKLIARKKDWDPKKYGGFDSPTVAYSVLVVAKVEKGKSKKLKSVKELLGITIMERSSFEKNPIDFLEAKGYKEVKKDLIIKLPKYSLFELENGRKRMLASAGELQKGNELALPSKYVNFLYLASHYEKLKGSPEDNEQKQLFVEQHKHYLDEIIEQISEFSKRVILADANLDKVLSAYNKHRDKPIREQAENIIHLFTLTNLGAPAAFKYFDTTIDRKRYTSTKEVLDATLIHQSITGLYETRIDLSQLGGDGGGGGPAPGGLLGRDLLTKLKAQIQFSTEGPQVTWEDRPAMCLVLNLEEEYRLHEKPVPPSIDPSWLQLFPMVWAEKAGMGLANQVPPVVVELKSDASPVAVRQYPMSKEAREGIRPHIQRFLDLGILVPCQSPWNTPLLPVKKPGTNDYRPVQDLREVNKRVQDIHPTVPNPYNLLSSLPPSHTWYSVLDLKDAFFCLKLHPNSQPLFAFEWRDPEKGNTGQLTWTRLPQGFKNSPTLFNEALHRDLASFRALNPQVVMLQYVDDLLVAAPTYRDCKEGTRRLLQELSKLGYRVSAKKAQLCREEVTYLGYLLKGGKRWLTPARKATVMKIPTPTTPRQVREFLGTAGFCRLWIPGFASLAAPLYPLTRPKVPFTWTEAHQEAFGRIKEALLSAPALALPDLTKPFALYVDEKEGVARGVLTQTLGPWRRPVAYLSKKLDPVASGWPTCLKAIAAVALLLKDADKLTLGQNVLVIAPHNLESIVRQPPDRWMTNARMTHYQSLLLNERVSFAPPAILNPATLLPVESDDTPIHICSEILAEETGTRPDLRDQPLPGVPAWYTDGSSFIMDGRRQAGAAIVDNKRTVWASNLPEGTSAQKAELIALTQALRLAEGKSINIYTDSRYAFATAHVHGAIYKQRGWLTSAGKDIKNKEEILALLEAIHLPKRVAIIHCPGHQRGTDPVATGNRKADEAAKQAAQSTRILTETTKNAGKRTADGSEFEKRTADGSEFESPKKKAKVE

SEQ ID NO: 1634 - protein, 2127 aa, synthetic construct
  source 1..2127: note = Description of Artificial Sequence: Synthetic polypeptide
MPAAKRVKLDGGDKKYSIGLDIGTNSVGWAVITDEYKVPSKKFKVLGNTDRHSIKKNLIGALLFDSGETAEATRLKRTARRRYTRRKNRICYLQEIFSNEMAKVDDSFFHRLEESFLVEEDKKHERHPIFGNIVDEVAYHEKYPTIYHLRKKLVDSTDKADLRLIYLALAHMIKFRGHFLIEGDLNPDNSDVDKLFIQLVQTYNQLFEENPINASGVDAKAILSARLSKSRRLENLIAQLPGEKKNGLFGNLIALSLGLTPNFKSNFDLAEDAKLQLSKDTYDDDLDNLLAQIGDQYADLFLAAKNLSDAILLSDILRVNTEITKAPLSASMIKRYDEHHQDLTLLKALVRQQLPEKYKEIFFDQSKNGYAGYIDGGASQEEFYKFIKPILEKMDGTEELLVKLNREDLLRKQRTFDNGSIPHQIHLGELHAILRRQEDFYPFLKDNREKIEKILTFRIPYYVGPLARGNSRFAWMTRKSEETITPWNFEEVVDKGASAQSFIERMTNFDKNLPNEKVLPKHSLLYEYFTVYNELTKVKYVTEGMRKPAFLSGEQKKAIVDLLFKTNRKVTVKQLKEDYFKKIECFDSVEISGVEDRFNASLGTYHDLLKIIKDKDFLDNEENEDILEDIVLTLTLFEDREMIEERLKTYAHLFDDKVMKQLKRRRYTGWGRLSRKLINGIRDKQSGKTILDFLKSDGFANRNFMQLIHDDSLTFKEDIQKAQVSGQGDSLHEHIANLAGSPAIKKGILQTVKVVDELVKVMGRHKPENIVIEMARENQTTQKGQKNSRERMKRIEEGIKELGSQILKEHPVENTQLQNEKLYLYYLQNGRDMYVDQELDINRLSDYDVDHIVPQSFLKDDSIDNKVLTRSDKARGKSDNVPSEEVVKKMKNYWRQLLNAKLITQRKFDNLTKAERGGLSELDKAGFIKRQLVETRQITKHVAQILDSRMNTKYDENDKLIREVKVITLKSKLVSDFRKDFQFYKVREINNYHHAHDAYLNAVVGTALIKKYPKLESEFVYGDYKVYDVRKMIAKSEQEIGKATAKYFFYSNIMNFFKTEITLANGEIRKRPLIETNGETGEIVWDKGRDFATVRKVLSMPQVNIVKKTEVQTGGFSKESILPKRNSDKLIARKKDWDPKKYGGFDSPTVAYSVLVVAKVEKGKSKKLKSVKELLGITIMERSSFEKNPIDFLEAKGYKEVKKDLIIKLPKYSLFELENGRKRMLASAGELQKGNELALPSKYVNFLYLASHYEKLKGSPEDNEQKQLFVEQHKHYLDEIIEQISEFSKRVILADANLDKVLSAYNKHRDKPIREQAENIIHLFTLTNLGAPAAFKYFDTTIDRKRYTSTKEVLDATLIHQSITGLYETRIDLSQLGGDGGGSSEAAAKGGGGGLLGRDLLTKLKAQIQFSTEGPQVTWEDRPAMCLVLNLEEEYRLHEKPVPPSIDPSWLQLFPMVWAEKAGMGLANQVPPVVVELKSDASPVAVRQYPMSKEAREGIRPHIQRFLDLGILVPCQSPWNTPLLPVKKPGTNDYRPVQDLREVNKRVQDIHPTVPNPYNLLSSLPPSHTWYSVLDLKDAFFCLKLHPNSQPLFAFEWRDPEKGNTGQLTWTRLPQGFKNSPTLFNEALHRDLASFRALNPQVVMLQYVDDLLVAAPTYRDCKEGTRRLLQELSKLGYRVSAKKAQLCREEVTYLGYLLKGGKRWLTPARKATVMKIPTPTTPRQVREFLGTAGFCRLWIPGFASLAAPLYPLTRPKVPFTWTEAHQEAFGRIKEALLSAPALALPDLTKPFALYVDEKEGVARGVLTQTLGPWRRPVAYLSKKLDPVASGWPTCLKAIAAVALLLKDADKLTLGQNVLVIAPHNLESIVRQPPDRWMTNARMTHYQSLLLNERVSFAPPAILNPATLLPVESDDTPIHICSEILAEETGTRPDLRDQPLPGVPAWYTDGSSFIMDGRRQAGAAIVDNKRTVWASNLPEGTSAQKAELIALTQALRLAEGKSINIYTDSRYAFATAHVHGAIYKQRGWLTSAGKDIKNKEEILALLEAIHLPKRVAIIHCPGHQRGTDPVATGNRKADEAAKQAAQSTRILTETTKNAGKRTADGSEFEKRTADGSEFESPKKKAKVE

SEQ ID NO: 1635 - protein, 2131 aa, synthetic construct
  source 1..2131: note = Description of Artificial Sequence: Synthetic polypeptide
MPAAKRVKLDGGDKKYSIGLDIGTNSVGWAVITDEYKVPSKKFKVLGNTDRHSIKKNLIGALLFDSGETAEATRLKRTARRRYTRRKNRICYLQEIFSNEMAKVDDSFFHRLEESFLVEEDKKHERHPIFGNIVDEVAYHEKYPTIYHLRKKLVDSTDKADLRLIYLALAHMIKFRGHFLIEGDLNPDNSDVDKLFIQLVQTYNQLFEENPINASGVDAKAILSARLSKSRRLENLIAQLPGEKKNGLFGNLIALSLGLTPNFKSNFDLAEDAKLQLSKDTYDDDLDNLLAQIGDQYADLFLAAKNLSDAILLSDILRVNTEITKAPLSASMIKRYDEHHQDLTLLKALVRQQLPEKYKEIFFDQSKNGYAGYIDGGASQEEFYKFIKPILEKMDGTEELLVKLNREDLLRKQRTFDNGSIPHQIHLGELHAILRRQEDFYPFLKDNREKIEKILTFRIPYYVGPLARGNSRFAWMTRKSEETITPWNFEEVVDKGASAQSFIERMTNFDKNLPNEKVLPKHSLLYEYFTVYNELTKVKYVTEGMRKPAFLSGEQKKAIVDLLFKTNRKVTVKQLKEDYFKKIECFDSVEISGVEDRFNASLGTYHDLLKIIKDKDFLDNEENEDILEDIVLTLTLFEDREMIEERLKTYAHLFDDKVMKQLKRRRYTGWGRLSRKLINGIRDKQSGKTILDFLKSDGFANRNFMQLIHDDSLTFKEDIQKAQVSGQGDSLHEHIANLAGSPAIKKGILQTVKVVDELVKVMGRHKPENIVIEMARENQTTQKGQKNSRERMKRIEEGIKELGSQILKEHPVENTQLQNEKLYLYYLQNGRDMYVDQELDINRLSDYDVDHIVPQSFLKDDSIDNKVLTRSDKARGKSDNVPSEEVVKKMKNYWRQLLNAKLITQRKFDNLTKAERGGLSELDKAGFIKRQLVETRQITKHVAQILDSRMNTKYDENDKLIREVKVITLKSKLVSDFRKDFQFYKVREINNYHHAHDAYLNAVVGTALIKKYPKLESEFVYGDYKVYDVRKMIAKSEQEIGKATAKYFFYSNIMNFFKTEITLANGEIRKRPLIETNGETGEIVWDKGRDFATVRKVLSMPQVNIVKKTEVQTGGFSKESILPKRNSDKLIARKKDWDPKKYGGFDSPTVAYSVLVVAKVEKGKSKKLKSVKELLGITIMERSSFEKNPIDFLEAKGYKEVKKDLIIKLPKYSLFELENGRKRMLASAGELQKGNELALPSKYVNFLYLASHYEKLKGSPEDNEQKQLFVEQHKHYLDEIIEQISEFSKRVILADANLDKVLSAYNKHRDKPIREQAENIIHLFTLTNLGAPAAFKYFDTTIDRKRYTSTKEVLDATLIHQSITGLYETRIDLSQLGGDGGGGGGSEAAAKGGGGSGGLLGRDLLTKLKAQIQFSTEGPQVTWEDRPAMCLVLNLEEEYRLHEKPVPPSIDPSWLQLFPMVWAEKAGMGLANQVPPVVVELKSDASPVAVRQYPMSKEAREGIRPHIQRFLDLGILVPCQSPWNTPLLPVKKPGTNDYRPVQDLREVNKRVQDIHPTVPNPYNLLSSLPPSHTWYSVLDLKDAFFCLKLHPNSQPLFAFEWRDPEKGNTGQLTWTRLPQGFKNSPTLFNEALHRDLASFRALNPQVVMLQYVDDLLVAAPTYRDCKEGTRRLLQELSKLGYRVSAKKAQLCREEVTYLGYLLKGGKRWLTPARKATVMKIPTPTTPRQVREFLGTAGFCRLWIPGFASLAAPLYPLTRPKVPFTWTEAHQEAFGRIKEALLSAPALALPDLTKPFALYVDEKEGVARGVLTQTLGPWRRPVAYLSKKLDPVASGWPTCLKAIAAVALLLKDADKLTLGQNVLVIAPHNLESIVRQPPDRWMTNARMTHYQSLLLNERVSFAPPAILNPATLLPVESDDTPIHICSEILAEETGTRPDLRDQPLPGVPAWYTDGSSFIMDGRRQAGAAIVDNKRTVWASNLPEGTSAQKAELIALTQALRLAEGKSINIYTDSRYAFATAHVHGAIYKQRGWLTSAGKDIKNKEEILALLEAIHLPKRVAIIHCPGHQRGTDPVATGNRKADEAAKQAAQSTRILTETTKNAGKRTADGSEFEKRTADGSEFESPKKKAKVE

SEQ ID NO: 1636 - protein, 2122 aa, synthetic construct
  source 1..2122: note = Description of Artificial Sequence: Synthetic polypeptide
MPAAKRVKLDGGDKKYSIGLDIGTNSVGWAVITDEYKVPSKKFKVLGNTDRHSIKKNLIGALLFDSGETAEATRLKRTARRRYTRRKNRICYLQEIFSNEMAKVDDSFFHRLEESFLVEEDKKHERHPIFGNIVDEVAYHEKYPTIYHLRKKLVDSTDKADLRLIYLALAHMIKFRGHFLIEGDLNPDNSDVDKLFIQLVQTYNQLFEENPINASGVDAKAILSARLSKSRRLENLIAQLPGEKKNGLFGNLIALSLGLTPNFKSNFDLAEDAKLQLSKDTYDDDLDNLLAQIGDQYADLFLAAKNLSDAILLSDILRVNTEITKAPLSASMIKRYDEHHQDLTLLKALVRQQLPEKYKEIFFDQSKNGYAGYIDGGASQEEFYKFIKPILEKMDGTEELLVKLNREDLLRKQRTFDNGSIPHQIHLGELHAILRRQEDFYPFLKDNREKIEKILTFRIPYYVGPLARGNSRFAWMTRKSEETITPWNFEEVVDKGASAQSFIERMTNFDKNLPNEKVLPKHSLLYEYFTVYNELTKVKYVTEGMRKPAFLSGEQKKAIVDLLFKTNRKVTVKQLKEDYFKKIECFDSVEISGVEDRFNASLGTYHDLLKIIKDKDFLDNEENEDILEDIVLTLTLFEDREMIEERLKTYAHLFDDKVMKQLKRRRYTGWGRLSRKLINGIRDKQSGKTILDFLKSDGFANRNFMQLIHDDSLTFKEDIQKAQVSGQGDSLHEHIANLAGSPAIKKGILQTVKVVDELVKVMGRHKPENIVIEMARENQTTQKGQKNSRERMKRIEEGIKELGSQILKEHPVENTQLQNEKLYLYYLQNGRDMYVDQELDINRLSDYDVDHIVPQSFLKDDSIDNKVLTRSDKARGKSDNVPSEEVVKKMKNYWRQLLNAKLITQRKFDNLTKAERGGLSELDKAGFIKRQLVETRQITKHVAQILDSRMNTKYDENDKLIREVKVITLKSKLVSDFRKDFQFYKVREINNYHHAHDAYLNAVVGTALIKKYPKLESEFVYGDYKVYDVRKMIAKSEQEIGKATAKYFFYSNIMNFFKTEITLANGEIRKRPLIETNGETGEIVWDKGRDFATVRKVLSMPQVNIVKKTEVQTGGFSKESILPKRNSDKLIARKKDWDPKKYGGFDSPTVAYSVLVVAKVEKGKSKKLKSVKELLGITIMERSSFEKNPIDFLEAKGYKEVKKDLIIKLPKYSLFELENGRKRMLASAGELQKGNELALPSKYVNFLYLASHYEKLKGSPEDNEQKQLFVEQHKHYLDEIIEQISEFSKRVILADANLDKVLSAYNKHRDKPIREQAENIIHLFTLTNLGAPAAFKYFDTTIDRKRYTSTKEVLDATLIHQSITGLYETRIDLSQLGGDGGPAPGGSGGLLGRDLLTKLKAQIQFSTEGPQVTWEDRPAMCLVLNLEEEYRLHEKPVPPSIDPSWLQLFPMVWAEKAGMGLANQVPPVVVELKSDASPVAVRQYPMSKEAREGIRPHIQRFLDLGILVPCQSPWNTPLLPVKKPGTNDYRPVQDLREVNKRVQDIHPTVPNPYNLLSSLPPSHTWYSVLDLKDAFFCLKLHPNSQPLFAFEWRDPEKGNTGQLTWTRLPQGFKNSPTLFNEALHRDLASFRALNPQVVMLQYVDDLLVAAPTYRDCKEGTRRLLQELSKLGYRVSAKKAQLCREEVTYLGYLLKGGKRWLTPARKATVMKIPTPTTPRQVREFLGTAGFCRLWIPGFASLAAPLYPLTRPKVPFTWTEAHQEAFGRIKEALLSAPALALPDLTKPFALYVDEKEGVARGVLTQTLGPWRRPVAYLSKKLDPVASGWPTCLKAIAAVALLLKDADKLTLGQNVLVIAPHNLESIVRQPPDRWMTNARMTHYQSLLLNERVSFAPPAILNPATLLPVESDDTPIHICSEILAEETGTRPDLRDQPLPGVPAWYTDGSSFIMDGRRQAGAAIVDNKRTVWASNLPEGTSAQKAELIALTQALRLAEGKSINIYTDSRYAFATAHVHGAIYKQRGWLTSAGKDIKNKEEILALLEAIHLPKRVAIIHCPGHQRGTDPVATGNRKADEAAKQAAQSTRILTETTKNAGKRTADGSEFEKRTADGSEFESPKKKAKVE

SEQ ID NO: 1637 - protein, 2122 aa, synthetic construct
  source 1..2122: note = Description of Artificial Sequence: Synthetic polypeptide
MPAAKRVKLDGGDKKYSIGLDIGTNSVGWAVITDEYKVPSKKFKVLGNTDRHSIKKNLIGALLFDSGETAEATRLKRTARRRYTRRKNRICYLQEIFSNEMAKVDDSFFHRLEESFLVEEDKKHERHPIFGNIVDEVAYHEKYPTIYHLRKKLVDSTDKADLRLIYLALAHMIKFRGHFLIEGDLNPDNSDVDKLFIQLVQTYNQLFEENPINASGVDAKAILSARLSKSRRLENLIAQLPGEKKNGLFGNLIALSLGLTPNFKSNFDLAEDAKLQLSKDTYDDDLDNLLAQIGDQYADLFLAAKNLSDAILLSDILRVNTEITKAPLSASMIKRYDEHHQDLTLLKALVRQQLPEKYKEIFFDQSKNGYAGYIDGGASQEEFYKFIKPILEKMDGTEELLVKLNREDLLRKQRTFDNGSIPHQIHLGELHAILRRQEDFYPFLKDNREKIEKILTFRIPYYVGPLARGNSRFAWMTRKSEETITPWNFEEVVDKGASAQSFIERMTNFDKNLPNEKVLPKHSLLYEYFTVYNELTKVKYVTEGMRKPAFLSGEQKKAIVDLLFKTNRKVTVKQLKEDYFKKIECFDSVEISGVEDRFNASLGTYHDLLKIIKDKDFLDNEENEDILEDIVLTLTLFEDREMIEERLKTYAHLFDDKVMKQLKRRRYTGWGRLSRKLINGIRDKQSGKTILDFLKSDGFANRNFMQLIHDDSLTFKEDIQKAQVSGQGDSLHEHIANLAGSPAIKKGILQTVKVVDELVKVMGRHKPENIVIEMARENQTTQKGQKNSRERMKRIEEGIKELGSQILKEHPVENTQLQNEKLYLYYLQNGRDMYVDQELDINRLSDYDVDHIVPQSFLKDDSIDNKVLTRSDKARGKSDNVPSEEVVKKMKNYWRQLLNAKLITQRKFDNLTKAERGGLSELDKAGFIKRQLVETRQITKHVAQILDSRMNTKYDENDKLIREVKVITLKSKLVSDFRKDFQFYKVREINNYHHAHDAYLNAVVGTALIKKYPKLESEFVYGDYKVYDVRKMIAKSEQEIGKATAKYFFYSNIMNFFKTEITLANGEIRKRPLIETNGETGEIVWDKGRDFATVRKVLSMPQVNIVKKTEVQTGGFSKESILPKRNSDKLIARKKDWDPKKYGGFDSPTVAYSVLVVAKVEKGKSKKLKSVKELLGITIMERSSFEKNPIDFLEAKGYKEVKKDLIIKLPKYSLFELENGRKRMLASAGELQKGNELALPSKYVNFLYLASHYEKLKGSPEDNEQKQLFVEQHKHYLDEIIEQISEFSKRVILADANLDKVLSAYNKHRDKPIREQAENIIHLFTLTNLGAPAAFKYFDTTIDRKRYTSTKEVLDATLIHQSITGLYETRIDLSQLGGDGGGGSGSSGGLLGRDLLTKLKAQIQFSTEGPQVTWEDRPAMCLVLNLEEEYRLHEKPVPPSIDPSWLQLFPMVWAEKAGMGLANQVPPVVVELKSDASPVAVRQYPMSKEAREGIRPHIQRFLDLGILVPCQSPWNTPLLPVKKPGTNDYRPVQDLREVNKRVQDIHPTVPNPYNLLSSLPPSHTWYSVLDLKDAFFCLKLHPNSQPLFAFEWRDPEKGNTGQLTWTRLPQGFKNSPTLFNEALHRDLASFRALNPQVVMLQYVDDLLVAAPTYRDCKEGTRRLLQELSKLGYRVSAKKAQLCREEVTYLGYLLKGGKRWLTPARKATVMKIPTPTTPRQVREFLGTAGFCRLWIPGFASLAAPLYPLTRPKVPFTWTEAHQEAFGRIKEALLSAPALALPDLTKPFALYVDEKEGVARGVLTQTLGPWRRPVAYLSKKLDPVASGWPTCLKAIAAVALLLKDADKLTLGQNVLVIAPHNLESIVRQPPDRWMTNARMTHYQSLLLNERVSFAPPAILNPATLLPVESDDTPIHICSEILAEETGTRPDLRDQPLPGVPAWYTDGSSFIMDGRRQAGAAIVDNKRTVWASNLPEGTSAQKAELIALTQALRLAEGKSINIYTDSRYAFATAHVHGAIYKQRGWLTSAGKDIKNKEEILALLEAIHLPKRVAIIHCPGHQRGTDPVATGNRKADEAAKQAAQSTRILTETTKNAGKRTADGSEFEKRTADGSEFESPKKKAKVE

SEQ ID NO: 1638 - protein, 2131 aa, synthetic construct
  source 1..2131: note = Description of Artificial Sequence: Synthetic polypeptide
MPAAKRVKLDGGDKKYSIGLDIGTNSVGWAVITDEYKVPSKKFKVLGNTDRHSIKKNLIGALLFDSGETAEATRLKRTARRRYTRRKNRICYLQEIFSNEMAKVDDSFFHRLEESFLVEEDKKHERHPIFGNIVDEVAYHEKYPTIYHLRKKLVDSTDKADLRLIYLALAHMIKFRGHFLIEGDLNPDNSDVDKLFIQLVQTYNQLFEENPINASGVDAKAILSARLSKSRRLENLIAQLPGEKKNGLFGNLIALSLGLTPNFKSNFDLAEDAKLQLSKDTYDDDLDNLLAQIGDQYADLFLAAKNLSDAILLSDILRVNTEITKAPLSASMIKRYDEHHQDLTLLKALVRQQLPEKYKEIFFDQSKNGYAGYIDGGASQEEFYKFIKPILEKMDGTEELLVKLNREDLLRKQRTFDNGSIPHQIHLGELHAILRRQEDFYPFLKDNREKIEKILTFRIPYYVGPLARGNSRFAWMTRKSEETITPWNFEEVVDKGASAQSFIERMTNFDKNLPNEKVLPKHSLLYEYFTVYNELTKVKYVTEGMRKPAFLSGEQKKAIVDLLFKTNRKVTVKQLKEDYFKKIECFDSVEISGVEDRFNASLGTYHDLLKIIKDKDFLDNEENEDILEDIVLTLTLFEDREMIEERLKTYAHLFDDKVMKQLKRRRYTGWGRLSRKLINGIRDKQSGKTILDFLKSDGFANRNFMQLIHDDSLTFKEDIQKAQVSGQGDSLHEHIANLAGSPAIKKGILQTVKVVDELVKVMGRHKPENIVIEMARENQTTQKGQKNSRERMKRIEEGIKELGSQILKEHPVENTQLQNEKLYLYYLQNGRDMYVDQELDINRLSDYDVDHIVPQSFLKDDSIDNKVLTRSDKARGKSDNVPSEEVVKKMKNYWRQLLNAKLITQRKFDNLTKAERGGLSELDKAGFIKRQLVETRQITKHVAQILDSRMNTKYDENDKLIREVKVITLKSKLVSDFRKDFQFYKVREINNYHHAHDAYLNAVVGTALIKKYPKLESEFVYGDYKVYDVRKMIAKSEQEIGKATAKYFFYSNIMNFFKTEITLANGEIRKRPLIETNGETGEIVWDKGRDFATVRKVLSMPQVNIVKKTEVQTGGFSKESILPKRNSDKLIARKKDWDPKKYGGFDSPTVAYSVLVVAKVEKGKSKKLKSVKELLGITIMERSSFEKNPIDFLEAKGYKEVKKDLIIKLPKYSLFELENGRKRMLASAGELQKGNELALPSKYVNFLYLASHYEKLKGSPEDNEQKQLFVEQHKHYLDEIIEQISEFSKRVILADANLDKVLSAYNKHRDKPIREQAENIIHLFTLTNLGAPAAFKYFDTTIDRKRYTSTKEVLDATLIHQSITGLYETRIDLSQLGGDGGEAAAKGGGGSEAAAKGGLLGRDLLTKLKAQIQFSTEGPQVTWEDRPAMCLVLNLEEEYRLHEKPVPPSIDPSWLQLFPMVWAEKAGMGLANQVPPVVVELKSDASPVAVRQYPMSKEAREGIRPHIQRFLDLGILVPCQSPWNTPLLPVKKPGTNDYRPVQDLREVNKRVQDIHPTVPNPYNLLSSLPPSHTWYSVLDLKDAFFCLKLHPNSQPLFAFEWRDPEKGNTGQLTWTRLPQGFKNSPTLFNEALHRDLASFRALNPQVVMLQYVDDLLVAAPTYRDCKEGTRRLLQELSKLGYRVSAKKAQLCREEVTYLGYLLKGGKRWLTPARKATVMKIPTPTTPRQVREFLGTAGFCRLWIPGFASLAAPLYPLTRPKVPFTWTEAHQEAFGRIKEALLSAPALALPDLTKPFALYVDEKEGVARGVLTQTLGPWRRPVAYLSKKLDPVASGWPTCLKAIAAVALLLKDADKLTLGQNVLVIAPHNLESIVRQPPDRWMTNARMTHYQSLLLNERVSFAPPAILNPATLLPVESDDTPIHICSEILAEETGTRPDLRDQPLPGVPAWYTDGSSFIMDGRRQAGAAIVDNKRTVWASNLPEGTSAQKAELIALTQALRLAEGKSINIYTDSRYAFATAHVHGAIYKQRGWLTSAGKDIKNKEEILALLEAIHLPKRVAIIHCPGHQRGTDPVATGNRKADEAAKQAAQSTRILTETTKNAGKRTADGSEFEKRTADGSEFESPKKKAKVE

SEQ ID NO: 1639 - protein, 2127 aa, synthetic construct
  source 1..2127: note = Description of Artificial Sequence: Synthetic polypeptide
MPAAKRVKLDGGDKKYSIGLDIGTNSVGWAVITDEYKVPSKKFKVLGNTDRHSIKKNLIGALLFDSGETAEATRLKRTARRRYTRRKNRICYLQEIFSNEMAKVDDSFFHRLEESFLVEEDKKHERHPIFGNIVDEVAYHEKYPTIYHLRKKLVDSTDKADLRLIYLALAHMIKFRGHFLIEGDLNPDNSDVDKLFIQLVQTYNQLFEENPINASGVDAKAILSARLSKSRRLENLIAQLPGEKKNGLFGNLIALSLGLTPNFKSNFDLAEDAKLQLSKDTYDDDLDNLLAQIGDQYADLFLAAKNLSDAILLSDILRVNTEITKAPLSASMIKRYDEHHQDLTLLKALVRQQLPEKYKEIFFDQSKNGYAGYIDGGASQEEFYKFIKPILEKMDGTEELLVKLNREDLLRKQRTFDNGSIPHQIHLGELHAILRRQEDFYPFLKDNREKIEKILTFRIPYYVGPLARGNSRFAWMTRKSEETITPWNFEEVVDKGASAQSFIERMTNFDKNLPNEKVLPKHSLLYEYFTVYNELTKVKYVTEGMRKPAFLSGEQKKAIVDLLFKTNRKVTVKQLKEDYFKKIECFDSVEISGVEDRFNASLGTYHDLLKIIKDKDFLDNEENEDILEDIVLTLTLFEDREMIEERLKTYAHLFDDKVMKQLKRRRYTGWGRLSRKLINGIRDKQSGKTILDFLKSDGFANRNFMQLIHDDSLTFKEDIQKAQVSGQGDSLHEHIANLAGSPAIKKGILQTVKVVDELVKVMGRHKPENIVIEMARENQTTQKGQKNSRERMKRIEEGIKELGSQILKEHPVENTQLQNEKLYLYYLQNGRDMYVDQELDINRLSDYDVDHIVPQSFLKDDSIDNKVLTRSDKARGKSDNVPSEEVVKKMKNYWRQLLNAKLITQRKFDNLTKAERGGLSELDKAGFIKRQLVETRQITKHVAQILDSRMNTKYDENDKLIREVKVITLKSKLVSDFRKDFQFYKVREINNYHHAHDAYLNAVVGTALIKKYPKLESEFVYGDYKVYDVRKMIAKSEQEIGKATAKYFFYSNIMNFFKTEITLANGEIRKRPLIETNGETGEIVWDKGRDFATVRKVLSMPQVNIVKKTEVQTGGFSKESILPKRNSDKLIARKKDWDPKKYGGFDSPTVAYSVLVVAKVEKGKSKKLKSVKELLGITIMERSSFEKNPIDFLEAKGYKEVKKDLIIKLPKYSLFELENGRKRMLASAGELQKGNELALPSKYVNFLYLASHYEKLKGSPEDNEQKQLFVEQHKHYLDEIIEQISEFSKRVILADANLDKVLSAYNKHRDKPIREQAENIIHLFTLTNLGAPAAFKYFDTTIDRKRYTSTKEVLDATLIHQSITGLYETRIDLSQLGGDGGGGGGSSEAAAKGGLLGRDLLTKLKAQIQFSTEGPQVTWEDRPAMCLVLNLEEEYRLHEKPVPPSIDPSWLQLFPMVWAEKAGMGLANQVPPVVVELKSDASPVAVRQYPMSKEAREGIRPHIQRFLDLGILVPCQSPWNTPLLPVKKPGTNDYRPVQDLREVNKRVQDIHPTVPNPYNLLSSLPPSHTWYSVLDLKDAFFCLKLHPNSQPLFAFEWRDPEKGNTGQLTWTRLPQGFKNSPTLFNEALHRDLASFRALNPQVVMLQYVDDLLVAAPTYRDCKEGTRRLLQELSKLGYRVSAKKAQLCREEVTYLGYLLKGGKRWLTPARKATVMKIPTPTTPRQVREFLGTAGFCRLWIPGFASLAAPLYPLTRPKVPFTWTEAHQEAFGRIKEALLSAPALALPDLTKPFALYVDEKEGVARGVLTQTLGPWRRPVAYLSKKLDPVASGWPTCLKAIAAVALLLKDADKLTLGQNVLVIAPHNLESIVRQPPDRWMTNARMTHYQSLLLNERVSFAPPAILNPATLLPVESDDTPIHICSEILAEETGTRPDLRDQPLPGVPAWYTDGSSFIMDGRRQAGAAIVDNKRTVWASNLPEGTSAQKAELIALTQALRLAEGKSINIYTDSRYAFATAHVHGAIYKQRGWLTSAGKDIKNKEEILALLEAIHLPKRVAIIHCPGHQRGTDPVATGNRKADEAAKQAAQSTRILTETTKNAGKRTADGSEFEKRTADGSEFESPKKKAKVE

SEQ ID NO: 1640 - protein, 2127 aa, synthetic construct
  source 1..2127: note = Description of Artificial Sequence: Synthetic polypeptide
MPAAKRVKLDGGDKKYSIGLDIGTNSVGWAVITDEYKVPSKKFKVLGNTDRHSIKKNLIGALLFDSGETAEATRLKRTARRRYTRRKNRICYLQEIFSNEMAKVDDSFFHRLEESFLVEEDKKHERHPIFGNIVDEVAYHEKYPTIYHLRKKLVDSTDKADLRLIYLALAHMIKFRGHFLIEGDLNPDNSDVDKLFIQLVQTYNQLFEENPINASGVDAKAILSARLSKSRRLENLIAQLPGEKKNGLFGNLIALSLGLTPNFKSNFDLAEDAKLQLSKDTYDDDLDNLLAQIGDQYADLFLAAKNLSDAILLSDILRVNTEITKAPLSASMIKRYDEHHQDLTLLKALVRQQLPEKYKEIFFDQSKNGYAGYIDGGASQEEFYKFIKPILEKMDGTEELLVKLNREDLLRKQRTFDNGSIPHQIHLGELHAILRRQEDFYPFLKDNREKIEKILTFRIPYYVGPLARGNSRFAWMTRKSEETITPWNFEEVVDKGASAQSFIERMTNFDKNLPNEKVLPKHSLLYEYFTVYNELTKVKYVTEGMRKPAFLSGEQKKAIVDLLFKTNRKVTVKQLKEDYFKKIECFDSVEISGVEDRFNASLGTYHDLLKIIKDKDFLDNEENEDILEDIVLTLTLFEDREMIEERLKTYAHLFDDKVMKQLKRRRYTGWGRLSRKLINGIRDKQSGKTILDFLKSDGFANRNFMQLIHDDSLTFKEDIQKAQVSGQGDSLHEHIANLAGSPAIKKGILQTVKVVDELVKVMGRHKPENIVIEMARENQTTQKGQKNSRERMKRIEEGIKELGSQILKEHPVENTQLQNEKLYLYYLQNGRDMYVDQELDINRLSDYDVDHIVPQSFLKDDSIDNKVLTRSDKARGKSDNVPSEEVVKKMKNYWRQLLNAKLITQRKFDNLTKAERGGLSELDKAGFIKRQLVETRQITKHVAQILDSRMNTKYDENDKLIREVKVITLKSKLVSDFRKDFQFYKVREINNYHHAHDAYLNAVVGTALIKKYPKLESEFVYGDYKVYDVRKMIAKSEQEIGKATAKYFFYSNIMNFFKTEITLANGEIRKRPLIETNGETGEIVWDKGRDFATVRKVLSMPQVNIVKKTEVQTGGFSKESILPKRNSDKLIARKKDWDPKKYGGFDSPTVAYSVLVVAKVEKGKSKKLKSVKELLGITIMERSSFEKNPIDFLEAKGYKEVKKDLIIKLPKYSLFELENGRKRMLASAGELQKGNELALPSKYVNFLYLASHYEKLKGSPEDNEQKQLFVEQHKHYLDEIIEQISEFSKRVILADANLDKVLSAYNKHRDKPIREQAENIIHLFTLTNLGAPAAFKYFDTTIDRKRYTSTKEVLDATLIHQSITGLYETRIDLSQLGGDGGPAPGGSEAAAKGGLLGRDLLTKLKAQIQFSTEGPQVTWEDRPAMCLVLNLEEEYRLHEKPVPPSIDPSWLQLFPMVWAEKAGMGLANQVPPVVVELKSDASPVAVRQYPMSKEAREGIRPHIQRFLDLGILVPCQSPWNTPLLPVKKPGTNDYRPVQDLREVNKRVQDIHPTVPNPYNLLSSLPPSHTWYSVLDLKDAFFCLKLHPNSQPLFAFEWRDPEKGNTGQLTWTRLPQGFKNSPTLFNEALHRDLASFRALNPQVVMLQYVDDLLVAAPTYRDCKEGTRRLLQELSKLGYRVSAKKAQLCREEVTYLGYLLKGGKRWLTPARKATVMKIPTPTTPRQVREFLGTAGFCRLWIPGFASLAAPLYPLTRPKVPFTWTEAHQEAFGRIKEALLSAPALALPDLTKPFALYVDEKEGVARGVLTQTLGPWRRPVAYLSKKLDPVASGWPTCLKAIAAVALLLKDADKLTLGQNVLVIAPHNLESIVRQPPDRWMTNARMTHYQSLLLNERVSFAPPAILNPATLLPVESDDTPIHICSEILAEETGTRPDLRDQPLPGVPAWYTDGSSFIMDGRRQAGAAIVDNKRTVWASNLPEGTSAQKAELIALTQALRLAEGKSINIYTDSRYAFATAHVHGAIYKQRGWLTSAGKDIKNKEEILALLEAIHLPKRVAIIHCPGHQRGTDPVATGNRKADEAAKQAAQSTRILTETTKNAGKRTADGSEFEKRTADGSEFESPKKKAKVE

SEQ ID NO: 1641 - protein, 2127 aa, synthetic construct
  source 1..2127: note = Description of Artificial Sequence: Synthetic polypeptide
MPAAKRVKLDGGDKKYSIGLDIGTNSVGWAVITDEYKVPSKKFKVLGNTDRHSIKKNLIGALLFDSGETAEATRLKRTARRRYTRRKNRICYLQEIFSNEMAKVDDSFFHRLEESFLVEEDKKHERHPIFGNIVDEVAYHEKYPTIYHLRKKLVDSTDKADLRLIYLALAHMIKFRGHFLIEGDLNPDNSDVDKLFIQLVQTYNQLFEENPINASGVDAKAILSARLSKSRRLENLIAQLPGEKKNGLFGNLIALSLGLTPNFKSNFDLAEDAKLQLSKDTYDDDLDNLLAQIGDQYADLFLAAKNLSDAILLSDILRVNTEITKAPLSASMIKRYDEHHQDLTLLKALVRQQLPEKYKEIFFDQSKNGYAGYIDGGASQEEFYKFIKPILEKMDGTEELLVKLNREDLLRKQRTFDNGSIPHQIHLGELHAILRRQEDFYPFLKDNREKIEKILTFRIPYYVGPLARGNSRFAWMTRKSEETITPWNFEEVVDKGASAQSFIERMTNFDKNLPNEKVLPKHSLLYEYFTVYNELTKVKYVTEGMRKPAFLSGEQKKAIVDLLFKTNRKVTVKQLKEDYFKKIECFDSVEISGVEDRFNASLGTYHDLLKIIKDKDFLDNEENEDILEDIVLTLTLFEDREMIEERLKTYAHLFDDKVMKQLKRRRYTGWGRLSRKLINGIRDKQSGKTILDFLKSDGFANRNFMQLIHDDSLTFKEDIQKAQVSGQGDSLHEHIANLAGSPAIKKGILQTVKVVDELVKVMGRHKPENIVIEMARENQTTQKGQKNSRERMKRIEEGIKELGSQILKEHPVENTQLQNEKLYLYYLQNGRDMYVDQELDINRLSDYDVDHIVPQSFLKDDSIDNKVLTRSDKARGKSDNVPSEEVVKKMKNYWRQLLNAKLITQRKFDNLTKAERGGLSELDKAGFIKRQLVETRQITKHVAQILDSRMNTKYDENDKLIREVKVITLKSKLVSDFRKDFQFYKVREINNYHHAHDAYLNAVVGTALIKKYPKLESEFVYGDYKVYDVRKMIAKSEQEIGKATAKYFFYSNIMNFFKTEITLANGEIRKRPLIETNGETGEIVWDKGRDFATVRKVLSMPQVNIVKKTEVQTGGFSKESILPKRNSDKLIARKKDWDPKKYGGFDSPTVAYSVLVVAKVEKGKSKKLKSVKELLGITIMERSSFEKNPIDFLEAKGYKEVKKDLIIKLPKYSLFELENGRKRMLASAGELQKGNELALPSKYVNFLYLASHYEKLKGSPEDNEQKQLFVEQHKHYLDEIIEQISEFSKRVILADANLDKVLSAYNKHRDKPIREQAENIIHLFTLTNLGAPAAFKYFDTTIDRKRYTSTKEVLDATLIHQSITGLYETRIDLSQLGGDGGPAPEAAAKGGSGGLLGRDLLTKLKAQIQFSTEGPQVTWEDRPAMCLVLNLEEEYRLHEKPVPPSIDPSWLQLFPMVWAEKAGMGLANQVPPVVVELKSDASPVAVRQYPMSKEAREGIRPHIQRFLDLGILVPCQSPWNTPLLPVKKPGTNDYRPVQDLREVNKRVQDIHPTVPNPYNLLSSLPPSHTWYSVLDLKDAFFCLKLHPNSQPLFAFEWRDPEKGNTGQLTWTRLPQGFKNSPTLFNEALHRDLASFRALNPQVVMLQYVDDLLVAAPTYRDCKEGTRRLLQELSKLGYRVSAKKAQLCREEVTYLGYLLKGGKRWLTPARKATVMKIPTPTTPRQVREFLGTAGFCRLWIPGFASLAAPLYPLTRPKVPFTWTEAHQEAFGRIKEALLSAPALALPDLTKPFALYVDEKEGVARGVLTQTLGPWRRPVAYLSKKLDPVASGWPTCLKAIAAVALLLKDADKLTLGQNVLVIAPHNLESIVRQPPDRWMTNARMTHYQSLLLNERVSFAPPAILNPATLLPVESDDTPIHICSEILAEETGTRPDLRDQPLPGVPAWYTDGSSFIMDGRRQAGAAIVDNKRTVWASNLPEGTSAQKAELIALTQALRLAEGKSINIYTDSRYAFATAHVHGAIYKQRGWLTSAGKDIKNKEEILALLEAIHLPKRVAIIHCPGHQRGTDPVATGNRKADEAAKQAAQSTRILTETTKNAGKRTADGSEFEKRTADGSEFESPKKKAKVE

SEQ ID NO: 1642 - protein, 2122 aa, synthetic construct
  source 1..2122: note = Description of Artificial Sequence: Synthetic polypeptide
MPAAKRVKLDGGDKKYSIGLDIGTNSVGWAVITDEYKVPSKKFKVLGNTDRHSIKKNLIGALLFDSGETAEATRLKRTARRRYTRRKNRICYLQEIFSNEMAKVDDSFFHRLEESFLVEEDKKHERHPIFGNIVDEVAYHEKYPTIYHLRKKLVDSTDKADLRLIYLALAHMIKFRGHFLIEGDLNPDNSDVDKLFIQLVQTYNQLFEENPINASGVDAKAILSARLSKSRRLENLIAQLPGEKKNGLFGNLIALSLGLTPNFKSNFDLAEDAKLQLSKDTYDDDLDNLLAQIGDQYADLFLAAKNLSDAILLSDILRVNTEITKAPLSASMIKRYDEHHQDLTLLKALVRQQLPEKYKEIFFDQSKNGYAGYIDGGASQEEFYKFIKPILEKMDGTEELLVKLNREDLLRKQRTFDNGSIPHQIHLGELHAILRRQEDFYPFLKDNREKIEKILTFRIPYYVGPLARGNSRFAWMTRKSEETITPWNFEEVVDKGASAQSFIERMTNFDKNLPNEKVLPKHSLLYEYFTVYNELTKVKYVTEGMRKPAFLSGEQKKAIVDLLFKTNRKVTVKQLKEDYFKKIECFDSVEISGVEDRFNASLGTYHDLLKIIKDKDFLDNEENEDILEDIVLTLTLFEDREMIEERLKTYAHLFDDKVMKQLKRRRYTGWGRLSRKLINGIRDKQSGKTILDFLKSDGFANRNFMQLIHDDSLTFKEDIQKAQVSGQGDSLHEHIANLAGSPAIKKGILQTVKVVDELVKVMGRHKPENIVIEMARENQTTQKGQKNSRERMKRIEEGIKELGSQILKEHPVENTQLQNEKLYLYYLQNGRDMYVDQELDINRLSDYDVDHIVPQSFLKDDSIDNKVLTRSDKARGKSDNVPSEEVVKKMKNYWRQLLNAKLITQRKFDNLTKAERGGLSELDKAGFIKRQLVETRQITKHVAQILDSRMNTKYDENDKLIREVKVITLKSKLVSDFRKDFQFYKVREINNYHHAHDAYLNAVVGTALIKKYPKLESEFVYGDYKVYDVRKMIAKSEQEIGKATAKYFFYSNIMNFFKTEITLANGEIRKRPLIETNGETGEIVWDKGRDFATVRKVLSMPQVNIVKKTEVQTGGFSKESILPKRNSDKLIARKKDWDPKKYGGFDSPTVAYSVLVVAKVEKGKSKKLKSVKELLGITIMERSSFEKNPIDFLEAKGYKEVKKDLIIKLPKYSLFELENGRKRMLASAGELQKGNELALPSKYVNFLYLASHYEKLKGSPEDNEQKQLFVEQHKHYLDEIIEQISEFSKRVILADANLDKVLSAYNKHRDKPIREQAENIIHLFTLTNLGAPAAFKYFDTTIDRKRYTSTKEVLDATLIHQSITGLYETRIDLSQLGGDGGGGGGGSGGLLGRDLLTKLKAQIQFSTEGPQVTWEDRPAMCLVLNLEEEYRLHEKPVPPSIDPSWLQLFPMVWAEKAGMGLANQVPPVVVELKSDASPVAVRQYPMSKEAREGIRPHIQRFLDLGILVPCQSPWNTPLLPVKKPGTNDYRPVQDLREVNKRVQDIHPTVPNPYNLLSSLPPSHTWYSVLDLKDAFFCLKLHPNSQPLFAFEWRDPEKGNTGQLTWTRLPQGFKNSPTLFNEALHRDLASFRALNPQVVMLQYVDDLLVAAPTYRDCKEGTRRLLQELSKLGYRVSAKKAQLCREEVTYLGYLLKGGKRWLTPARKATVMKIPTPTTPRQVREFLGTAGFCRLWIPGFASLAAPLYPLTRPKVPFTWTEAHQEAFGRIKEALLSAPALALPDLTKPFALYVDEKEGVARGVLTQTLGPWRRPVAYLSKKLDPVASGWPTCLKAIAAVALLLKDADKLTLGQNVLVIAPHNLESIVRQPPDRWMTNARMTHYQSLLLNERVSFAPPAILNPATLLPVESDDTPIHICSEILAEETGTRPDLRDQPLPGVPAWYTDGSSFIMDGRRQAGAAIVDNKRTVWASNLPEGTSAQKAELIALTQALRLAEGKSINIYTDSRYAFATAHVHGAIYKQRGWLTSAGKDIKNKEEILALLEAIHLPKRVAIIHCPGHQRGTDPVATGNRKADEAAKQAAQSTRILTETTKNAGKRTADGSEFEKRTADGSEFESPKKKAKVE

SEQ ID NO: 1643 - protein, 2121 aa, synthetic construct
  source 1..2121: note = Description of Artificial Sequence: Synthetic polypeptide
MPAAKRVKLDGGDKKYSIGLDIGTNSVGWAVITDEYKVPSKKFKVLGNTDRHSIKKNLIGALLFDSGETAEATRLKRTARRRYTRRKNRICYLQEIFSNEMAKVDDSFFHRLEESFLVEEDKKHERHPIFGNIVDEVAYHEKYPTIYHLRKKLVDSTDKADLRLIYLALAHMIKFRGHFLIEGDLNPDNSDVDKLFIQLVQTYNQLFEENPINASGVDAKAILSARLSKSRRLENLIAQLPGEKKNGLFGNLIALSLGLTPNFKSNFDLAEDAKLQLSKDTYDDDLDNLLAQIGDQYADLFLAAKNLSDAILLSDILRVNTEITKAPLSASMIKRYDEHHQDLTLLKALVRQQLPEKYKEIFFDQSKNGYAGYIDGGASQEEFYKFIKPILEKMDGTEELLVKLNREDLLRKQRTFDNGSIPHQIHLGELHAILRRQEDFYPFLKDNREKIEKILTFRIPYYVGPLARGNSRFAWMTRKSEETITPWNFEEVVDKGASAQSFIERMTNFDKNLPNEKVLPKHSLLYEYFTVYNELTKVKYVTEGMRKPAFLSGEQKKAIVDLLFKTNRKVTVKQLKEDYFKKIECFDSVEISGVEDRFNASLGTYHDLLKIIKDKDFLDNEENEDILEDIVLTLTLFEDREMIEERLKTYAHLFDDKVMKQLKRRRYTGWGRLSRKLINGIRDKQSGKTILDFLKSDGFANRNFMQLIHDDSLTFKEDIQKAQVSGQGDSLHEHIANLAGSPAIKKGILQTVKVVDELVKVMGRHKPENIVIEMARENQTTQKGQKNSRERMKRIEEGIKELGSQILKEHPVENTQLQNEKLYLYYLQNGRDMYVDQELDINRLSDYDVDHIVPQSFLKDDSIDNKVLTRSDKARGKSDNVPSEEVVKKMKNYWRQLLNAKLITQRKFDNLTKAERGGLSELDKAGFIKRQLVETRQITKHVAQILDSRMNTKYDENDKLIREVKVITLKSKLVSDFRKDFQFYKVREINNYHHAHDAYLNAVVGTALIKKYPKLESEFVYGDYKVYDVRKMIAKSEQEIGKATAKYFFYSNIMNFFKTEITLANGEIRKRPLIETNGETGEIVWDKGRDFATVRKVLSMPQVNIVKKTEVQTGGFSKESILPKRNSDKLIARKKDWDPKKYGGFDSPTVAYSVLVVAKVEKGKSKKLKSVKELLGITIMERSSFEKNPIDFLEAKGYKEVKKDLIIKLPKYSLFELENGRKRMLASAGELQKGNELALPSKYVNFLYLASHYEKLKGSPEDNEQKQLFVEQHKHYLDEIIEQISEFSKRVILADANLDKVLSAYNKHRDKPIREQAENIIHLFTLTNLGAPAAFKYFDTTIDRKRYTSTKEVLDATLIHQSITGLYETRIDLSQLGGDGGGGGGGGGLLGRDLLTKLKAQIQFSTEGPQVTWEDRPAMCLVLNLEEEYRLHEKPVPPSIDPSWLQLFPMVWAEKAGMGLANQVPPVVVELKSDASPVAVRQYPMSKEAREGIRPHIQRFLDLGILVPCQSPWNTPLLPVKKPGTNDYRPVQDLREVNKRVQDIHPTVPNPYNLLSSLPPSHTWYSVLDLKDAFFCLKLHPNSQPLFAFEWRDPEKGNTGQLTWTRLPQGFKNSPTLFNEALHRDLASFRALNPQVVMLQYVDDLLVAAPTYRDCKEGTRRLLQELSKLGYRVSAKKAQLCREEVTYLGYLLKGGKRWLTPARKATVMKIPTPTTPRQVREFLGTAGFCRLWIPGFASLAAPLYPLTRPKVPFTWTEAHQEAFGRIKEALLSAPALALPDLTKPFALYVDEKEGVARGVLTQTLGPWRRPVAYLSKKLDPVASGWPTCLKAIAAVALLLKDADKLTLGQNVLVIAPHNLESIVRQPPDRWMTNARMTHYQSLLLNERVSFAPPAILNPATLLPVESDDTPIHICSEILAEETGTRPDLRDQPLPGVPAWYTDGSSFIMDGRRQAGAAIVDNKRTVWASNLPEGTSAQKAELIALTQALRLAEGKSINIYTDSRYAFATAHVHGAIYKQRGWLTSAGKDIKNKEEILALLEAIHLPKRVAIIHCPGHQRGTDPVATGNRKADEAAKQAAQSTRILTETTKNAGKRTADGSEFEKRTADGSEFESPKKKAKVE

SEQ ID NO: 1644 - protein, 2127 aa, synthetic construct
  source 1..2127: note = Description of Artificial Sequence: Synthetic polypeptide
MPAAKRVKLDGGDKKYSIGLDIGTNSVGWAVITDEYKVPSKKFKVLGNTDRHSIKKNLIGALLFDSGETAEATRLKRTARRRYTRRKNRICYLQEIFSNEMAKVDDSFFHRLEESFLVEEDKKHERHPIFGNIVDEVAYHEKYPTIYHLRKKLVDSTDKADLRLIYLALAHMIKFRGHFLIEGDLNPDNSDVDKLFIQLVQTYNQLFEENPINASGVDAKAILSARLSKSRRLENLIAQLPGEKKNGLFGNLIALSLGLTPNFKSNFDLAEDAKLQLSKDTYDDDLDNLLAQIGDQYADLFLAAKNLSDAILLSDILRVNTEITKAPLSASMIKRYDEHHQDLTLLKALVRQQLPEKYKEIFFDQSKNGYAGYIDGGASQEEFYKFIKPILEKMDGTEELLVKLNREDLLRKQRTFDNGSIPHQIHLGELHAILRRQEDFYPFLKDNREKIEKILTFRIPYYVGPLARGNSRFAWMTRKSEETITPWNFEEVVDKGASAQSFIERMTNFDKNLPNEKVLPKHSLLYEYFTVYNELTKVKYVTEGMRKPAFLSGEQKKAIVDLLFKTNRKVTVKQLKEDYFKKIECFDSVEISGVEDRFNASLGTYHDLLKIIKDKDFLDNEENEDILEDIVLTLTLFEDREMIEERLKTYAHLFDDKVMKQLKRRRYTGWGRLSRKLINGIRDKQSGKTILDFLKSDGFANRNFMQLIHDDSLTFKEDIQKAQVSGQGDSLHEHIANLAGSPAIKKGILQTVKVVDELVKVMGRHKPENIVIEMARENQTTQKGQKNSRERMKRIEEGIKELGSQILKEHPVENTQLQNEKLYLYYLQNGRDMYVDQELDINRLSDYDVDHIVPQSFLKDDSIDNKVLTRSDKARGKSDNVPSEEVVKKMKNYWRQLLNAKLITQRKFDNLTKAERGGLSELDKAGFIKRQLVETRQITKHVAQILDSRMNTKYDENDKLIREVKVITLKSKLVSDFRKDFQFYKVREINNYHHAHDAYLNAVVGTALIKKYPKLESEFVYGDYKVYDVRKMIAKSEQEIGKATAKYFFYSNIMNFFKTEITLANGEIRKRPLIETNGETGEIVWDKGRDFATVRKVLSMPQVNIVKKTEVQTGGFSKESILPKRNSDKLIARKKDWDPKKYGGFDSPTVAYSVLVVAKVEKGKSKKLKSVKELLGITIMERSSFEKNPIDFLEAKGYKEVKKDLIIKLPKYSLFELENGRKRMLASAGELQKGNELALPSKYVNFLYLASHYEKLKGSPEDNEQKQLFVEQHKHYLDEIIEQISEFSKRVILADANLDKVLSAYNKHRDKPIREQAENIIHLFTLTNLGAPAAFKYFDTTIDRKRYTSTKEVLDATLIHQSITGLYETRIDLSQLGGDGGGGSGSSEAAAKGGLLGRDLLTKLKAQIQFSTEGPQVTWEDRPAMCLVLNLEEEYRLHEKPVPPSIDPSWLQLFPMVWAEKAGMGLANQVPPVVVELKSDASPVAVRQYPMSKEAREGIRPHIQRFLDLGILVPCQSPWNTPLLPVKKPGTNDYRPVQDLREVNKRVQDIHPTVPNPYNLLSSLPPSHTWYSVLDLKDAFFCLKLHPNSQPLFAFEWRDPEKGNTGQLTWTRLPQGFKNSPTLFNEALHRDLASFRALNPQVVMLQYVDDLLVAAPTYRDCKEGTRRLLQELSKLGYRVSAKKAQLCREEVTYLGYLLKGGKRWLTPARKATVMKIPTPTTPRQVREFLGTAGFCRLWIPGFASLAAPLYPLTRPKVPFTWTEAHQEAFGRIKEALLSAPALALPDLTKPFALYVDEKEGVARGVLTQTLGPWRRPVAYLSKKLDPVASGWPTCLKAIAAVALLLKDADKLTLGQNVLVIAPHNLESIVRQPPDRWMTNARMTHYQSLLLNERVSFAPPAILNPATLLPVESDDTPIHICSEILAEETGTRPDLRDQPLPGVPAWYTDGSSFIMDGRRQAGAAIVDNKRTVWASNLPEGTSAQKAELIALTQALRLAEGKSINIYTDSRYAFATAHVHGAIYKQRGWLTSAGKDIKNKEEILALLEAIHLPKRVAIIHCPGHQRGTDPVATGNRKADEAAKQAAQSTRILTETTKNAGKRTADGSEFEKRTADGSEFESPKKKAKVE

SEQ ID NO: 1645 - protein, 2127 aa, synthetic construct
  source 1..2127: note = Description of Artificial Sequence: Synthetic polypeptide
MPAAKRVKLDGGDKKYSIGLDIGTNSVGWAVITDEYKVPSKKFKVLGNTDRHSIKKNLIGALLFDSGETAEATRLKRTARRRYTRRKNRICYLQEIFSNEMAKVDDSFFHRLEESFLVEEDKKHERHPIFGNIVDEVAYHEKYPTIYHLRKKLVDSTDKADLRLIYLALAHMIKFRGHFLIEGDLNPDNSDVDKLFIQLVQTYNQLFEENPINASGVDAKAILSARLSKSRRLENLIAQLPGEKKNGLFGNLIALSLGLTPNFKSNFDLAEDAKLQLSKDTYDDDLDNLLAQIGDQYADLFLAAKNLSDAILLSDILRVNTEITKAPLSASMIKRYDEHHQDLTLLKALVRQQLPEKYKEIFFDQSKNGYAGYIDGGASQEEFYKFIKPILEKMDGTEELLVKLNREDLLRKQRTFDNGSIPHQIHLGELHAILRRQEDFYPFLKDNREKIEKILTFRIPYYVGPLARGNSRFAWMTRKSEETITPWNFEEVVDKGASAQSFIERMTNFDKNLPNEKVLPKHSLLYEYFTVYNELTKVKYVTEGMRKPAFLSGEQKKAIVDLLFKTNRKVTVKQLKEDYFKKIECFDSVEISGVEDRFNASLGTYHDLLKIIKDKDFLDNEENEDILEDIVLTLTLFEDREMIEERLKTYAHLFDDKVMKQLKRRRYTGWGRLSRKLINGIRDKQSGKTILDFLKSDGFANRNFMQLIHDDSLTFKEDIQKAQVSGQGDSLHEHIANLAGSPAIKKGILQTVKVVDELVKVMGRHKPENIVIEMARENQTTQKGQKNSRERMKRIEEGIKELGSQILKEHPVENTQLQNEKLYLYYLQNGRDMYVDQELDINRLSDYDVDHIVPQSFLKDDSIDNKVLTRSDKARGKSDNVPSEEVVKKMKNYWRQLLNAKLITQRKFDNLTKAERGGLSELDKAGFIKRQLVETRQITKHVAQILDSRMNTKYDENDKLIREVKVITLKSKLVSDFRKDFQFYKVREINNYHHAHDAYLNAVVGTALIKKYPKLESEFVYGDYKVYDVRKMIAKSEQEIGKATAKYFFYSNIMNFFKTEITLANGEIRKRPLIETNGETGEIVWDKGRDFATVRKVLSMPQVNIVKKTEVQTGGFSKESILPKRNSDKLIARKKDWDPKKYGGFDSPTVAYSVLVVAKVEKGKSKKLKSVKELLGITIMERSSFEKNPIDFLEAKGYKEVKKDLIIKLPKYSLFELENGRKRMLASAGELQKGNELALPSKYVNFLYLASHYEKLKGSPEDNEQKQLFVEQHKHYLDEIIEQISEFSKRVILADANLDKVLSAYNKHRDKPIREQAENIIHLFTLTNLGAPAAFKYFDTTIDRKRYTSTKEVLDATLIHQSITGLYETRIDLSQLGGDGGEAAAKGGSGSSGGLLGRDLLTKLKAQIQFSTEGPQVTWEDRPAMCLVLNLEEEYRLHEKPVPPSIDPSWLQLFPMVWAEKAGMGLANQVPPVVVELKSDASPVAVRQYPMSKEAREGIRPHIQRFLDLGILVPCQSPWNTPLLPVKKPGTNDYRPVQDLREVNKRVQDIHPTVPNPYNLLSSLPPSHTWYSVLDLKDAFFCLKLHPNSQPLFAFEWRDPEKGNTGQLTWTRLPQGFKNSPTLFNEALHRDLASFRALNPQVVMLQYVDDLLVAAPTYRDCKEGTRRLLQELSKLGYRVSAKKAQLCREEVTYLGYLLKGGKRWLTPARKATVMKIPTPTTPRQVREFLGTAGFCRLWIPGFASLAAPLYPLTRPKVPFTWTEAHQEAFGRIKEALLSAPALALPDLTKPFALYVDEKEGVARGVLTQTLGPWRRPVAYLSKKLDPVASGWPTCLKAIAAVALLLKDADKLTLGQNVLVIAPHNLESIVRQPPDRWMTNARMTHYQSLLLNERVSFAPPAILNPATLLPVESDDTPIHICSEILAEETGTRPDLRDQPLPGVPAWYTDGSSFIMDGRRQAGAAIVDNKRTVWASNLPEGTSAQKAELIALTQALRLAEGKSINIYTDSRYAFATAHVHGAIYKQRGWLTSAGKDIKNKEEILALLEAIHLPKRVAIIHCPGHQRGTDPVATGNRKADEAAKQAAQSTRILTETTKNAGKRTADGSEFEKRTADGSEFESPKKKAKVE

SEQ ID NO: 1646 - protein, 2127 aa, synthetic construct
  source 1..2127: note = Description of Artificial Sequence: Synthetic polypeptide
MPAAKRVKLDGGDKKYSIGLDIGTNSVGWAVITDEYKVPSKKFKVLGNTDRHSIKKNLIGALLFDSGETAEATRLKRTARRRYTRRKNRICYLQEIFSNEMAKVDDSFFHRLEESFLVEEDKKHERHPIFGNIVDEVAYHEKYPTIYHLRKKLVDSTDKADLRLIYLALAHMIKFRGHFLIEGDLNPDNSDVDKLFIQLVQTYNQLFEENPINASGVDAKAILSARLSKSRRLENLIAQLPGEKKNGLFGNLIALSLGLTPNFKSNFDLAEDAKLQLSKDTYDDDLDNLLAQIGDQYADLFLAAKNLSDAILLSDILRVNTEITKAPLSASMIKRYDEHHQDLTLLKALVRQQLPEKYKEIFFDQSKNGYAGYIDGGASQEEFYKFIKPILEKMDGTEELLVKLNREDLLRKQRTFDNGSIPHQIHLGELHAILRRQEDFYPFLKDNREKIEKILTFRIPYYVGPLARGNSRFAWMTRKSEETITPWNFEEVVDKGASAQSFIERMTNFDKNLPNEKVLPKHSLLYEYFTVYNELTKVKYVTEGMRKPAFLSGEQKKAIVDLLFKTNRKVTVKQLKEDYFKKIECFDSVEISGVEDRFNASLGTYHDLLKIIKDKDFLDNEENEDILEDIVLTLTLFEDREMIEERLKTYAHLFDDKVMKQLKRRRYTGWGRLSRKLINGIRDKQSGKTILDFLKSDGFANRNFMQLIHDDSLTFKEDIQKAQVSGQGDSLHEHIANLAGSPAIKKGILQTVKVVDELVKVMGRHKPENIVIEMARENQTTQKGQKNSRERMKRIEEGIKELGSQILKEHPVENTQLQNEKLYLYYLQNGRDMYVDQELDINRLSDYDVDHIVPQSFLKDDSIDNKVLTRSDKARGKSDNVPSEEVVKKMKNYWRQLLNAKLITQRKFDNLTKAERGGLSELDKAGFIKRQLVETRQITKHVAQILDSRMNTKYDENDKLIREVKVITLKSKLVSDFRKDFQFYKVREINNYHHAHDAYLNAVVGTALIKKYPKLESEFVYGDYKVYDVRKMIAKSEQEIGKATAKYFFYSNIMNFFKTEITLANGEIRKRPLIETNGETGEIVWDKGRDFATVRKVLSMPQVNIVKKTEVQTGGFSKESILPKRNSDKLIARKKDWDPKKYGGFDSPTVAYSVLVVAKVEKGKSKKLKSVKELLGITIMERSSFEKNPIDFLEAKGYKEVKKDLIIKLPKYSLFELENGRKRMLASAGELQKGNELALPSKYVNFLYLASHYEKLKGSPEDNEQKQLFVEQHKHYLDEIIEQISEFSKRVILADANLDKVLSAYNKHRDKPIREQAENIIHLFTLTNLGAPAAFKYFDTTIDRKRYTSTKEVLDATLIHQSITGLYETRIDLSQLGGDGGEAAAKGGGGGSGGLLGRDLLTKLKAQIQFSTEGPQVTWEDRPAMCLVLNLEEEYRLHEKPVPPSIDPSWLQLFPMVWAEKAGMGLANQVPPVVVELKSDASPVAVRQYPMSKEAREGIRPHIQRFLDLGILVPCQSPWNTPLLPVKKPGTNDYRPVQDLREVNKRVQDIHPTVPNPYNLLSSLPPSHTWYSVLDLKDAFFCLKLHPNSQPLFAFEWRDPEKGNTGQLTWTRLPQGFKNSPTLFNEALHRDLASFRALNPQVVMLQYVDDLLVAAPTYRDCKEGTRRLLQELSKLGYRVSAKKAQLCREEVTYLGYLLKGGKRWLTPARKATVMKIPTPTTPRQVREFLGTAGFCRLWIPGFASLAAPLYPLTRPKVPFTWTEAHQEAFGRIKEALLSAPALALPDLTKPFALYVDEKEGVARGVLTQTLGPWRRPVAYLSKKLDPVASGWPTCLKAIAAVALLLKDADKLTLGQNVLVIAPHNLESIVRQPPDRWMTNARMTHYQSLLLNERVSFAPPAILNPATLLPVESDDTPIHICSEILAEETGTRPDLRDQPLPGVPAWYTDGSSFIMDGRRQAGAAIVDNKRTVWASNLPEGTSAQKAELIALTQALRLAEGKSINIYTDSRYAFATAHVHGAIYKQRGWLTSAGKDIKNKEEILALLEAIHLPKRVAIIHCPGHQRGTDPVATGNRKADEAAKQAAQSTRILTETTKNAGKRTADGSEFEKRTADGSEFESPKKKAKVE

SEQ ID NO: 1647 - protein, 2127 aa, synthetic construct
  source 1..2127: note = Description of Artificial Sequence: Synthetic polypeptide
MPAAKRVKLDGGDKKYSIGLDIGTNSVGWAVITDEYKVPSKKFKVLGNTDRHSIKKNLIGALLFDSGETAEATRLKRTARRRYTRRKNRICYLQEIFSNEMAKVDDSFFHRLEESFLVEEDKKHERHPIFGNIVDEVAYHEKYPTIYHLRKKLVDSTDKADLRLIYLALAHMIKFRGHFLIEGDLNPDNSDVDKLFIQLVQTYNQLFEENPINASGVDAKAILSARLSKSRRLENLIAQLPGEKKNGLFGNLIALSLGLTPNFKSNFDLAEDAKLQLSKDTYDDDLDNLLAQIGDQYADLFLAAKNLSDAILLSDILRVNTEITKAPLSASMIKRYDEHHQDLTLLKALVRQQLPEKYKEIFFDQSKNGYAGYIDGGASQEEFYKFIKPILEKMDGTEELLVKLNREDLLRKQRTFDNGSIPHQIHLGELHAILRRQEDFYPFLKDNREKIEKILTFRIPYYVGPLARGNSRFAWMTRKSEETITPWNFEEVVDKGASAQSFIERMTNFDKNLPNEKVLPKHSLLYEYFTVYNELTKVKYVTEGMRKPAFLSGEQKKAIVDLLFKTNRKVTVKQLKEDYFKKIECFDSVEISGVEDRFNASLGTYHDLLKIIKDKDFLDNEENEDILEDIVLTLTLFEDREMIEERLKTYAHLFDDKVMKQLKRRRYTGWGRLSRKLINGIRDKQSGKTILDFLKSDGFANRNFMQLIHDDSLTFKEDIQKAQVSGQGDSLHEHIANLAGSPAIKKGILQTVKVVDELVKVMGRHKPENIVIEMARENQTTQKGQKNSRERMKRIEEGIKELGSQILKEHPVENTQLQNEKLYLYYLQNGRDMYVDQELDINRLSDYDVDHIVPQSFLKDDSIDNKVLTRSDKARGKSDNVPSEEVVKKMKNYWRQLLNAKLITQRKFDNLTKAERGGLSELDKAGFIKRQLVETRQITKHVAQILDSRMNTKYDENDKLIREVKVITLKSKLVSDFRKDFQFYKVREINNYHHAHDAYLNAVVGTALIKKYPKLESEFVYGDYKVYDVRKMIAKSEQEIGKATAKYFFYSNIMNFFKTEITLANGEIRKRPLIETNGETGEIVWDKGRDFATVRKVLSMPQVNIVKKTEVQTGGFSKESILPKRNSDKLIARKKDWDPKKYGGFDSPTVAYSVLVVAKVEKGKSKKLKSVKELLGITIMERSSFEKNPIDFLEAKGYKEVKKDLIIKLPKYSLFELENGRKRMLASAGELQKGNELALPSKYVNFLYLASHYEKLKGSPEDNEQKQLFVEQHKHYLDEIIEQISEFSKRVILADANLDKVLSAYNKHRDKPIREQAENIIHLFTLTNLGAPAAFKYFDTTIDRKRYTSTKEVLDATLIHQSITGLYETRIDLSQLGGDGGGGSEAAAKGGGGGLLGRDLLTKLKAQIQFSTEGPQVTWEDRPAMCLVLNLEEEYRLHEKPVPPSIDPSWLQLFPMVWAEKAGMGLANQVPPVVVELKSDASPVAVRQYPMSKEAREGIRPHIQRFLDLGILVPCQSPWNTPLLPVKKPGTNDYRPVQDLREVNKRVQDIHPTVPNPYNLLSSLPPSHTWYSVLDLKDAFFCLKLHPNSQPLFAFEWRDPEKGNTGQLTWTRLPQGFKNSPTLFNEALHRDLASFRALNPQVVMLQYVDDLLVAAPTYRDCKEGTRRLLQELSKLGYRVSAKKAQLCREEVTYLGYLLKGGKRWLTPARKATVMKIPTPTTPRQVREFLGTAGFCRLWIPGFASLAAPLYPLTRPKVPFTWTEAHQEAFGRIKEALLSAPALALPDLTKPFALYVDEKEGVARGVLTQTLGPWRRPVAYLSKKLDPVASGWPTCLKAIAAVALLLKDADKLTLGQNVLVIAPHNLESIVRQPPDRWMTNARMTHYQSLLLNERVSFAPPAILNPATLLPVESDDTPIHICSEILAEETGTRPDLRDQPLPGVPAWYTDGSSFIMDGRRQAGAAIVDNKRTVWASNLPEGTSAQKAELIALTQALRLAEGKSINIYTDSRYAFATAHVHGAIYKQRGWLTSAGKDIKNKEEILALLEAIHLPKRVAIIHCPGHQRGTDPVATGNRKADEAAKQAAQSTRILTETTKNAGKRTADGSEFEKRTADGSEFESPKKKAKVE

SEQ ID NO: 1648 - protein, 2125 aa, synthetic construct
  source 1..2125: note = Description of Artificial Sequence: Synthetic polypeptide
MPAAKRVKLDGGDKKYSIGLDIGTNSVGWAVITDEYKVPSKKFKVLGNTDRHSIKKNLIGALLFDSGETAEATRLKRTARRRYTRRKNRICYLQEIFSNEMAKVDDSFFHRLEESFLVEEDKKHERHPIFGNIVDEVAYHEKYPTIYHLRKKLVDSTDKADLRLIYLALAHMIKFRGHFLIEGDLNPDNSDVDKLFIQLVQTYNQLFEENPINASGVDAKAILSARLSKSRRLENLIAQLPGEKKNGLFGNLIALSLGLTPNFKSNFDLAEDAKLQLSKDTYDDDLDNLLAQIGDQYADLFLAAKNLSDAILLSDILRVNTEITKAPLSASMIKRYDEHHQDLTLLKALVRQQLPEKYKEIFFDQSKNGYAGYIDGGASQEEFYKFIKPILEKMDGTEELLVKLNREDLLRKQRTFDNGSIPHQIHLGELHAILRRQEDFYPFLKDNREKIEKILTFRIPYYVGPLARGNSRFAWMTRKSEETITPWNFEEVVDKGASAQSFIERMTNFDKNLPNEKVLPKHSLLYEYFTVYNELTKVKYVTEGMRKPAFLSGEQKKAIVDLLFKTNRKVTVKQLKEDYFKKIECFDSVEISGVEDRFNASLGTYHDLLKIIKDKDFLDNEENEDILEDIVLTLTLFEDREMIEERLKTYAHLFDDKVMKQLKRRRYTGWGRLSRKLINGIRDKQSGKTILDFLKSDGFANRNFMQLIHDDSLTFKEDIQKAQVSGQGDSLHEHIANLAGSPAIKKGILQTVKVVDELVKVMGRHKPENIVIEMARENQTTQKGQKNSRERMKRIEEGIKELGSQILKEHPVENTQLQNEKLYLYYLQNGRDMYVDQELDINRLSDYDVDHIVPQSFLKDDSIDNKVLTRSDKARGKSDNVPSEEVVKKMKNYWRQLLNAKLITQRKFDNLTKAERGGLSELDKAGFIKRQLVETRQITKHVAQILDSRMNTKYDENDKLIREVKVITLKSKLVSDFRKDFQFYKVREINNYHHAHDAYLNAVVGTALIKKYPKLESEFVYGDYKVYDVRKMIAKSEQEIGKATAKYFFYSNIMNFFKTEITLANGEIRKRPLIETNGETGEIVWDKGRDFATVRKVLSMPQVNIVKKTEVQTGGFSKESILPKRNSDKLIARKKDWDPKKYGGFDSPTVAYSVLVVAKVEKGKSKKLKSVKELLGITIMERSSFEKNPIDFLEAKGYKEVKKDLIIKLPKYSLFELENGRKRMLASAGELQKGNELALPSKYVNFLYLASHYEKLKGSPEDNEQKQLFVEQHKHYLDEIIEQISEFSKRVILADANLDKVLSAYNKHRDKPIREQAENIIHLFTLTNLGAPAAFKYFDTTIDRKRYTSTKEVLDATLIHQSITGLYETRIDLSQLGGDGGGGSPAPGSSGGLLGRDLLTKLKAQIQFSTEGPQVTWEDRPAMCLVLNLEEEYRLHEKPVPPSIDPSWLQLFPMVWAEKAGMGLANQVPPVVVELKSDASPVAVRQYPMSKEAREGIRPHIQRFLDLGILVPCQSPWNTPLLPVKKPGTNDYRPVQDLREVNKRVQDIHPTVPNPYNLLSSLPPSHTWYSVLDLKDAFFCLKLHPNSQPLFAFEWRDPEKGNTGQLTWTRLPQGFKNSPTLFNEALHRDLASFRALNPQVVMLQYVDDLLVAAPTYRDCKEGTRRLLQELSKLGYRVSAKKAQLCREEVTYLGYLLKGGKRWLTPARKATVMKIPTPTTPRQVREFLGTAGFCRLWIPGFASLAAPLYPLTRPKVPFTWTEAHQEAFGRIKEALLSAPALALPDLTKPFALYVDEKEGVARGVLTQTLGPWRRPVAYLSKKLDPVASGWPTCLKAIAAVALLLKDADKLTLGQNVLVIAPHNLESIVRQPPDRWMTNARMTHYQSLLLNERVSFAPPAILNPATLLPVESDDTPIHICSEILAEETGTRPDLRDQPLPGVPAWYTDGSSFIMDGRRQAGAAIVDNKRTVWASNLPEGTSAQKAELIALTQALRLAEGKSINIYTDSRYAFATAHVHGAIYKQRGWLTSAGKDIKNKEEILALLEAIHLPKRVAIIHCPGHQRGTDPVATGNRKADEAAKQAAQSTRILTETTKNAGKRTADGSEFEKRTADGSEFESPKKKAKVE

SEQ ID NO: 1649 - protein, 2149 aa, synthetic construct
  source 1..2149: note = Description of Artificial Sequence: Synthetic polypeptide
MPAAKRVKLDGGDKKYSIGLDIGTNSVGWAVITDEYKVPSKKFKVLGNTDRHSIKKNLIGALLFDSGETAEATRLKRTARRRYTRRKNRICYLQEIFSNEMAKVDDSFFHRLEESFLVEEDKKHERHPIFGNIVDEVAYHEKYPTIYHLRKKLVDSTDKADLRLIYLALAHMIKFRGHFLIEGDLNPDNSDVDKLFIQLVQTYNQLFEENPINASGVDAKAILSARLSKSRRLENLIAQLPGEKKNGLFGNLIALSLGLTPNFKSNFDLAEDAKLQLSKDTYDDDLDNLLAQIGDQYADLFLAAKNLSDAILLSDILRVNTEITKAPLSASMIKRYDEHHQDLTLLKALVRQQLPEKYKEIFFDQSKNGYAGYIDGGASQEEFYKFIKPILEKMDGTEELLVKLNREDLLRKQRTFDNGSIPHQIHLGELHAILRRQEDFYPFLKDNREKIEKILTFRIPYYVGPLARGNSRFAWMTRKSEETITPWNFEEVVDKGASAQSFIERMTNFDKNLPNEKVLPKHSLLYEYFTVYNELTKVKYVTEGMRKPAFLSGEQKKAIVDLLFKTNRKVTVKQLKEDYFKKIECFDSVEISGVEDRFNASLGTYHDLLKIIKDKDFLDNEENEDILEDIVLTLTLFEDREMIEERLKTYAHLFDDKVMKQLKRRRYTGWGRLSRKLINGIRDKQSGKTILDFLKSDGFANRNFMQLIHDDSLTFKEDIQKAQVSGQGDSLHEHIANLAGSPAIKKGILQTVKVVDELVKVMGRHKPENIVIEMARENQTTQKGQKNSRERMKRIEEGIKELGSQILKEHPVENTQLQNEKLYLYYLQNGRDMYVDQELDINRLSDYDVDHIVPQSFLKDDSIDNKVLTRSDKARGKSDNVPSEEVVKKMKNYWRQLLNAKLITQRKFDNLTKAERGGLSELDKAGFIKRQLVETRQITKHVAQILDSRMNTKYDENDKLIREVKVITLKSKLVSDFRKDFQFYKVREINNYHHAHDAYLNAVVGTALIKKYPKLESEFVYGDYKVYDVRKMIAKSEQEIGKATAKYFFYSNIMNFFKTEITLANGEIRKRPLIETNGETGEIVWDKGRDFATVRKVLSMPQVNIVKKTEVQTGGFSKESILPKRNSDKLIARKKDWDPKKYGGFDSPTVAYSVLVVAKVEKGKSKKLKSVKELLGITIMERSSFEKNPIDFLEAKGYKEVKKDLIIKLPKYSLFELENGRKRMLASAGELQKGNELALPSKYVNFLYLASHYEKLKGSPEDNEQKQLFVEQHKHYLDEIIEQISEFSKRVILADANLDKVLSAYNKHRDKPIREQAENIIHLFTLTNLGAPAAFKYFDTTIDRKRYTSTKEVLDATLIHQSITGLYETRIDLSQLGGDGGSGGSSGGSSGSETPGTSESATPESSGGSSGGSSGGLLGRDLLTKLKAQIQFSTEGPQVTWEDRPAMCLVLNLEEEYRLHEKPVPPSIDPSWLQLFPMVWAEKAGMGLANQVPPVVVELKSDASPVAVRQYPMSKEAREGIRPHIQRFLDLGILVPCQSPWNTPLLPVKKPGTNDYRPVQDLREVNKRVQDIHPTVPNPYNLLSSLPPSHTWYSVLDLKDAFFCLKLHPNSQPLFAFEWRDPEKGNTGQLTWTRLPQGFKNSPTLFNEALHRDLASFRALNPQVVMLQYVDDLLVAAPTYRDCKEGTRRLLQELSKLGYRVSAKKAQLCREEVTYLGYLLKGGKRWLTPARKATVMKIPTPTTPRQVREFLGTAGFCRLWIPGFASLAAPLYPLTRPKVPFTWTEAHQEAFGRIKEALLSAPALALPDLTKPFALYVDEKEGVARGVLTQTLGPWRRPVAYLSKKLDPVASGWPTCLKAIAAVALLLKDADKLTLGQNVLVIAPHNLESIVRQPPDRWMTNARMTHYQSLLLNERVSFAPPAILNPATLLPVESDDTPIHICSEILAEETGTRPDLRDQPLPGVPAWYTDGSSFIMDGRRQAGAAIVDNKRTVWASNLPEGTSAQKAELIALTQALRLAEGKSINIYTDSRYAFATAHVHGAIYKQRGWLTSAGKDIKNKEEILALLEAIHLPKRVAIIHCPGHQRGTDPVATGNRKADEAAKQAAQSTRILTETTKNAGKRTADGSEFEKRTADGSEFESPKKKAKVE

SEQ ID NO: 1650 - protein, 2121 aa, synthetic construct
  source 1..2121: note = Description of Artificial Sequence: Synthetic polypeptide
MPAAKRVKLDGGDKKYSIGLDIGTNSVGWAVITDEYKVPSKKFKVLGNTDRHSIKKNLIGALLFDSGETAEATRLKRTARRRYTRRKNRICYLQEIFSNEMAKVDDSFFHRLEESFLVEEDKKHERHPIFGNIVDEVAYHEKYPTIYHLRKKLVDSTDKADLRLIYLALAHMIKFRGHFLIEGDLNPDNSDVDKLFIQLVQTYNQLFEENPINASGVDAKAILSARLSKSRRLENLIAQLPGEKKNGLFGNLIALSLGLTPNFKSNFDLAEDAKLQLSKDTYDDDLDNLLAQIGDQYADLFLAAKNLSDAILLSDILRVNTEITKAPLSASMIKRYDEHHQDLTLLKALVRQQLPEKYKEIFFDQSKNGYAGYIDGGASQEEFYKFIKPILEKMDGTEELLVKLNREDLLRKQRTFDNGSIPHQIHLGELHAILRRQEDFYPFLKDNREKIEKILTFRIPYYVGPLARGNSRFAWMTRKSEETITPWNFEEVVDKGASAQSFIERMTNFDKNLPNEKVLPKHSLLYEYFTVYNELTKVKYVTEGMRKPAFLSGEQKKAIVDLLFKTNRKVTVKQLKEDYFKKIECFDSVEISGVEDRFNASLGTYHDLLKIIKDKDFLDNEENEDILEDIVLTLTLFEDREMIEERLKTYAHLFDDKVMKQLKRRRYTGWGRLSRKLINGIRDKQSGKTILDFLKSDGFANRNFMQLIHDDSLTFKEDIQKAQVSGQGDSLHEHIANLAGSPAIKKGILQTVKVVDELVKVMGRHKPENIVIEMARENQTTQKGQKNSRERMKRIEEGIKELGSQILKEHPVENTQLQNEKLYLYYLQNGRDMYVDQELDINRLSDYDVDHIVPQSFLKDDSIDNKVLTRSDKARGKSDNVPSEEVVKKMKNYWRQLLNAKLITQRKFDNLTKAERGGLSELDKAGFIKRQLVETRQITKHVAQILDSRMNTKYDENDKLIREVKVITLKSKLVSDFRKDFQFYKVREINNYHHAHDAYLNAVVGTALIKKYPKLESEFVYGDYKVYDVRKMIAKSEQEIGKATAKYFFYSNIMNFFKTEITLANGEIRKRPLIETNGETGEIVWDKGRDFATVRKVLSMPQVNIVKKTEVQTGGFSKESILPKRNSDKLIARKKDWDPKKYGGFDSPTVAYSVLVVAKVEKGKSKKLKSVKELLGITIMERSSFEKNPIDFLEAKGYKEVKKDLIIKLPKYSLFELENGRKRMLASAGELQKGNELALPSKYVNFLYLASHYEKLKGSPEDNEQKQLFVEQHKHYLDEIIEQISEFSKRVILADANLDKVLSAYNKHRDKPIREQAENIIHLFTLTNLGAPAAFKYFDTTIDRKRYTSTKEVLDATLIHQSITGLYETRIDLSQLGGDGGGGGGSGGLLGRDLLTKLKAQIQFSTEGPQVTWEDRPAMCLVLNLEEEYRLHEKPVPPSIDPSWLQLFPMVWAEKAGMGLANQVPPVVVELKSDASPVAVRQYPMSKEAREGIRPHIQRFLDLGILVPCQSPWNTPLLPVKKPGTNDYRPVQDLREVNKRVQDIHPTVPNPYNLLSSLPPSHTWYSVLDLKDAFFCLKLHPNSQPLFAFEWRDPEKGNTGQLTWTRLPQGFKNSPTLFNEALHRDLASFRALNPQVVMLQYVDDLLVAAPTYRDCKEGTRRLLQELSKLGYRVSAKKAQLCREEVTYLGYLLKGGKRWLTPARKATVMKIPTPTTPRQVREFLGTAGFCRLWIPGFASLAAPLYPLTRPKVPFTWTEAHQEAFGRIKEALLSAPALALPDLTKPFALYVDEKEGVARGVLTQTLGPWRRPVAYLSKKLDPVASGWPTCLKAIAAVALLLKDADKLTLGQNVLVIAPHNLESIVRQPPDRWMTNARMTHYQSLLLNERVSFAPPAILNPATLLPVESDDTPIHICSEILAEETGTRPDLRDQPLPGVPAWYTDGSSFIMDGRRQAGAAIVDNKRTVWASNLPEGTSAQKAELIALTQALRLAEGKSINIYTDSRYAFATAHVHGAIYKQRGWLTSAGKDIKNKEEILALLEAIHLPKRVAIIHCPGHQRGTDPVATGNRKADEAAKQAAQSTRILTETTKNAGKRTADGSEFEKRTADGSEFESPKKKAKVE

SEQ ID NO: 1651 - protein, 2125 aa, synthetic construct
  source 1..2125: note = Description of Artificial Sequence: Synthetic polypeptide
MPAAKRVKLDGGDKKYSIGLDIGTNSVGWAVITDEYKVPSKKFKVLGNTDRHSIKKNLIGALLFDSGETAEATRLKRTARRRYTRRKNRICYLQEIFSNEMAKVDDSFFHRLEESFLVEEDKKHERHPIFGNIVDEVAYHEKYPTIYHLRKKLVDSTDKADLRLIYLALAHMIKFRGHFLIEGDLNPDNSDVDKLFIQLVQTYNQLFEENPINASGVDAKAILSARLSKSRRLENLIAQLPGEKKNGLFGNLIALSLGLTPNFKSNFDLAEDAKLQLSKDTYDDDLDNLLAQIGDQYADLFLAAKNLSDAILLSDILRVNTEITKAPLSASMIKRYDEHHQDLTLLKALVRQQLPEKYKEIFFDQSKNGYAGYIDGGASQEEFYKFIKPILEKMDGTEELLVKLNREDLLRKQRTFDNGSIPHQIHLGELHAILRRQEDFYPFLKDNREKIEKILTFRIPYYVGPLARGNSRFAWMTRKSEETITPWNFEEVVDKGASAQSFIERMTNFDKNLPNEKVLPKHSLLYEYFTVYNELTKVKYVTEGMRKPAFLSGEQKKAIVDLLFKTNRKVTVKQLKEDYFKKIECFDSVEISGVEDRFNASLGTYHDLLKIIKDKDFLDNEENEDILEDIVLTLTLFEDREMIEERLKTYAHLFDDKVMKQLKRRRYTGWGRLSRKLINGIRDKQSGKTILDFLKSDGFANRNFMQLIHDDSLTFKEDIQKAQVSGQGDSLHEHIANLAGSPAIKKGILQTVKVVDELVKVMGRHKPENIVIEMARENQTTQKGQKNSRERMKRIEEGIKELGSQILKEHPVENTQLQNEKLYLYYLQNGRDMYVDQELDINRLSDYDVDHIVPQSFLKDDSIDNKVLTRSDKARGKSDNVPSEEVVKKMKNYWRQLLNAKLITQRKFDNLTKAERGGLSELDKAGFIKRQLVETRQITKHVAQILDSRMNTKYDENDKLIREVKVITLKSKLVSDFRKDFQFYKVREINNYHHAHDAYLNAVVGTALIKKYPKLESEFVYGDYKVYDVRKMIAKSEQEIGKATAKYFFYSNIMNFFKTEITLANGEIRKRPLIETNGETGEIVWDKGRDFATVRKVLSMPQVNIVKKTEVQTGGFSKESILPKRNSDKLIARKKDWDPKKYGGFDSPTVAYSVLVVAKVEKGKSKKLKSVKELLGITIMERSSFEKNPIDFLEAKGYKEVKKDLIIKLPKYSLFELENGRKRMLASAGELQKGNELALPSKYVNFLYLASHYEKLKGSPEDNEQKQLFVEQHKHYLDEIIEQISEFSKRVILADANLDKVLSAYNKHRDKPIREQAENIIHLFTLTNLGAPAAFKYFDTTIDRKRYTSTKEVLDATLIHQSITGLYETRIDLSQLGGDGGPAPGSSGGSGGLLGRDLLTKLKAQIQFSTEGPQVTWEDRPAMCLVLNLEEEYRLHEKPVPPSIDPSWLQLFPMVWAEKAGMGLANQVPPVVVELKSDASPVAVRQYPMSKEAREGIRPHIQRFLDLGILVPCQSPWNTPLLPVKKPGTNDYRPVQDLREVNKRVQDIHPTVPNPYNLLSSLPPSHTWYSVLDLKDAFFCLKLHPNSQPLFAFEWRDPEKGNTGQLTWTRLPQGFKNSPTLFNEALHRDLASFRALNPQVVMLQYVDDLLVAAPTYRDCKEGTRRLLQELSKLGYRVSAKKAQLCREEVTYLGYLLKGGKRWLTPARKATVMKIPTPTTPRQVREFLGTAGFCRLWIPGFASLAAPLYPLTRPKVPFTWTEAHQEAFGRIKEALLSAPALALPDLTKPFALYVDEKEGVARGVLTQTLGPWRRPVAYLSKKLDPVASGWPTCLKAIAAVALLLKDADKLTLGQNVLVIAPHNLESIVRQPPDRWMTNARMTHYQSLLLNERVSFAPPAILNPATLLPVESDDTPIHICSEILAEETGTRPDLRDQPLPGVPAWYTDGSSFIMDGRRQAGAAIVDNKRTVWASNLPEGTSAQKAELIALTQALRLAEGKSINIYTDSRYAFATAHVHGAIYKQRGWLTSAGKDIKNKEEILALLEAIHLPKRVAIIHCPGHQRGTDPVATGNRKADEAAKQAAQSTRILTETTKNAGKRTADGSEFEKRTADGSEFESPKKKAKVE

SEQ ID NO: 1652 - protein, 2125 aa, synthetic construct
  source 1..2125: note = Description of Artificial Sequence: Synthetic polypeptide
MPAAKRVKLDGGDKKYSIGLDIGTNSVGWAVITDEYKVPSKKFKVLGNTDRHSIKKNLIGALLFDSGETAEATRLKRTARRRYTRRKNRICYLQEIFSNEMAKVDDSFFHRLEESFLVEEDKKHERHPIFGNIVDEVAYHEKYPTIYHLRKKLVDSTDKADLRLIYLALAHMIKFRGHFLIEGDLNPDNSDVDKLFIQLVQTYNQLFEENPINASGVDAKAILSARLSKSRRLENLIAQLPGEKKNGLFGNLIALSLGLTPNFKSNFDLAEDAKLQLSKDTYDDDLDNLLAQIGDQYADLFLAAKNLSDAILLSDILRVNTEITKAPLSASMIKRYDEHHQDLTLLKALVRQQLPEKYKEIFFDQSKNGYAGYIDGGASQEEFYKFIKPILEKMDGTEELLVKLNREDLLRKQRTFDNGSIPHQIHLGELHAILRRQEDFYPFLKDNREKIEKILTFRIPYYVGPLARGNSRFAWMTRKSEETITPWNFEEVVDKGASAQSFIERMTNFDKNLPNEKVLPKHSLLYEYFTVYNELTKVKYVTEGMRKPAFLSGEQKKAIVDLLFKTNRKVTVKQLKEDYFKKIECFDSVEISGVEDRFNASLGTYHDLLKIIKDKDFLDNEENEDILEDIVLTLTLFEDREMIEERLKTYAHLFDDKVMKQLKRRRYTGWGRLSRKLINGIRDKQSGKTILDFLKSDGFANRNFMQLIHDDSLTFKEDIQKAQVSGQGDSLHEHIANLAGSPAIKKGILQTVKVVDELVKVMGRHKPENIVIEMARENQTTQKGQKNSRERMKRIEEGIKELGSQILKEHPVENTQLQNEKLYLYYLQNGRDMYVDQELDINRLSDYDVDHIVPQSFLKDDSIDNKVLTRSDKARGKSDNVPSEEVVKKMKNYWRQLLNAKLITQRKFDNLTKAERGGLSELDKAGFIKRQLVETRQITKHVAQILDSRMNTKYDENDKLIREVKVITLKSKLVSDFRKDFQFYKVREINNYHHAHDAYLNAVVGTALIKKYPKLESEFVYGDYKVYDVRKMIAKSEQEIGKATAKYFFYSNIMNFFKTEITLANGEIRKRPLIETNGETGEIVWDKGRDFATVRKVLSMPQVNIVKKTEVQTGGFSKESILPKRNSDKLIARKKDWDPKKYGGFDSPTVAYSVLVVAKVEKGKSKKLKSVKELLGITIMERSSFEKNPIDFLEAKGYKEVKKDLIIKLPKYSLFELENGRKRMLASAGELQKGNELALPSKYVNFLYLASHYEKLKGSPEDNEQKQLFVEQHKHYLDEIIEQISEFSKRVILADANLDKVLSAYNKHRDKPIREQAENIIHLFTLTNLGAPAAFKYFDTTIDRKRYTSTKEVLDATLIHQSITGLYETRIDLSQLGGDGGPAPGGSGGGGGLLGRDLLTKLKAQIQFSTEGPQVTWEDRPAMCLVLNLEEEYRLHEKPVPPSIDPSWLQLFPMVWAEKAGMGLANQVPPVVVELKSDASPVAVRQYPMSKEAREGIRPHIQRFLDLGILVPCQSPWNTPLLPVKKPGTNDYRPVQDLREVNKRVQDIHPTVPNPYNLLSSLPPSHTWYSVLDLKDAFFCLKLHPNSQPLFAFEWRDPEKGNTGQLTWTRLPQGFKNSPTLFNEALHRDLASFRALNPQVVMLQYVDDLLVAAPTYRDCKEGTRRLLQELSKLGYRVSAKKAQLCREEVTYLGYLLKGGKRWLTPARKATVMKIPTPTTPRQVREFLGTAGFCRLWIPGFASLAAPLYPLTRPKVPFTWTEAHQEAFGRIKEALLSAPALALPDLTKPFALYVDEKEGVARGVLTQTLGPWRRPVAYLSKKLDPVASGWPTCLKAIAAVALLLKDADKLTLGQNVLVIAPHNLESIVRQPPDRWMTNARMTHYQSLLLNERVSFAPPAILNPATLLPVESDDTPIHICSEILAEETGTRPDLRDQPLPGVPAWYTDGSSFIMDGRRQAGAAIVDNKRTVWASNLPEGTSAQKAELIALTQALRLAEGKSINIYTDSRYAFATAHVHGAIYKQRGWLTSAGKDIKNKEEILALLEAIHLPKRVAIIHCPGHQRGTDPVATGNRKADEAAKQAAQSTRILTETTKNAGKRTADGSEFEKRTADGSEFESPKKKAKVE

SEQ ID NO: 1653 - protein, 2125 aa, synthetic construct
  source 1..2125: note = Description of Artificial Sequence: Synthetic polypeptide
MPAAKRVKLDGGDKKYSIGLDIGTNSVGWAVITDEYKVPSKKFKVLGNTDRHSIKKNLIGALLFDSGETAEATRLKRTARRRYTRRKNRICYLQEIFSNEMAKVDDSFFHRLEESFLVEEDKKHERHPIFGNIVDEVAYHEKYPTIYHLRKKLVDSTDKADLRLIYLALAHMIKFRGHFLIEGDLNPDNSDVDKLFIQLVQTYNQLFEENPINASGVDAKAILSARLSKSRRLENLIAQLPGEKKNGLFGNLIALSLGLTPNFKSNFDLAEDAKLQLSKDTYDDDLDNLLAQIGDQYADLFLAAKNLSDAILLSDILRVNTEITKAPLSASMIKRYDEHHQDLTLLKALVRQQLPEKYKEIFFDQSKNGYAGYIDGGASQEEFYKFIKPILEKMDGTEELLVKLNREDLLRKQRTFDNGSIPHQIHLGELHAILRRQEDFYPFLKDNREKIEKILTFRIPYYVGPLARGNSRFAWMTRKSEETITPWNFEEVVDKGASAQSFIERMTNFDKNLPNEKVLPKHSLLYEYFTVYNELTKVKYVTEGMRKPAFLSGEQKKAIVDLLFKTNRKVTVKQLKEDYFKKIECFDSVEISGVEDRFNASLGTYHDLLKIIKDKDFLDNEENEDILEDIVLTLTLFEDREMIEERLKTYAHLFDDKVMKQLKRRRYTGWGRLSRKLINGIRDKQSGKTILDFLKSDGFANRNFMQLIHDDSLTFKEDIQKAQVSGQGDSLHEHIANLAGSPAIKKGILQTVKVVDELVKVMGRHKPENIVIEMARENQTTQKGQKNSRERMKRIEEGIKELGSQILKEHPVENTQLQNEKLYLYYLQNGRDMYVDQELDINRLSDYDVDHIVPQSFLKDDSIDNKVLTRSDKARGKSDNVPSEEVVKKMKNYWRQLLNAKLITQRKFDNLTKAERGGLSELDKAGFIKRQLVETRQITKHVAQILDSRMNTKYDENDKLIREVKVITLKSKLVSDFRKDFQFYKVREINNYHHAHDAYLNAVVGTALIKKYPKLESEFVYGDYKVYDVRKMIAKSEQEIGKATAKYFFYSNIMNFFKTEITLANGEIRKRPLIETNGETGEIVWDKGRDFATVRKVLSMPQVNIVKKTEVQTGGFSKESILPKRNSDKLIARKKDWDPKKYGGFDSPTVAYSVLVVAKVEKGKSKKLKSVKELLGITIMERSSFEKNPIDFLEAKGYKEVKKDLIIKLPKYSLFELENGRKRMLASAGELQKGNELALPSKYVNFLYLASHYEKLKGSPEDNEQKQLFVEQHKHYLDEIIEQISEFSKRVILADANLDKVLSAYNKHRDKPIREQAENIIHLFTLTNLGAPAAFKYFDTTIDRKRYTSTKEVLDATLIHQSITGLYETRIDLSQLGGDGGGGGGGSPAPGGLLGRDLLTKLKAQIQFSTEGPQVTWEDRPAMCLVLNLEEEYRLHEKPVPPSIDPSWLQLFPMVWAEKAGMGLANQVPPVVVELKSDASPVAVRQYPMSKEAREGIRPHIQRFLDLGILVPCQSPWNTPLLPVKKPGTNDYRPVQDLREVNKRVQDIHPTVPNPYNLLSSLPPSHTWYSVLDLKDAFFCLKLHPNSQPLFAFEWRDPEKGNTGQLTWTRLPQGFKNSPTLFNEALHRDLASFRALNPQVVMLQYVDDLLVAAPTYRDCKEGTRRLLQELSKLGYRVSAKKAQLCREEVTYLGYLLKGGKRWLTPARKATVMKIPTPTTPRQVREFLGTAGFCRLWIPGFASLAAPLYPLTRPKVPFTWTEAHQEAFGRIKEALLSAPALALPDLTKPFALYVDEKEGVARGVLTQTLGPWRRPVAYLSKKLDPVASGWPTCLKAIAAVALLLKDADKLTLGQNVLVIAPHNLESIVRQPPDRWMTNARMTHYQSLLLNERVSFAPPAILNPATLLPVESDDTPIHICSEILAEETGTRPDLRDQPLPGVPAWYTDGSSFIMDGRRQAGAAIVDNKRTVWASNLPEGTSAQKAELIALTQALRLAEGKSINIYTDSRYAFATAHVHGAIYKQRGWLTSAGKDIKNKEEILALLEAIHLPKRVAIIHCPGHQRGTDPVATGNRKADEAAKQAAQSTRILTETTKNAGKRTADGSEFEKRTADGSEFESPKKKAKVE

SEQ ID NO: 1654 - protein, 2127 aa, synthetic construct
  source 1..2127: note = Description of Artificial Sequence: Synthetic polypeptide
MPAAKRVKLDGGDKKYSIGLDIGTNSVGWAVITDEYKVPSKKFKVLGNTDRHSIKKNLIGALLFDSGETAEATRLKRTARRRYTRRKNRICYLQEIFSNEMAKVDDSFFHRLEESFLVEEDKKHERHPIFGNIVDEVAYHEKYPTIYHLRKKLVDSTDKADLRLIYLALAHMIKFRGHFLIEGDLNPDNSDVDKLFIQLVQTYNQLFEENPINASGVDAKAILSARLSKSRRLENLIAQLPGEKKNGLFGNLIALSLGLTPNFKSNFDLAEDAKLQLSKDTYDDDLDNLLAQIGDQYADLFLAAKNLSDAILLSDILRVNTEITKAPLSASMIKRYDEHHQDLTLLKALVRQQLPEKYKEIFFDQSKNGYAGYIDGGASQEEFYKFIKPILEKMDGTEELLVKLNREDLLRKQRTFDNGSIPHQIHLGELHAILRRQEDFYPFLKDNREKIEKILTFRIPYYVGPLARGNSRFAWMTRKSEETITPWNFEEVVDKGASAQSFIERMTNFDKNLPNEKVLPKHSLLYEYFTVYNELTKVKYVTEGMRKPAFLSGEQKKAIVDLLFKTNRKVTVKQLKEDYFKKIECFDSVEISGVEDRFNASLGTYHDLLKIIKDKDFLDNEENEDILEDIVLTLTLFEDREMIEERLKTYAHLFDDKVMKQLKRRRYTGWGRLSRKLINGIRDKQSGKTILDFLKSDGFANRNFMQLIHDDSLTFKEDIQKAQVSGQGDSLHEHIANLAGSPAIKKGILQTVKVVDELVKVMGRHKPENIVIEMARENQTTQKGQKNSRERMKRIEEGIKELGSQILKEHPVENTQLQNEKLYLYYLQNGRDMYVDQELDINRLSDYDVDHIVPQSFLKDDSIDNKVLTRSDKARGKSDNVPSEEVVKKMKNYWRQLLNAKLITQRKFDNLTKAERGGLSELDKAGFIKRQLVETRQITKHVAQILDSRMNTKYDENDKLIREVKVITLKSKLVSDFRKDFQFYKVREINNYHHAHDAYLNAVVGTALIKKYPKLESEFVYGDYKVYDVRKMIAKSEQEIGKATAKYFFYSNIMNFFKTEITLANGEIRKRPLIETNGETGEIVWDKGRDFATVRKVLSMPQVNIVKKTEVQTGGFSKESILPKRNSDKLIARKKDWDPKKYGGFDSPTVAYSVLVVAKVEKGKSKKLKSVKELLGITIMERSSFEKNPIDFLEAKGYKEVKKDLIIKLPKYSLFELENGRKRMLASAGELQKGNELALPSKYVNFLYLASHYEKLKGSPEDNEQKQLFVEQHKHYLDEIIEQISEFSKRVILADANLDKVLSAYNKHRDKPIREQAENIIHLFTLTNLGAPAAFKYFDTTIDRKRYTSTKEVLDATLIHQSITGLYETRIDLSQLGGDGGGGSEAAAKPAPGGLLGRDLLTKLKAQIQFSTEGPQVTWEDRPAMCLVLNLEEEYRLHEKPVPPSIDPSWLQLFPMVWAEKAGMGLANQVPPVVVELKSDASPVAVRQYPMSKEAREGIRPHIQRFLDLGILVPCQSPWNTPLLPVKKPGTNDYRPVQDLREVNKRVQDIHPTVPNPYNLLSSLPPSHTWYSVLDLKDAFFCLKLHPNSQPLFAFEWRDPEKGNTGQLTWTRLPQGFKNSPTLFNEALHRDLASFRALNPQVVMLQYVDDLLVAAPTYRDCKEGTRRLLQELSKLGYRVSAKKAQLCREEVTYLGYLLKGGKRWLTPARKATVMKIPTPTTPRQVREFLGTAGFCRLWIPGFASLAAPLYPLTRPKVPFTWTEAHQEAFGRIKEALLSAPALALPDLTKPFALYVDEKEGVARGVLTQTLGPWRRPVAYLSKKLDPVASGWPTCLKAIAAVALLLKDADKLTLGQNVLVIAPHNLESIVRQPPDRWMTNARMTHYQSLLLNERVSFAPPAILNPATLLPVESDDTPIHICSEILAEETGTRPDLRDQPLPGVPAWYTDGSSFIMDGRRQAGAAIVDNKRTVWASNLPEGTSAQKAELIALTQALRLAEGKSINIYTDSRYAFATAHVHGAIYKQRGWLTSAGKDIKNKEEILALLEAIHLPKRVAIIHCPGHQRGTDPVATGNRKADEAAKQAAQSTRILTETTKNAGKRTADGSEFEKRTADGSEFESPKKKAKVE

SEQ ID NO: 1655 - protein, 2125 aa, synthetic construct
  source 1..2125: note = Description of Artificial Sequence: Synthetic polypeptide
MPAAKRVKLDGGDKKYSIGLDIGTNSVGWAVITDEYKVPSKKFKVLGNTDRHSIKKNLIGALLFDSGETAEATRLKRTARRRYTRRKNRICYLQEIFSNEMAKVDDSFFHRLEESFLVEEDKKHERHPIFGNIVDEVAYHEKYPTIYHLRKKLVDSTDKADLRLIYLALAHMIKFRGHFLIEGDLNPDNSDVDKLFIQLVQTYNQLFEENPINASGVDAKAILSARLSKSRRLENLIAQLPGEKKNGLFGNLIALSLGLTPNFKSNFDLAEDAKLQLSKDTYDDDLDNLLAQIGDQYADLFLAAKNLSDAILLSDILRVNTEITKAPLSASMIKRYDEHHQDLTLLKALVRQQLPEKYKEIFFDQSKNGYAGYIDGGASQEEFYKFIKPILEKMDGTEELLVKLNREDLLRKQRTFDNGSIPHQIHLGELHAILRRQEDFYPFLKDNREKIEKILTFRIPYYVGPLARGNSRFAWMTRKSEETITPWNFEEVVDKGASAQSFIERMTNFDKNLPNEKVLPKHSLLYEYFTVYNELTKVKYVTEGMRKPAFLSGEQKKAIVDLLFKTNRKVTVKQLKEDYFKKIECFDSVEISGVEDRFNASLGTYHDLLKIIKDKDFLDNEENEDILEDIVLTLTLFEDREMIEERLKTYAHLFDDKVMKQLKRRRYTGWGRLSRKLINGIRDKQSGKTILDFLKSDGFANRNFMQLIHDDSLTFKEDIQKAQVSGQGDSLHEHIANLAGSPAIKKGILQTVKVVDELVKVMGRHKPENIVIEMARENQTTQKGQKNSRERMKRIEEGIKELGSQILKEHPVENTQLQNEKLYLYYLQNGRDMYVDQELDINRLSDYDVDHIVPQSFLKDDSIDNKVLTRSDKARGKSDNVPSEEVVKKMKNYWRQLLNAKLITQRKFDNLTKAERGGLSELDKAGFIKRQLVETRQITKHVAQILDSRMNTKYDENDKLIREVKVITLKSKLVSDFRKDFQFYKVREINNYHHAHDAYLNAVVGTALIKKYPKLESEFVYGDYKVYDVRKMIAKSEQEIGKATAKYFFYSNIMNFFKTEITLANGEIRKRPLIETNGETGEIVWDKGRDFATVRKVLSMPQVNIVKKTEVQTGGFSKESILPKRNSDKLIARKKDWDPKKYGGFDSPTVAYSVLVVAKVEKGKSKKLKSVKELLGITIMERSSFEKNPIDFLEAKGYKEVKKDLIIKLPKYSLFELENGRKRMLASAGELQKGNELALPSKYVNFLYLASHYEKLKGSPEDNEQKQLFVEQHKHYLDEIIEQISEFSKRVILADANLDKVLSAYNKHRDKPIREQAENIIHLFTLTNLGAPAAFKYFDTTIDRKRYTSTKEVLDATLIHQSITGLYETRIDLSQLGGDGGGGSGGSGGSGGLLGRDLLTKLKAQIQFSTEGPQVTWEDRPAMCLVLNLEEEYRLHEKPVPPSIDPSWLQLFPMVWAEKAGMGLANQVPPVVVELKSDASPVAVRQYPMSKEAREGIRPHIQRFLDLGILVPCQSPWNTPLLPVKKPGTNDYRPVQDLREVNKRVQDIHPTVPNPYNLLSSLPPSHTWYSVLDLKDAFFCLKLHPNSQPLFAFEWRDPEKGNTGQLTWTRLPQGFKNSPTLFNEALHRDLASFRALNPQVVMLQYVDDLLVAAPTYRDCKEGTRRLLQELSKLGYRVSAKKAQLCREEVTYLGYLLKGGKRWLTPARKATVMKIPTPTTPRQVREFLGTAGFCRLWIPGFASLAAPLYPLTRPKVPFTWTEAHQEAFGRIKEALLSAPALALPDLTKPFALYVDEKEGVARGVLTQTLGPWRRPVAYLSKKLDPVASGWPTCLKAIAAVALLLKDADKLTLGQNVLVIAPHNLESIVRQPPDRWMTNARMTHYQSLLLNERVSFAPPAILNPATLLPVESDDTPIHICSEILAEETGTRPDLRDQPLPGVPAWYTDGSSFIMDGRRQAGAAIVDNKRTVWASNLPEGTSAQKAELIALTQALRLAEGKSINIYTDSRYAFATAHVHGAIYKQRGWLTSAGKDIKNKEEILALLEAIHLPKRVAIIHCPGHQRGTDPVATGNRKADEAAKQAAQSTRILTETTKNAGKRTADGSEFEKRTADGSEFESPKKKAKVE

SEQ ID NO: 1656 - protein, 2127 aa, synthetic construct
  source 1..2127: note = Description of Artificial Sequence: Synthetic polypeptide
MPAAKRVKLDGGDKKYSIGLDIGTNSVGWAVITDEYKVPSKKFKVLGNTDRHSIKKNLIGALLFDSGETAEATRLKRTARRRYTRRKNRICYLQEIFSNEMAKVDDSFFHRLEESFLVEEDKKHERHPIFGNIVDEVAYHEKYPTIYHLRKKLVDSTDKADLRLIYLALAHMIKFRGHFLIEGDLNPDNSDVDKLFIQLVQTYNQLFEENPINASGVDAKAILSARLSKSRRLENLIAQLPGEKKNGLFGNLIALSLGLTPNFKSNFDLAEDAKLQLSKDTYDDDLDNLLAQIGDQYADLFLAAKNLSDAILLSDILRVNTEITKAPLSASMIKRYDEHHQDLTLLKALVRQQLPEKYKEIFFDQSKNGYAGYIDGGASQEEFYKFIKPILEKMDGTEELLVKLNREDLLRKQRTFDNGSIPHQIHLGELHAILRRQEDFYPFLKDNREKIEKILTFRIPYYVGPLARGNSRFAWMTRKSEETITPWNFEEVVDKGASAQSFIERMTNFDKNLPNEKVLPKHSLLYEYFTVYNELTKVKYVTEGMRKPAFLSGEQKKAIVDLLFKTNRKVTVKQLKEDYFKKIECFDSVEISGVEDRFNASLGTYHDLLKIIKDKDFLDNEENEDILEDIVLTLTLFEDREMIEERLKTYAHLFDDKVMKQLKRRRYTGWGRLSRKLINGIRDKQSGKTILDFLKSDGFANRNFMQLIHDDSLTFKEDIQKAQVSGQGDSLHEHIANLAGSPAIKKGILQTVKVVDELVKVMGRHKPENIVIEMARENQTTQKGQKNSRERMKRIEEGIKELGSQILKEHPVENTQLQNEKLYLYYLQNGRDMYVDQELDINRLSDYDVDHIVPQSFLKDDSIDNKVLTRSDKARGKSDNVPSEEVVKKMKNYWRQLLNAKLITQRKFDNLTKAERGGLSELDKAGFIKRQLVETRQITKHVAQILDSRMNTKYDENDKLIREVKVITLKSKLVSDFRKDFQFYKVREINNYHHAHDAYLNAVVGTALIKKYPKLESEFVYGDYKVYDVRKMIAKSEQEIGKATAKYFFYSNIMNFFKTEITLANGEIRKRPLIETNGETGEIVWDKGRDFATVRKVLSMPQVNIVKKTEVQTGGFSKESILPKRNSDKLIARKKDWDPKKYGGFDSPTVAYSVLVVAKVEKGKSKKLKSVKELLGITIMERSSFEKNPIDFLEAKGYKEVKKDLIIKLPKYSLFELENGRKRMLASAGELQKGNELALPSKYVNFLYLASHYEKLKGSPEDNEQKQLFVEQHKHYLDEIIEQISEFSKRVILADANLDKVLSAYNKHRDKPIREQAENIIHLFTLTNLGAPAAFKYFDTTIDRKRYTSTKEVLDATLIHQSITGLYETRIDLSQLGGDGGPAPEAAAKGSSGGLLGRDLLTKLKAQIQFSTEGPQVTWEDRPAMCLVLNLEEEYRLHEKPVPPSIDPSWLQLFPMVWAEKAGMGLANQVPPVVVELKSDASPVAVRQYPMSKEAREGIRPHIQRFLDLGILVPCQSPWNTPLLPVKKPGTNDYRPVQDLREVNKRVQDIHPTVPNPYNLLSSLPPSHTWYSVLDLKDAFFCLKLHPNSQPLFAFEWRDPEKGNTGQLTWTRLPQGFKNSPTLFNEALHRDLASFRALNPQVVMLQYVDDLLVAAPTYRDCKEGTRRLLQELSKLGYRVSAKKAQLCREEVTYLGYLLKGGKRWLTPARKATVMKIPTPTTPRQVREFLGTAGFCRLWIPGFASLAAPLYPLTRPKVPFTWTEAHQEAFGRIKEALLSAPALALPDLTKPFALYVDEKEGVARGVLTQTLGPWRRPVAYLSKKLDPVASGWPTCLKAIAAVALLLKDADKLTLGQNVLVIAPHNLESIVRQPPDRWMTNARMTHYQSLLLNERVSFAPPAILNPATLLPVESDDTPIHICSEILAEETGTRPDLRDQPLPGVPAWYTDGSSFIMDGRRQAGAAIVDNKRTVWASNLPEGTSAQKAELIALTQALRLAEGKSINIYTDSRYAFATAHVHGAIYKQRGWLTSAGKDIKNKEEILALLEAIHLPKRVAIIHCPGHQRGTDPVATGNRKADEAAKQAAQSTRILTETTKNAGKRTADGSEFEKRTADGSEFESPKKKAKVE

SEQ ID NO: 1657 - protein, 2122 aa, synthetic construct
  source 1..2122: note = Description of Artificial Sequence: Synthetic polypeptide
MPAAKRVKLDGGDKKYSIGLDIGTNSVGWAVITDEYKVPSKKFKVLGNTDRHSIKKNLIGALLFDSGETAEATRLKRTARRRYTRRKNRICYLQEIFSNEMAKVDDSFFHRLEESFLVEEDKKHERHPIFGNIVDEVAYHEKYPTIYHLRKKLVDSTDKADLRLIYLALAHMIKFRGHFLIEGDLNPDNSDVDKLFIQLVQTYNQLFEENPINASGVDAKAILSARLSKSRRLENLIAQLPGEKKNGLFGNLIALSLGLTPNFKSNFDLAEDAKLQLSKDTYDDDLDNLLAQIGDQYADLFLAAKNLSDAILLSDILRVNTEITKAPLSASMIKRYDEHHQDLTLLKALVRQQLPEKYKEIFFDQSKNGYAGYIDGGASQEEFYKFIKPILEKMDGTEELLVKLNREDLLRKQRTFDNGSIPHQIHLGELHAILRRQEDFYPFLKDNREKIEKILTFRIPYYVGPLARGNSRFAWMTRKSEETITPWNFEEVVDKGASAQSFIERMTNFDKNLPNEKVLPKHSLLYEYFTVYNELTKVKYVTEGMRKPAFLSGEQKKAIVDLLFKTNRKVTVKQLKEDYFKKIECFDSVEISGVEDRFNASLGTYHDLLKIIKDKDFLDNEENEDILEDIVLTLTLFEDREMIEERLKTYAHLFDDKVMKQLKRRRYTGWGRLSRKLINGIRDKQSGKTILDFLKSDGFANRNFMQLIHDDSLTFKEDIQKAQVSGQGDSLHEHIANLAGSPAIKKGILQTVKVVDELVKVMGRHKPENIVIEMARENQTTQKGQKNSRERMKRIEEGIKELGSQILKEHPVENTQLQNEKLYLYYLQNGRDMYVDQELDINRLSDYDVDHIVPQSFLKDDSIDNKVLTRSDKARGKSDNVPSEEVVKKMKNYWRQLLNAKLITQRKFDNLTKAERGGLSELDKAGFIKRQLVETRQITKHVAQILDSRMNTKYDENDKLIREVKVITLKSKLVSDFRKDFQFYKVREINNYHHAHDAYLNAVVGTALIKKYPKLESEFVYGDYKVYDVRKMIAKSEQEIGKATAKYFFYSNIMNFFKTEITLANGEIRKRPLIETNGETGEIVWDKGRDFATVRKVLSMPQVNIVKKTEVQTGGFSKESILPKRNSDKLIARKKDWDPKKYGGFDSPTVAYSVLVVAKVEKGKSKKLKSVKELLGITIMERSSFEKNPIDFLEAKGYKEVKKDLIIKLPKYSLFELENGRKRMLASAGELQKGNELALPSKYVNFLYLASHYEKLKGSPEDNEQKQLFVEQHKHYLDEIIEQISEFSKRVILADANLDKVLSAYNKHRDKPIREQAENIIHLFTLTNLGAPAAFKYFDTTIDRKRYTSTKEVLDATLIHQSITGLYETRIDLSQLGGDGGGGGGSSGGLLGRDLLTKLKAQIQFSTEGPQVTWEDRPAMCLVLNLEEEYRLHEKPVPPSIDPSWLQLFPMVWAEKAGMGLANQVPPVVVELKSDASPVAVRQYPMSKEAREGIRPHIQRFLDLGILVPCQSPWNTPLLPVKKPGTNDYRPVQDLREVNKRVQDIHPTVPNPYNLLSSLPPSHTWYSVLDLKDAFFCLKLHPNSQPLFAFEWRDPEKGNTGQLTWTRLPQGFKNSPTLFNEALHRDLASFRALNPQVVMLQYVDDLLVAAPTYRDCKEGTRRLLQELSKLGYRVSAKKAQLCREEVTYLGYLLKGGKRWLTPARKATVMKIPTPTTPRQVREFLGTAGFCRLWIPGFASLAAPLYPLTRPKVPFTWTEAHQEAFGRIKEALLSAPALALPDLTKPFALYVDEKEGVARGVLTQTLGPWRRPVAYLSKKLDPVASGWPTCLKAIAAVALLLKDADKLTLGQNVLVIAPHNLESIVRQPPDRWMTNARMTHYQSLLLNERVSFAPPAILNPATLLPVESDDTPIHICSEILAEETGTRPDLRDQPLPGVPAWYTDGSSFIMDGRRQAGAAIVDNKRTVWASNLPEGTSAQKAELIALTQALRLAEGKSINIYTDSRYAFATAHVHGAIYKQRGWLTSAGKDIKNKEEILALLEAIHLPKRVAIIHCPGHQRGTDPVATGNRKADEAAKQAAQSTRILTETTKNAGKRTADGSEFEKRTADGSEFESPKKKAKVE

SEQ ID NO: 1658 - protein, 2125 aa, synthetic construct
  source 1..2125: note = Description of Artificial Sequence: Synthetic polypeptide
MPAAKRVKLDGGDKKYSIGLDIGTNSVGWAVITDEYKVPSKKFKVLGNTDRHSIKKNLIGALLFDSGETAEATRLKRTARRRYTRRKNRICYLQEIFSNEMAKVDDSFFHRLEESFLVEEDKKHERHPIFGNIVDEVAYHEKYPTIYHLRKKLVDSTDKADLRLIYLALAHMIKFRGHFLIEGDLNPDNSDVDKLFIQLVQTYNQLFEENPINASGVDAKAILSARLSKSRRLENLIAQLPGEKKNGLFGNLIALSLGLTPNFKSNFDLAEDAKLQLSKDTYDDDLDNLLAQIGDQYADLFLAAKNLSDAILLSDILRVNTEITKAPLSASMIKRYDEHHQDLTLLKALVRQQLPEKYKEIFFDQSKNGYAGYIDGGASQEEFYKFIKPILEKMDGTEELLVKLNREDLLRKQRTFDNGSIPHQIHLGELHAILRRQEDFYPFLKDNREKIEKILTFRIPYYVGPLARGNSRFAWMTRKSEETITPWNFEEVVDKGASAQSFIERMTNFDKNLPNEKVLPKHSLLYEYFTVYNELTKVKYVTEGMRKPAFLSGEQKKAIVDLLFKTNRKVTVKQLKEDYFKKIECFDSVEISGVEDRFNASLGTYHDLLKIIKDKDFLDNEENEDILEDIVLTLTLFEDREMIEERLKTYAHLFDDKVMKQLKRRRYTGWGRLSRKLINGIRDKQSGKTILDFLKSDGFANRNFMQLIHDDSLTFKEDIQKAQVSGQGDSLHEHIANLAGSPAIKKGILQTVKVVDELVKVMGRHKPENIVIEMARENQTTQKGQKNSRERMKRIEEGIKELGSQILKEHPVENTQLQNEKLYLYYLQNGRDMYVDQELDINRLSDYDVDHIVPQSFLKDDSIDNKVLTRSDKARGKSDNVPSEEVVKKMKNYWRQLLNAKLITQRKFDNLTKAERGGLSELDKAGFIKRQLVETRQITKHVAQILDSRMNTKYDENDKLIREVKVITLKSKLVSDFRKDFQFYKVREINNYHHAHDAYLNAVVGTALIKKYPKLESEFVYGDYKVYDVRKMIAKSEQEIGKATAKYFFYSNIMNFFKTEITLANGEIRKRPLIETNGETGEIVWDKGRDFATVRKVLSMPQVNIVKKTEVQTGGFSKESILPKRNSDKLIARKKDWDPKKYGGFDSPTVAYSVLVVAKVEKGKSKKLKSVKELLGITIMERSSFEKNPIDFLEAKGYKEVKKDLIIKLPKYSLFELENGRKRMLASAGELQKGNELALPSKYVNFLYLASHYEKLKGSPEDNEQKQLFVEQHKHYLDEIIEQISEFSKRVILADANLDKVLSAYNKHRDKPIREQAENIIHLFTLTNLGAPAAFKYFDTTIDRKRYTSTKEVLDATLIHQSITGLYETRIDLSQLGGDGGPAPGGSGSSGGLLGRDLLTKLKAQIQFSTEGPQVTWEDRPAMCLVLNLEEEYRLHEKPVPPSIDPSWLQLFPMVWAEKAGMGLANQVPPVVVELKSDASPVAVRQYPMSKEAREGIRPHIQRFLDLGILVPCQSPWNTPLLPVKKPGTNDYRPVQDLREVNKRVQDIHPTVPNPYNLLSSLPPSHTWYSVLDLKDAFFCLKLHPNSQPLFAFEWRDPEKGNTGQLTWTRLPQGFKNSPTLFNEALHRDLASFRALNPQVVMLQYVDDLLVAAPTYRDCKEGTRRLLQELSKLGYRVSAKKAQLCREEVTYLGYLLKGGKRWLTPARKATVMKIPTPTTPRQVREFLGTAGFCRLWIPGFASLAAPLYPLTRPKVPFTWTEAHQEAFGRIKEALLSAPALALPDLTKPFALYVDEKEGVARGVLTQTLGPWRRPVAYLSKKLDPVASGWPTCLKAIAAVALLLKDADKLTLGQNVLVIAPHNLESIVRQPPDRWMTNARMTHYQSLLLNERVSFAPPAILNPATLLPVESDDTPIHICSEILAEETGTRPDLRDQPLPGVPAWYTDGSSFIMDGRRQAGAAIVDNKRTVWASNLPEGTSAQKAELIALTQALRLAEGKSINIYTDSRYAFATAHVHGAIYKQRGWLTSAGKDIKNKEEILALLEAIHLPKRVAIIHCPGHQRGTDPVATGNRKADEAAKQAAQSTRILTETTKNAGKRTADGSEFEKRTADGSEFESPKKKAKVE

SEQ ID NO: 1659 - protein, 2127 aa, synthetic construct
  source 1..2127: note = Description of Artificial Sequence: Synthetic polypeptide
MPAAKRVKLDGGDKKYSIGLDIGTNSVGWAVITDEYKVPSKKFKVLGNTDRHSIKKNLIGALLFDSGETAEATRLKRTARRRYTRRKNRICYLQEIFSNEMAKVDDSFFHRLEESFLVEEDKKHERHPIFGNIVDEVAYHEKYPTIYHLRKKLVDSTDKADLRLIYLALAHMIKFRGHFLIEGDLNPDNSDVDKLFIQLVQTYNQLFEENPINASGVDAKAILSARLSKSRRLENLIAQLPGEKKNGLFGNLIALSLGLTPNFKSNFDLAEDAKLQLSKDTYDDDLDNLLAQIGDQYADLFLAAKNLSDAILLSDILRVNTEITKAPLSASMIKRYDEHHQDLTLLKALVRQQLPEKYKEIFFDQSKNGYAGYIDGGASQEEFYKFIKPILEKMDGTEELLVKLNREDLLRKQRTFDNGSIPHQIHLGELHAILRRQEDFYPFLKDNREKIEKILTFRIPYYVGPLARGNSRFAWMTRKSEETITPWNFEEVVDKGASAQSFIERMTNFDKNLPNEKVLPKHSLLYEYFTVYNELTKVKYVTEGMRKPAFLSGEQKKAIVDLLFKTNRKVTVKQLKEDYFKKIECFDSVEISGVEDRFNASLGTYHDLLKIIKDKDFLDNEENEDILEDIVLTLTLFEDREMIEERLKTYAHLFDDKVMKQLKRRRYTGWGRLSRKLINGIRDKQSGKTILDFLKSDGFANRNFMQLIHDDSLTFKEDIQKAQVSGQGDSLHEHIANLAGSPAIKKGILQTVKVVDELVKVMGRHKPENIVIEMARENQTTQKGQKNSRERMKRIEEGIKELGSQILKEHPVENTQLQNEKLYLYYLQNGRDMYVDQELDINRLSDYDVDHIVPQSFLKDDSIDNKVLTRSDKARGKSDNVPSEEVVKKMKNYWRQLLNAKLITQRKFDNLTKAERGGLSELDKAGFIKRQLVETRQITKHVAQILDSRMNTKYDENDKLIREVKVITLKSKLVSDFRKDFQFYKVREINNYHHAHDAYLNAVVGTALIKKYPKLESEFVYGDYKVYDVRKMIAKSEQEIGKATAKYFFYSNIMNFFKTEITLANGEIRKRPLIETNGETGEIVWDKGRDFATVRKVLSMPQVNIVKKTEVQTGGFSKESILPKRNSDKLIARKKDWDPKKYGGFDSPTVAYSVLVVAKVEKGKSKKLKSVKELLGITIMERSSFEKNPIDFLEAKGYKEVKKDLIIKLPKYSLFELENGRKRMLASAGELQKGNELALPSKYVNFLYLASHYEKLKGSPEDNEQKQLFVEQHKHYLDEIIEQISEFSKRVILADANLDKVLSAYNKHRDKPIREQAENIIHLFTLTNLGAPAAFKYFDTTIDRKRYTSTKEVLDATLIHQSITGLYETRIDLSQLGGDGGGGSGGGEAAAKGGLLGRDLLTKLKAQIQFSTEGPQVTWEDRPAMCLVLNLEEEYRLHEKPVPPSIDPSWLQLFPMVWAEKAGMGLANQVPPVVVELKSDASPVAVRQYPMSKEAREGIRPHIQRFLDLGILVPCQSPWNTPLLPVKKPGTNDYRPVQDLREVNKRVQDIHPTVPNPYNLLSSLPPSHTWYSVLDLKDAFFCLKLHPNSQPLFAFEWRDPEKGNTGQLTWTRLPQGFKNSPTLFNEALHRDLASFRALNPQVVMLQYVDDLLVAAPTYRDCKEGTRRLLQELSKLGYRVSAKKAQLCREEVTYLGYLLKGGKRWLTPARKATVMKIPTPTTPRQVREFLGTAGFCRLWIPGFASLAAPLYPLTRPKVPFTWTEAHQEAFGRIKEALLSAPALALPDLTKPFALYVDEKEGVARGVLTQTLGPWRRPVAYLSKKLDPVASGWPTCLKAIAAVALLLKDADKLTLGQNVLVIAPHNLESIVRQPPDRWMTNARMTHYQSLLLNERVSFAPPAILNPATLLPVESDDTPIHICSEILAEETGTRPDLRDQPLPGVPAWYTDGSSFIMDGRRQAGAAIVDNKRTVWASNLPEGTSAQKAELIALTQALRLAEGKSINIYTDSRYAFATAHVHGAIYKQRGWLTSAGKDIKNKEEILALLEAIHLPKRVAIIHCPGHQRGTDPVATGNRKADEAAKQAAQSTRILTETTKNAGKRTADGSEFEKRTADGSEFESPKKKAKVE

SEQ ID NO: 1660 - protein, 2132 aa, synthetic construct
  source 1..2132: note = Description of Artificial Sequence: Synthetic polypeptide
MPAAKRVKLDGGDKKYSIGLDIGTNSVGWAVITDEYKVPSKKFKVLGNTDRHSIKKNLIGALLFDSGETAEATRLKRTARRRYTRRKNRICYLQEIFSNEMAKVDDSFFHRLEESFLVEEDKKHERHPIFGNIVDEVAYHEKYPTIYHLRKKLVDSTDKADLRLIYLALAHMIKFRGHFLIEGDLNPDNSDVDKLFIQLVQTYNQLFEENPINASGVDAKAILSARLSKSRRLENLIAQLPGEKKNGLFGNLIALSLGLTPNFKSNFDLAEDAKLQLSKDTYDDDLDNLLAQIGDQYADLFLAAKNLSDAILLSDILRVNTEITKAPLSASMIKRYDEHHQDLTLLKALVRQQLPEKYKEIFFDQSKNGYAGYIDGGASQEEFYKFIKPILEKMDGTEELLVKLNREDLLRKQRTFDNGSIPHQIHLGELHAILRRQEDFYPFLKDNREKIEKILTFRIPYYVGPLARGNSRFAWMTRKSEETITPWNFEEVVDKGASAQSFIERMTNFDKNLPNEKVLPKHSLLYEYFTVYNELTKVKYVTEGMRKPAFLSGEQKKAIVDLLFKTNRKVTVKQLKEDYFKKIECFDSVEISGVEDRFNASLGTYHDLLKIIKDKDFLDNEENEDILEDIVLTLTLFEDREMIEERLKTYAHLFDDKVMKQLKRRRYTGWGRLSRKLINGIRDKQSGKTILDFLKSDGFANRNFMQLIHDDSLTFKEDIQKAQVSGQGDSLHEHIANLAGSPAIKKGILQTVKVVDELVKVMGRHKPENIVIEMARENQTTQKGQKNSRERMKRIEEGIKELGSQILKEHPVENTQLQNEKLYLYYLQNGRDMYVDQELDINRLSDYDVDHIVPQSFLKDDSIDNKVLTRSDKARGKSDNVPSEEVVKKMKNYWRQLLNAKLITQRKFDNLTKAERGGLSELDKAGFIKRQLVETRQITKHVAQILDSRMNTKYDENDKLIREVKVITLKSKLVSDFRKDFQFYKVREINNYHHAHDAYLNAVVGTALIKKYPKLESEFVYGDYKVYDVRKMIAKSEQEIGKATAKYFFYSNIMNFFKTEITLANGEIRKRPLIETNGETGEIVWDKGRDFATVRKVLSMPQVNIVKKTEVQTGGFSKESILPKRNSDKLIARKKDWDPKKYGGFDSPTVAYSVLVVAKVEKGKSKKLKSVKELLGITIMERSSFEKNPIDFLEAKGYKEVKKDLIIKLPKYSLFELENGRKRMLASAGELQKGNELALPSKYVNFLYLASHYEKLKGSPEDNEQKQLFVEQHKHYLDEIIEQISEFSKRVILADANLDKVLSAYNKHRDKPIREQAENIIHLFTLTNLGAPAAFKYFDTTIDRKRYTSTKEVLDATLIHQSITGLYETRIDLSQLGGDGGSGSETPGTSESATPESGGLLGRDLLTKLKAQIQFSTEGPQVTWEDRPAMCLVLNLEEEYRLHEKPVPPSIDPSWLQLFPMVWAEKAGMGLANQVPPVVVELKSDASPVAVRQYPMSKEAREGIRPHIQRFLDLGILVPCQSPWNTPLLPVKKPGTNDYRPVQDLREVNKRVQDIHPTVPNPYNLLSSLPPSHTWYSVLDLKDAFFCLKLHPNSQPLFAFEWRDPEKGNTGQLTWTRLPQGFKNSPTLFNEALHRDLASFRALNPQVVMLQYVDDLLVAAPTYRDCKEGTRRLLQELSKLGYRVSAKKAQLCREEVTYLGYLLKGGKRWLTPARKATVMKIPTPTTPRQVREFLGTAGFCRLWIPGFASLAAPLYPLTRPKVPFTWTEAHQEAFGRIKEALLSAPALALPDLTKPFALYVDEKEGVARGVLTQTLGPWRRPVAYLSKKLDPVASGWPTCLKAIAAVALLLKDADKLTLGQNVLVIAPHNLESIVRQPPDRWMTNARMTHYQSLLLNERVSFAPPAILNPATLLPVESDDTPIHICSEILAEETGTRPDLRDQPLPGVPAWYTDGSSFIMDGRRQAGAAIVDNKRTVWASNLPEGTSAQKAELIALTQALRLAEGKSINIYTDSRYAFATAHVHGAIYKQRGWLTSAGKDIKNKEEILALLEAIHLPKRVAIIHCPGHQRGTDPVATGNRKADEAAKQAAQSTRILTETTKNAGKRTADGSEFEKRTADGSEFESPKKKAKVE

SEQ ID NO: 1661 - protein, 2125 aa, synthetic construct
  source 1..2125: note = Description of Artificial Sequence: Synthetic polypeptide
MPAAKRVKLDGGDKKYSIGLDIGTNSVGWAVITDEYKVPSKKFKVLGNTDRHSIKKNLIGALLFDSGETAEATRLKRTARRRYTRRKNRICYLQEIFSNEMAKVDDSFFHRLEESFLVEEDKKHERHPIFGNIVDEVAYHEKYPTIYHLRKKLVDSTDKADLRLIYLALAHMIKFRGHFLIEGDLNPDNSDVDKLFIQLVQTYNQLFEENPINASGVDAKAILSARLSKSRRLENLIAQLPGEKKNGLFGNLIALSLGLTPNFKSNFDLAEDAKLQLSKDTYDDDLDNLLAQIGDQYADLFLAAKNLSDAILLSDILRVNTEITKAPLSASMIKRYDEHHQDLTLLKALVRQQLPEKYKEIFFDQSKNGYAGYIDGGASQEEFYKFIKPILEKMDGTEELLVKLNREDLLRKQRTFDNGSIPHQIHLGELHAILRRQEDFYPFLKDNREKIEKILTFRIPYYVGPLARGNSRFAWMTRKSEETITPWNFEEVVDKGASAQSFIERMTNFDKNLPNEKVLPKHSLLYEYFTVYNELTKVKYVTEGMRKPAFLSGEQKKAIVDLLFKTNRKVTVKQLKEDYFKKIECFDSVEISGVEDRFNASLGTYHDLLKIIKDKDFLDNEENEDILEDIVLTLTLFEDREMIEERLKTYAHLFDDKVMKQLKRRRYTGWGRLSRKLINGIRDKQSGKTILDFLKSDGFANRNFMQLIHDDSLTFKEDIQKAQVSGQGDSLHEHIANLAGSPAIKKGILQTVKVVDELVKVMGRHKPENIVIEMARENQTTQKGQKNSRERMKRIEEGIKELGSQILKEHPVENTQLQNEKLYLYYLQNGRDMYVDQELDINRLSDYDVDHIVPQSFLKDDSIDNKVLTRSDKARGKSDNVPSEEVVKKMKNYWRQLLNAKLITQRKFDNLTKAERGGLSELDKAGFIKRQLVETRQITKHVAQILDSRMNTKYDENDKLIREVKVITLKSKLVSDFRKDFQFYKVREINNYHHAHDAYLNAVVGTALIKKYPKLESEFVYGDYKVYDVRKMIAKSEQEIGKATAKYFFYSNIMNFFKTEITLANGEIRKRPLIETNGETGEIVWDKGRDFATVRKVLSMPQVNIVKKTEVQTGGFSKESILPKRNSDKLIARKKDWDPKKYGGFDSPTVAYSVLVVAKVEKGKSKKLKSVKELLGITIMERSSFEKNPIDFLEAKGYKEVKKDLIIKLPKYSLFELENGRKRMLASAGELQKGNELALPSKYVNFLYLASHYEKLKGSPEDNEQKQLFVEQHKHYLDEIIEQISEFSKRVILADANLDKVLSAYNKHRDKPIREQAENIIHLFTLTNLGAPAAFKYFDTTIDRKRYTSTKEVLDATLIHQSITGLYETRIDLSQLGGDGGGSSGGSPAPGGLLGRDLLTKLKAQIQFSTEGPQVTWEDRPAMCLVLNLEEEYRLHEKPVPPSIDPSWLQLFPMVWAEKAGMGLANQVPPVVVELKSDASPVAVRQYPMSKEAREGIRPHIQRFLDLGILVPCQSPWNTPLLPVKKPGTNDYRPVQDLREVNKRVQDIHPTVPNPYNLLSSLPPSHTWYSVLDLKDAFFCLKLHPNSQPLFAFEWRDPEKGNTGQLTWTRLPQGFKNSPTLFNEALHRDLASFRALNPQVVMLQYVDDLLVAAPTYRDCKEGTRRLLQELSKLGYRVSAKKAQLCREEVTYLGYLLKGGKRWLTPARKATVMKIPTPTTPRQVREFLGTAGFCRLWIPGFASLAAPLYPLTRPKVPFTWTEAHQEAFGRIKEALLSAPALALPDLTKPFALYVDEKEGVARGVLTQTLGPWRRPVAYLSKKLDPVASGWPTCLKAIAAVALLLKDADKLTLGQNVLVIAPHNLESIVRQPPDRWMTNARMTHYQSLLLNERVSFAPPAILNPATLLPVESDDTPIHICSEILAEETGTRPDLRDQPLPGVPAWYTDGSSFIMDGRRQAGAAIVDNKRTVWASNLPEGTSAQKAELIALTQALRLAEGKSINIYTDSRYAFATAHVHGAIYKQRGWLTSAGKDIKNKEEILALLEAIHLPKRVAIIHCPGHQRGTDPVATGNRKADEAAKQAAQSTRILTETTKNAGKRTADGSEFEKRTADGSEFESPKKKAKVE

SEQ ID NO: 1662 - protein, 2146 aa, synthetic construct
  source 1..2146: note = Description of Artificial Sequence: Synthetic polypeptide
MPAAKRVKLDGGDKKYSIGLDIGTNSVGWAVITDEYKVPSKKFKVLGNTDRHSIKKNLIGALLFDSGETAEATRLKRTARRRYTRRKNRICYLQEIFSNEMAKVDDSFFHRLEESFLVEEDKKHERHPIFGNIVDEVAYHEKYPTIYHLRKKLVDSTDKADLRLIYLALAHMIKFRGHFLIEGDLNPDNSDVDKLFIQLVQTYNQLFEENPINASGVDAKAILSARLSKSRRLENLIAQLPGEKKNGLFGNLIALSLGLTPNFKSNFDLAEDAKLQLSKDTYDDDLDNLLAQIGDQYADLFLAAKNLSDAILLSDILRVNTEITKAPLSASMIKRYDEHHQDLTLLKALVRQQLPEKYKEIFFDQSKNGYAGYIDGGASQEEFYKFIKPILEKMDGTEELLVKLNREDLLRKQRTFDNGSIPHQIHLGELHAILRRQEDFYPFLKDNREKIEKILTFRIPYYVGPLARGNSRFAWMTRKSEETITPWNFEEVVDKGASAQSFIERMTNFDKNLPNEKVLPKHSLLYEYFTVYNELTKVKYVTEGMRKPAFLSGEQKKAIVDLLFKTNRKVTVKQLKEDYFKKIECFDSVEISGVEDRFNASLGTYHDLLKIIKDKDFLDNEENEDILEDIVLTLTLFEDREMIEERLKTYAHLFDDKVMKQLKRRRYTGWGRLSRKLINGIRDKQSGKTILDFLKSDGFANRNFMQLIHDDSLTFKEDIQKAQVSGQGDSLHEHIANLAGSPAIKKGILQTVKVVDELVKVMGRHKPENIVIEMARENQTTQKGQKNSRERMKRIEEGIKELGSQILKEHPVENTQLQNEKLYLYYLQNGRDMYVDQELDINRLSDYDVDHIVPQSFLKDDSIDNKVLTRSDKARGKSDNVPSEEVVKKMKNYWRQLLNAKLITQRKFDNLTKAERGGLSELDKAGFIKRQLVETRQITKHVAQILDSRMNTKYDENDKLIREVKVITLKSKLVSDFRKDFQFYKVREINNYHHAHDAYLNAVVGTALIKKYPKLESEFVYGDYKVYDVRKMIAKSEQEIGKATAKYFFYSNIMNFFKTEITLANGEIRKRPLIETNGETGEIVWDKGRDFATVRKVLSMPQVNIVKKTEVQTGGFSKESILPKRNSDKLIARKKDWDPKKYGGFDSPTVAYSVLVVAKVEKGKSKKLKSVKELLGITIMERSSFEKNPIDFLEAKGYKEVKKDLIIKLPKYSLFELENGRKRMLASAGELQKGNELALPSKYVNFLYLASHYEKLKGSPEDNEQKQLFVEQHKHYLDEIIEQISEFSKRVILADANLDKVLSAYNKHRDKPIREQAENIIHLFTLTNLGAPAAFKYFDTTIDRKRYTSTKEVLDATLIHQSITGLYETRIDLSQLGGDGGGGGGSGGGGSGGGGSGGGGSGGGGSGGGGSGGLLGRDLLTKLKAQIQFSTEGPQVTWEDRPAMCLVLNLEEEYRLHEKPVPPSIDPSWLQLFPMVWAEKAGMGLANQVPPVVVELKSDASPVAVRQYPMSKEAREGIRPHIQRFLDLGILVPCQSPWNTPLLPVKKPGTNDYRPVQDLREVNKRVQDIHPTVPNPYNLLSSLPPSHTWYSVLDLKDAFFCLKLHPNSQPLFAFEWRDPEKGNTGQLTWTRLPQGFKNSPTLFNEALHRDLASFRALNPQVVMLQYVDDLLVAAPTYRDCKEGTRRLLQELSKLGYRVSAKKAQLCREEVTYLGYLLKGGKRWLTPARKATVMKIPTPTTPRQVREFLGKAGFCRLFIPGFASLAAPLYPLTRPKVPFTWTEAHQEAFGRIKEALLSAPALALPDLTKPFALYVDEKEGVARGVLTQTLGPWRRPVAYLSKKLDPVASGWPTCLKAIAAVALLLKDADKLTLGQNVLVIAPHNLESIVRQPPDRWMTNARMTHYQSLLLNERVSFAPPAILNPATLLPVESDDTPIHICSEILAEETGTRPDLRDQPLPGVPAWYTDGSSFIMDGRRQAGAAIVDNKRTVWASNLPEGTSAQKAELIALTQALRLAEGKSINIYTDSRYAFATAHVHGAIYKQRGWLTSAGKDIKNKEEILALLEAIHLPKRVAIIHCPGHQRGTDPVATGNRKADEAAKQAAQSTRILTETTKNAGKRTADGSEFEKRTADGSEFESPKKKAKVE

SEQ ID NO: 1663 - protein, 2127 aa, synthetic construct
  source 1..2127: note = Description of Artificial Sequence: Synthetic polypeptide
MPAAKRVKLDGGDKKYSIGLDIGTNSVGWAVITDEYKVPSKKFKVLGNTDRHSIKKNLIGALLFDSGETAEATRLKRTARRRYTRRKNRICYLQEIFSNEMAKVDDSFFHRLEESFLVEEDKKHERHPIFGNIVDEVAYHEKYPTIYHLRKKLVDSTDKADLRLIYLALAHMIKFRGHFLIEGDLNPDNSDVDKLFIQLVQTYNQLFEENPINASGVDAKAILSARLSKSRRLENLIAQLPGEKKNGLFGNLIALSLGLTPNFKSNFDLAEDAKLQLSKDTYDDDLDNLLAQIGDQYADLFLAAKNLSDAILLSDILRVNTEITKAPLSASMIKRYDEHHQDLTLLKALVRQQLPEKYKEIFFDQSKNGYAGYIDGGASQEEFYKFIKPILEKMDGTEELLVKLNREDLLRKQRTFDNGSIPHQIHLGELHAILRRQEDFYPFLKDNREKIEKILTFRIPYYVGPLARGNSRFAWMTRKSEETITPWNFEEVVDKGASAQSFIERMTNFDKNLPNEKVLPKHSLLYEYFTVYNELTKVKYVTEGMRKPAFLSGEQKKAIVDLLFKTNRKVTVKQLKEDYFKKIECFDSVEISGVEDRFNASLGTYHDLLKIIKDKDFLDNEENEDILEDIVLTLTLFEDREMIEERLKTYAHLFDDKVMKQLKRRRYTGWGRLSRKLINGIRDKQSGKTILDFLKSDGFANRNFMQLIHDDSLTFKEDIQKAQVSGQGDSLHEHIANLAGSPAIKKGILQTVKVVDELVKVMGRHKPENIVIEMARENQTTQKGQKNSRERMKRIEEGIKELGSQILKEHPVENTQLQNEKLYLYYLQNGRDMYVDQELDINRLSDYDVDHIVPQSFLKDDSIDNKVLTRSDKARGKSDNVPSEEVVKKMKNYWRQLLNAKLITQRKFDNLTKAERGGLSELDKAGFIKRQLVETRQITKHVAQILDSRMNTKYDENDKLIREVKVITLKSKLVSDFRKDFQFYKVREINNYHHAHDAYLNAVVGTALIKKYPKLESEFVYGDYKVYDVRKMIAKSEQEIGKATAKYFFYSNIMNFFKTEITLANGEIRKRPLIETNGETGEIVWDKGRDFATVRKVLSMPQVNIVKKTEVQTGGFSKESILPKRNSDKLIARKKDWDPKKYGGFDSPTVAYSVLVVAKVEKGKSKKLKSVKELLGITIMERSSFEKNPIDFLEAKGYKEVKKDLIIKLPKYSLFELENGRKRMLASAGELQKGNELALPSKYVNFLYLASHYEKLKGSPEDNEQKQLFVEQHKHYLDEIIEQISEFSKRVILADANLDKVLSAYNKHRDKPIREQAENIIHLFTLTNLGAPAAFKYFDTTIDRKRYTSTKEVLDATLIHQSITGLYETRIDLSQLGGDGGPAPEAAAKGGGGGLLGRDLLTKLKAQIQFSTEGPQVTWEDRPAMCLVLNLEEEYRLHEKPVPPSIDPSWLQLFPMVWAEKAGMGLANQVPPVVVELKSDASPVAVRQYPMSKEAREGIRPHIQRFLDLGILVPCQSPWNTPLLPVKKPGTNDYRPVQDLREVNKRVQDIHPTVPNPYNLLSSLPPSHTWYSVLDLKDAFFCLKLHPNSQPLFAFEWRDPEKGNTGQLTWTRLPQGFKNSPTLFNEALHRDLASFRALNPQVVMLQYVDDLLVAAPTYRDCKEGTRRLLQELSKLGYRVSAKKAQLCREEVTYLGYLLKGGKRWLTPARKATVMKIPTPTTPRQVREFLGKAGFCRLFIPGFASLAAPLYPLTRPKVPFTWTEAHQEAFGRIKEALLSAPALALPDLTKPFALYVDEKEGVARGVLTQTLGPWRRPVAYLSKKLDPVASGWPTCLKAIAAVALLLKDADKLTLGQNVLVIAPHNLESIVRQPPDRWMTNARMTHYQSLLLNERVSFAPPAILNPATLLPVESDDTPIHICSEILAEETGTRPDLRDQPLPGVPAWYTDGSSFIMDGRRQAGAAIVDNKRTVWASNLPEGTSAQKAELIALTQALRLAEGKSINIYTDSRYAFATAHVHGAIYKQRGWLTSAGKDIKNKEEILALLEAIHLPKRVAIIHCPGHQRGTDPVATGNRKADEAAKQAAQSTRILTETTKNAGKRTADGSEFEKRTADGSEFESPKKKAKVE

SEQ ID NO: 1664 - protein, 2127 aa, synthetic construct
  source 1..2127: note = Description of Artificial Sequence: Synthetic polypeptide
MPAAKRVKLDGGDKKYSIGLDIGTNSVGWAVITDEYKVPSKKFKVLGNTDRHSIKKNLIGALLFDSGETAEATRLKRTARRRYTRRKNRICYLQEIFSNEMAKVDDSFFHRLEESFLVEEDKKHERHPIFGNIVDEVAYHEKYPTIYHLRKKLVDSTDKADLRLIYLALAHMIKFRGHFLIEGDLNPDNSDVDKLFIQLVQTYNQLFEENPINASGVDAKAILSARLSKSRRLENLIAQLPGEKKNGLFGNLIALSLGLTPNFKSNFDLAEDAKLQLSKDTYDDDLDNLLAQIGDQYADLFLAAKNLSDAILLSDILRVNTEITKAPLSASMIKRYDEHHQDLTLLKALVRQQLPEKYKEIFFDQSKNGYAGYIDGGASQEEFYKFIKPILEKMDGTEELLVKLNREDLLRKQRTFDNGSIPHQIHLGELHAILRRQEDFYPFLKDNREKIEKILTFRIPYYVGPLARGNSRFAWMTRKSEETITPWNFEEVVDKGASAQSFIERMTNFDKNLPNEKVLPKHSLLYEYFTVYNELTKVKYVTEGMRKPAFLSGEQKKAIVDLLFKTNRKVTVKQLKEDYFKKIECFDSVEISGVEDRFNASLGTYHDLLKIIKDKDFLDNEENEDILEDIVLTLTLFEDREMIEERLKTYAHLFDDKVMKQLKRRRYTGWGRLSRKLINGIRDKQSGKTILDFLKSDGFANRNFMQLIHDDSLTFKEDIQKAQVSGQGDSLHEHIANLAGSPAIKKGILQTVKVVDELVKVMGRHKPENIVIEMARENQTTQKGQKNSRERMKRIEEGIKELGSQILKEHPVENTQLQNEKLYLYYLQNGRDMYVDQELDINRLSDYDVDHIVPQSFLKDDSIDNKVLTRSDKARGKSDNVPSEEVVKKMKNYWRQLLNAKLITQRKFDNLTKAERGGLSELDKAGFIKRQLVETRQITKHVAQILDSRMNTKYDENDKLIREVKVITLKSKLVSDFRKDFQFYKVREINNYHHAHDAYLNAVVGTALIKKYPKLESEFVYGDYKVYDVRKMIAKSEQEIGKATAKYFFYSNIMNFFKTEITLANGEIRKRPLIETNGETGEIVWDKGRDFATVRKVLSMPQVNIVKKTEVQTGGFSKESILPKRNSDKLIARKKDWDPKKYGGFDSPTVAYSVLVVAKVEKGKSKKLKSVKELLGITIMERSSFEKNPIDFLEAKGYKEVKKDLIIKLPKYSLFELENGRKRMLASAGELQKGNELALPSKYVNFLYLASHYEKLKGSPEDNEQKQLFVEQHKHYLDEIIEQISEFSKRVILADANLDKVLSAYNKHRDKPIREQAENIIHLFTLTNLGAPAAFKYFDTTIDRKRYTSTKEVLDATLIHQSITGLYETRIDLSQLGGDGGEAAAKGSSPAPGGLLGRDLLTKLKAQIQFSTEGPQVTWEDRPAMCLVLNLEEEYRLHEKPVPPSIDPSWLQLFPMVWAEKAGMGLANQVPPVVVELKSDASPVAVRQYPMSKEAREGIRPHIQRFLDLGILVPCQSPWNTPLLPVKKPGTNDYRPVQDLREVNKRVQDIHPTVPNPYNLLSSLPPSHTWYSVLDLKDAFFCLKLHPNSQPLFAFEWRDPEKGNTGQLTWTRLPQGFKNSPTLFNEALHRDLASFRALNPQVVMLQYVDDLLVAAPTYRDCKEGTRRLLQELSKLGYRVSAKKAQLCREEVTYLGYLLKGGKRWLTPARKATVMKIPTPTTPRQVREFLGKAGFCRLFIPGFASLAAPLYPLTRPKVPFTWTEAHQEAFGRIKEALLSAPALALPDLTKPFALYVDEKEGVARGVLTQTLGPWRRPVAYLSKKLDPVASGWPTCLKAIAAVALLLKDADKLTLGQNVLVIAPHNLESIVRQPPDRWMTNARMTHYQSLLLNERVSFAPPAILNPATLLPVESDDTPIHICSEILAEETGTRPDLRDQPLPGVPAWYTDGSSFIMDGRRQAGAAIVDNKRTVWASNLPEGTSAQKAELIALTQALRLAEGKSINIYTDSRYAFATAHVHGAIYKQRGWLTSAGKDIKNKEEILALLEAIHLPKRVAIIHCPGHQRGTDPVATGNRKADEAAKQAAQSTRILTETTKNAGKRTADGSEFEKRTADGSEFESPKKKAKVE

SEQ ID NO: 1665 - protein, 2131 aa, synthetic construct
  source 1..2131: note = Description of Artificial Sequence: Synthetic polypeptide
MPAAKRVKLDGGDKKYSIGLDIGTNSVGWAVITDEYKVPSKKFKVLGNTDRHSIKKNLIGALLFDSGETAEATRLKRTARRRYTRRKNRICYLQEIFSNEMAKVDDSFFHRLEESFLVEEDKKHERHPIFGNIVDEVAYHEKYPTIYHLRKKLVDSTDKADLRLIYLALAHMIKFRGHFLIEGDLNPDNSDVDKLFIQLVQTYNQLFEENPINASGVDAKAILSARLSKSRRLENLIAQLPGEKKNGLFGNLIALSLGLTPNFKSNFDLAEDAKLQLSKDTYDDDLDNLLAQIGDQYADLFLAAKNLSDAILLSDILRVNTEITKAPLSASMIKRYDEHHQDLTLLKALVRQQLPEKYKEIFFDQSKNGYAGYIDGGASQEEFYKFIKPILEKMDGTEELLVKLNREDLLRKQRTFDNGSIPHQIHLGELHAILRRQEDFYPFLKDNREKIEKILTFRIPYYVGPLARGNSRFAWMTRKSEETITPWNFEEVVDKGASAQSFIERMTNFDKNLPNEKVLPKHSLLYEYFTVYNELTKVKYVTEGMRKPAFLSGEQKKAIVDLLFKTNRKVTVKQLKEDYFKKIECFDSVEISGVEDRFNASLGTYHDLLKIIKDKDFLDNEENEDILEDIVLTLTLFEDREMIEERLKTYAHLFDDKVMKQLKRRRYTGWGRLSRKLINGIRDKQSGKTILDFLKSDGFANRNFMQLIHDDSLTFKEDIQKAQVSGQGDSLHEHIANLAGSPAIKKGILQTVKVVDELVKVMGRHKPENIVIEMARENQTTQKGQKNSRERMKRIEEGIKELGSQILKEHPVENTQLQNEKLYLYYLQNGRDMYVDQELDINRLSDYDVDHIVPQSFLKDDSIDNKVLTRSDKARGKSDNVPSEEVVKKMKNYWRQLLNAKLITQRKFDNLTKAERGGLSELDKAGFIKRQLVETRQITKHVAQILDSRMNTKYDENDKLIREVKVITLKSKLVSDFRKDFQFYKVREINNYHHAHDAYLNAVVGTALIKKYPKLESEFVYGDYKVYDVRKMIAKSEQEIGKATAKYFFYSNIMNFFKTEITLANGEIRKRPLIETNGETGEIVWDKGRDFATVRKVLSMPQVNIVKKTEVQTGGFSKESILPKRNSDKLIARKKDWDPKKYGGFDSPTVAYSVLVVAKVEKGKSKKLKSVKELLGITIMERSSFEKNPIDFLEAKGYKEVKKDLIIKLPKYSLFELENGRKRMLASAGELQKGNELALPSKYVNFLYLASHYEKLKGSPEDNEQKQLFVEQHKHYLDEIIEQISEFSKRVILADANLDKVLSAYNKHRDKPIREQAENIIHLFTLTNLGAPAAFKYFDTTIDRKRYTSTKEVLDATLIHQSITGLYETRIDLSQLGGDGGGGSGGSGGSGGSGGSGGLLGRDLLTKLKAQIQFSTEGPQVTWEDRPAMCLVLNLEEEYRLHEKPVPPSIDPSWLQLFPMVWAEKAGMGLANQVPPVVVELKSDASPVAVRQYPMSKEAREGIRPHIQRFLDLGILVPCQSPWNTPLLPVKKPGTNDYRPVQDLREVNKRVQDIHPTVPNPYNLLSSLPPSHTWYSVLDLKDAFFCLKLHPNSQPLFAFEWRDPEKGNTGQLTWTRLPQGFKNSPTLFNEALHRDLASFRALNPQVVMLQYVDDLLVAAPTYRDCKEGTRRLLQELSKLGYRVSAKKAQLCREEVTYLGYLLKGGKRWLTPARKATVMKIPTPTTPRQVREFLGKAGFCRLFIPGFASLAAPLYPLTRPKVPFTWTEAHQEAFGRIKEALLSAPALALPDLTKPFALYVDEKEGVARGVLTQTLGPWRRPVAYLSKKLDPVASGWPTCLKAIAAVALLLKDADKLTLGQNVLVIAPHNLESIVRQPPDRWMTNARMTHYQSLLLNERVSFAPPAILNPATLLPVESDDTPIHICSEILAEETGTRPDLRDQPLPGVPAWYTDGSSFIMDGRRQAGAAIVDNKRTVWASNLPEGTSAQKAELIALTQALRLAEGKSINIYTDSRYAFATAHVHGAIYKQRGWLTSAGKDIKNKEEILALLEAIHLPKRVAIIHCPGHQRGTDPVATGNRKADEAAKQAAQSTRILTETTKNAGKRTADGSEFEKRTADGSEFESPKKKAKVE

SEQ ID NO: 1666 - protein, 2127 aa, synthetic construct
  source 1..2127: note = Description of Artificial Sequence: Synthetic polypeptide
MPAAKRVKLDGGDKKYSIGLDIGTNSVGWAVITDEYKVPSKKFKVLGNTDRHSIKKNLIGALLFDSGETAEATRLKRTARRRYTRRKNRICYLQEIFSNEMAKVDDSFFHRLEESFLVEEDKKHERHPIFGNIVDEVAYHEKYPTIYHLRKKLVDSTDKADLRLIYLALAHMIKFRGHFLIEGDLNPDNSDVDKLFIQLVQTYNQLFEENPINASGVDAKAILSARLSKSRRLENLIAQLPGEKKNGLFGNLIALSLGLTPNFKSNFDLAEDAKLQLSKDTYDDDLDNLLAQIGDQYADLFLAAKNLSDAILLSDILRVNTEITKAPLSASMIKRYDEHHQDLTLLKALVRQQLPEKYKEIFFDQSKNGYAGYIDGGASQEEFYKFIKPILEKMDGTEELLVKLNREDLLRKQRTFDNGSIPHQIHLGELHAILRRQEDFYPFLKDNREKIEKILTFRIPYYVGPLARGNSRFAWMTRKSEETITPWNFEEVVDKGASAQSFIERMTNFDKNLPNEKVLPKHSLLYEYFTVYNELTKVKYVTEGMRKPAFLSGEQKKAIVDLLFKTNRKVTVKQLKEDYFKKIECFDSVEISGVEDRFNASLGTYHDLLKIIKDKDFLDNEENEDILEDIVLTLTLFEDREMIEERLKTYAHLFDDKVMKQLKRRRYTGWGRLSRKLINGIRDKQSGKTILDFLKSDGFANRNFMQLIHDDSLTFKEDIQKAQVSGQGDSLHEHIANLAGSPAIKKGILQTVKVVDELVKVMGRHKPENIVIEMARENQTTQKGQKNSRERMKRIEEGIKELGSQILKEHPVENTQLQNEKLYLYYLQNGRDMYVDQELDINRLSDYDVDHIVPQSFLKDDSIDNKVLTRSDKARGKSDNVPSEEVVKKMKNYWRQLLNAKLITQRKFDNLTKAERGGLSELDKAGFIKRQLVETRQITKHVAQILDSRMNTKYDENDKLIREVKVITLKSKLVSDFRKDFQFYKVREINNYHHAHDAYLNAVVGTALIKKYPKLESEFVYGDYKVYDVRKMIAKSEQEIGKATAKYFFYSNIMNFFKTEITLANGEIRKRPLIETNGETGEIVWDKGRDFATVRKVLSMPQVNIVKKTEVQTGGFSKESILPKRNSDKLIARKKDWDPKKYGGFDSPTVAYSVLVVAKVEKGKSKKLKSVKELLGITIMERSSFEKNPIDFLEAKGYKEVKKDLIIKLPKYSLFELENGRKRMLASAGELQKGNELALPSKYVNFLYLASHYEKLKGSPEDNEQKQLFVEQHKHYLDEIIEQISEFSKRVILADANLDKVLSAYNKHRDKPIREQAENIIHLFTLTNLGAPAAFKYFDTTIDRKRYTSTKEVLDATLIHQSITGLYETRIDLSQLGGDGGGGSPAPEAAAKGGLLGRDLLTKLKAQIQFSTEGPQVTWEDRPAMCLVLNLEEEYRLHEKPVPPSIDPSWLQLFPMVWAEKAGMGLANQVPPVVVELKSDASPVAVRQYPMSKEAREGIRPHIQRFLDLGILVPCQSPWNTPLLPVKKPGTNDYRPVQDLREVNKRVQDIHPTVPNPYNLLSSLPPSHTWYSVLDLKDAFFCLKLHPNSQPLFAFEWRDPEKGNTGQLTWTRLPQGFKNSPTLFNEALHRDLASFRALNPQVVMLQYVDDLLVAAPTYRDCKEGTRRLLQELSKLGYRVSAKKAQLCREEVTYLGYLLKGGKRWLTPARKATVMKIPTPTTPRQVREFLGKAGFCRLFIPGFASLAAPLYPLTRPKVPFTWTEAHQEAFGRIKEALLSAPALALPDLTKPFALYVDEKEGVARGVLTQTLGPWRRPVAYLSKKLDPVASGWPTCLKAIAAVALLLKDADKLTLGQNVLVIAPHNLESIVRQPPDRWMTNARMTHYQSLLLNERVSFAPPAILNPATLLPVESDDTPIHICSEILAEETGTRPDLRDQPLPGVPAWYTDGSSFIMDGRRQAGAAIVDNKRTVWASNLPEGTSAQKAELIALTQALRLAEGKSINIYTDSRYAFATAHVHGAIYKQRGWLTSAGKDIKNKEEILALLEAIHLPKRVAIIHCPGHQRGTDPVATGNRKADEAAKQAAQSTRILTETTKNAGKRTADGSEFEKRTADGSEFESPKKKAKVE

SEQ ID NO: 1667 - protein, 2134 aa, synthetic construct
  source 1..2134: note = Description of Artificial Sequence: Synthetic polypeptide
MPAAKRVKLDGGDKKYSIGLDIGTNSVGWAVITDEYKVPSKKFKVLGNTDRHSIKKNLIGALLFDSGETAEATRLKRTARRRYTRRKNRICYLQEIFSNEMAKVDDSFFHRLEESFLVEEDKKHERHPIFGNIVDEVAYHEKYPTIYHLRKKLVDSTDKADLRLIYLALAHMIKFRGHFLIEGDLNPDNSDVDKLFIQLVQTYNQLFEENPINASGVDAKAILSARLSKSRRLENLIAQLPGEKKNGLFGNLIALSLGLTPNFKSNFDLAEDAKLQLSKDTYDDDLDNLLAQIGDQYADLFLAAKNLSDAILLSDILRVNTEITKAPLSASMIKRYDEHHQDLTLLKALVRQQLPEKYKEIFFDQSKNGYAGYIDGGASQEEFYKFIKPILEKMDGTEELLVKLNREDLLRKQRTFDNGSIPHQIHLGELHAILRRQEDFYPFLKDNREKIEKILTFRIPYYVGPLARGNSRFAWMTRKSEETITPWNFEEVVDKGASAQSFIERMTNFDKNLPNEKVLPKHSLLYEYFTVYNELTKVKYVTEGMRKPAFLSGEQKKAIVDLLFKTNRKVTVKQLKEDYFKKIECFDSVEISGVEDRFNASLGTYHDLLKIIKDKDFLDNEENEDILEDIVLTLTLFEDREMIEERLKTYAHLFDDKVMKQLKRRRYTGWGRLSRKLINGIRDKQSGKTILDFLKSDGFANRNFMQLIHDDSLTFKEDIQKAQVSGQGDSLHEHIANLAGSPAIKKGILQTVKVVDELVKVMGRHKPENIVIEMARENQTTQKGQKNSRERMKRIEEGIKELGSQILKEHPVENTQLQNEKLYLYYLQNGRDMYVDQELDINRLSDYDVDHIVPQSFLKDDSIDNKVLTRSDKARGKSDNVPSEEVVKKMKNYWRQLLNAKLITQRKFDNLTKAERGGLSELDKAGFIKRQLVETRQITKHVAQILDSRMNTKYDENDKLIREVKVITLKSKLVSDFRKDFQFYKVREINNYHHAHDAYLNAVVGTALIKKYPKLESEFVYGDYKVYDVRKMIAKSEQEIGKATAKYFFYSNIMNFFKTEITLANGEIRKRPLIETNGETGEIVWDKGRDFATVRKVLSMPQVNIVKKTEVQTGGFSKESILPKRNSDKLIARKKDWDPKKYGGFDSPTVAYSVLVVAKVEKGKSKKLKSVKELLGITIMERSSFEKNPIDFLEAKGYKEVKKDLIIKLPKYSLFELENGRKRMLASAGELQKGNELALPSKYVNFLYLASHYEKLKGSPEDNEQKQLFVEQHKHYLDEIIEQISEFSKRVILADANLDKVLSAYNKHRDKPIREQAENIIHLFTLTNLGAPAAFKYFDTTIDRKRYTSTKEVLDATLIHQSITGLYETRIDLSQLGGDGGGSSGSSGSSGSSGSSGSSGGLLGRDLLTKLKAQIQFSTEGPQVTWEDRPAMCLVLNLEEEYRLHEKPVPPSIDPSWLQLFPMVWAEKAGMGLANQVPPVVVELKSDASPVAVRQYPMSKEAREGIRPHIQRFLDLGILVPCQSPWNTPLLPVKKPGTNDYRPVQDLREVNKRVQDIHPTVPNPYNLLSSLPPSHTWYSVLDLKDAFFCLKLHPNSQPLFAFEWRDPEKGNTGQLTWTRLPQGFKNSPTLFNEALHRDLASFRALNPQVVMLQYVDDLLVAAPTYRDCKEGTRRLLQELSKLGYRVSAKKAQLCREEVTYLGYLLKGGKRWLTPARKATVMKIPTPTTPRQVREFLGKAGFCRLFIPGFASLAAPLYPLTRPKVPFTWTEAHQEAFGRIKEALLSAPALALPDLTKPFALYVDEKEGVARGVLTQTLGPWRRPVAYLSKKLDPVASGWPTCLKAIAAVALLLKDADKLTLGQNVLVIAPHNLESIVRQPPDRWMTNARMTHYQSLLLNERVSFAPPAILNPATLLPVESDDTPIHICSEILAEETGTRPDLRDQPLPGVPAWYTDGSSFIMDGRRQAGAAIVDNKRTVWASNLPEGTSAQKAELIALTQALRLAEGKSINIYTDSRYAFATAHVHGAIYKQRGWLTSAGKDIKNKEEILALLEAIHLPKRVAIIHCPGHQRGTDPVATGNRKADEAAKQAAQSTRILTETTKNAGKRTADGSEFEKRTADGSEFESPKKKAKVE

SEQ ID NO: 1668 - protein, 2122 aa, synthetic construct
  source 1..2122: note = Description of Artificial Sequence: Synthetic polypeptide
MPAAKRVKLDGGDKKYSIGLDIGTNSVGWAVITDEYKVPSKKFKVLGNTDRHSIKKNLIGALLFDSGETAEATRLKRTARRRYTRRKNRICYLQEIFSNEMAKVDDSFFHRLEESFLVEEDKKHERHPIFGNIVDEVAYHEKYPTIYHLRKKLVDSTDKADLRLIYLALAHMIKFRGHFLIEGDLNPDNSDVDKLFIQLVQTYNQLFEENPINASGVDAKAILSARLSKSRRLENLIAQLPGEKKNGLFGNLIALSLGLTPNFKSNFDLAEDAKLQLSKDTYDDDLDNLLAQIGDQYADLFLAAKNLSDAILLSDILRVNTEITKAPLSASMIKRYDEHHQDLTLLKALVRQQLPEKYKEIFFDQSKNGYAGYIDGGASQEEFYKFIKPILEKMDGTEELLVKLNREDLLRKQRTFDNGSIPHQIHLGELHAILRRQEDFYPFLKDNREKIEKILTFRIPYYVGPLARGNSRFAWMTRKSEETITPWNFEEVVDKGASAQSFIERMTNFDKNLPNEKVLPKHSLLYEYFTVYNELTKVKYVTEGMRKPAFLSGEQKKAIVDLLFKTNRKVTVKQLKEDYFKKIECFDSVEISGVEDRFNASLGTYHDLLKIIKDKDFLDNEENEDILEDIVLTLTLFEDREMIEERLKTYAHLFDDKVMKQLKRRRYTGWGRLSRKLINGIRDKQSGKTILDFLKSDGFANRNFMQLIHDDSLTFKEDIQKAQVSGQGDSLHEHIANLAGSPAIKKGILQTVKVVDELVKVMGRHKPENIVIEMARENQTTQKGQKNSRERMKRIEEGIKELGSQILKEHPVENTQLQNEKLYLYYLQNGRDMYVDQELDINRLSDYDVDHIVPQSFLKDDSIDNKVLTRSDKARGKSDNVPSEEVVKKMKNYWRQLLNAKLITQRKFDNLTKAERGGLSELDKAGFIKRQLVETRQITKHVAQILDSRMNTKYDENDKLIREVKVITLKSKLVSDFRKDFQFYKVREINNYHHAHDAYLNAVVGTALIKKYPKLESEFVYGDYKVYDVRKMIAKSEQEIGKATAKYFFYSNIMNFFKTEITLANGEIRKRPLIETNGETGEIVWDKGRDFATVRKVLSMPQVNIVKKTEVQTGGFSKESILPKRNSDKLIARKKDWDPKKYGGFDSPTVAYSVLVVAKVEKGKSKKLKSVKELLGITIMERSSFEKNPIDFLEAKGYKEVKKDLIIKLPKYSLFELENGRKRMLASAGELQKGNELALPSKYVNFLYLASHYEKLKGSPEDNEQKQLFVEQHKHYLDEIIEQISEFSKRVILADANLDKVLSAYNKHRDKPIREQAENIIHLFTLTNLGAPAAFKYFDTTIDRKRYTSTKEVLDATLIHQSITGLYETRIDLSQLGGDGGGGSGGGGGLLGRDLLTKLKAQIQFSTEGPQVTWEDRPAMCLVLNLEEEYRLHEKPVPPSIDPSWLQLFPMVWAEKAGMGLANQVPPVVVELKSDASPVAVRQYPMSKEAREGIRPHIQRFLDLGILVPCQSPWNTPLLPVKKPGTNDYRPVQDLREVNKRVQDIHPTVPNPYNLLSSLPPSHTWYSVLDLKDAFFCLKLHPNSQPLFAFEWRDPEKGNTGQLTWTRLPQGFKNSPTLFNEALHRDLASFRALNPQVVMLQYVDDLLVAAPTYRDCKEGTRRLLQELSKLGYRVSAKKAQLCREEVTYLGYLLKGGKRWLTPARKATVMKIPTPTTPRQVREFLGKAGFCRLFIPGFASLAAPLYPLTRPKVPFTWTEAHQEAFGRIKEALLSAPALALPDLTKPFALYVDEKEGVARGVLTQTLGPWRRPVAYLSKKLDPVASGWPTCLKAIAAVALLLKDADKLTLGQNVLVIAPHNLESIVRQPPDRWMTNARMTHYQSLLLNERVSFAPPAILNPATLLPVESDDTPIHICSEILAEETGTRPDLRDQPLPGVPAWYTDGSSFIMDGRRQAGAAIVDNKRTVWASNLPEGTSAQKAELIALTQALRLAEGKSINIYTDSRYAFATAHVHGAIYKQRGWLTSAGKDIKNKEEILALLEAIHLPKRVAIIHCPGHQRGTDPVATGNRKADEAAKQAAQSTRILTETTKNAGKRTADGSEFEKRTADGSEFESPKKKAKVE

SEQ ID NO: 1669 - protein, 2124 aa, synthetic construct
  source 1..2124: note = Description of Artificial Sequence: Synthetic polypeptide
MPAAKRVKLDGGDKKYSIGLDIGTNSVGWAVITDEYKVPSKKFKVLGNTDRHSIKKNLIGALLFDSGETAEATRLKRTARRRYTRRKNRICYLQEIFSNEMAKVDDSFFHRLEESFLVEEDKKHERHPIFGNIVDEVAYHEKYPTIYHLRKKLVDSTDKADLRLIYLALAHMIKFRGHFLIEGDLNPDNSDVDKLFIQLVQTYNQLFEENPINASGVDAKAILSARLSKSRRLENLIAQLPGEKKNGLFGNLIALSLGLTPNFKSNFDLAEDAKLQLSKDTYDDDLDNLLAQIGDQYADLFLAAKNLSDAILLSDILRVNTEITKAPLSASMIKRYDEHHQDLTLLKALVRQQLPEKYKEIFFDQSKNGYAGYIDGGASQEEFYKFIKPILEKMDGTEELLVKLNREDLLRKQRTFDNGSIPHQIHLGELHAILRRQEDFYPFLKDNREKIEKILTFRIPYYVGPLARGNSRFAWMTRKSEETITPWNFEEVVDKGASAQSFIERMTNFDKNLPNEKVLPKHSLLYEYFTVYNELTKVKYVTEGMRKPAFLSGEQKKAIVDLLFKTNRKVTVKQLKEDYFKKIECFDSVEISGVEDRFNASLGTYHDLLKIIKDKDFLDNEENEDILEDIVLTLTLFEDREMIEERLKTYAHLFDDKVMKQLKRRRYTGWGRLSRKLINGIRDKQSGKTILDFLKSDGFANRNFMQLIHDDSLTFKEDIQKAQVSGQGDSLHEHIANLAGSPAIKKGILQTVKVVDELVKVMGRHKPENIVIEMARENQTTQKGQKNSRERMKRIEEGIKELGSQILKEHPVENTQLQNEKLYLYYLQNGRDMYVDQELDINRLSDYDVDHIVPQSFLKDDSIDNKVLTRSDKARGKSDNVPSEEVVKKMKNYWRQLLNAKLITQRKFDNLTKAERGGLSELDKAGFIKRQLVETRQITKHVAQILDSRMNTKYDENDKLIREVKVITLKSKLVSDFRKDFQFYKVREINNYHHAHDAYLNAVVGTALIKKYPKLESEFVYGDYKVYDVRKMIAKSEQEIGKATAKYFFYSNIMNFFKTEITLANGEIRKRPLIETNGETGEIVWDKGRDFATVRKVLSMPQVNIVKKTEVQTGGFSKESILPKRNSDKLIARKKDWDPKKYGGFDSPTVAYSVLVVAKVEKGKSKKLKSVKELLGITIMERSSFEKNPIDFLEAKGYKEVKKDLIIKLPKYSLFELENGRKRMLASAGELQKGNELALPSKYVNFLYLASHYEKLKGSPEDNEQKQLFVEQHKHYLDEIIEQISEFSKRVILADANLDKVLSAYNKHRDKPIREQAENIIHLFTLTNLGAPAAFKYFDTTIDRKRYTSTKEVLDATLIHQSITGLYETRIDLSQLGGDGGPAPEAAAKGGLLGRDLLTKLKAQIQFSTEGPQVTWEDRPAMCLVLNLEEEYRLHEKPVPPSIDPSWLQLFPMVWAEKAGMGLANQVPPVVVELKSDASPVAVRQYPMSKEAREGIRPHIQRFLDLGILVPCQSPWNTPLLPVKKPGTNDYRPVQDLREVNKRVQDIHPTVPNPYNLLSSLPPSHTWYSVLDLKDAFFCLKLHPNSQPLFAFEWRDPEKGNTGQLTWTRLPQGFKNSPTLFNEALHRDLASFRALNPQVVMLQYVDDLLVAAPTYRDCKEGTRRLLQELSKLGYRVSAKKAQLCREEVTYLGYLLKGGKRWLTPARKATVMKIPTPTTPRQVREFLGKAGFCRLFIPGFASLAAPLYPLTRPKVPFTWTEAHQEAFGRIKEALLSAPALALPDLTKPFALYVDEKEGVARGVLTQTLGPWRRPVAYLSKKLDPVASGWPTCLKAIAAVALLLKDADKLTLGQNVLVIAPHNLESIVRQPPDRWMTNARMTHYQSLLLNERVSFAPPAILNPATLLPVESDDTPIHICSEILAEETGTRPDLRDQPLPGVPAWYTDGSSFIMDGRRQAGAAIVDNKRTVWASNLPEGTSAQKAELIALTQALRLAEGKSINIYTDSRYAFATAHVHGAIYKQRGWLTSAGKDIKNKEEILALLEAIHLPKRVAIIHCPGHQRGTDPVATGNRKADEAAKQAAQSTRILTETTKNAGKRTADGSEFEKRTADGSEFESPKKKAKVE

SEQ ID NO: 1670 - protein, 2162 aa, synthetic construct
  source 1..2162: note = Description of Artificial Sequence: Synthetic polypeptide
MPAAKRVKLDGGDKKYSIGLDIGTNSVGWAVITDEYKVPSKKFKVLGNTDRHSIKKNLIGALLFDSGETAEATRLKRTARRRYTRRKNRICYLQEIFSNEMAKVDDSFFHRLEESFLVEEDKKHERHPIFGNIVDEVAYHEKYPTIYHLRKKLVDSTDKADLRLIYLALAHMIKFRGHFLIEGDLNPDNSDVDKLFIQLVQTYNQLFEENPINASGVDAKAILSARLSKSRRLENLIAQLPGEKKNGLFGNLIALSLGLTPNFKSNFDLAEDAKLQLSKDTYDDDLDNLLAQIGDQYADLFLAAKNLSDAILLSDILRVNTEITKAPLSASMIKRYDEHHQDLTLLKALVRQQLPEKYKEIFFDQSKNGYAGYIDGGASQEEFYKFIKPILEKMDGTEELLVKLNREDLLRKQRTFDNGSIPHQIHLGELHAILRRQEDFYPFLKDNREKIEKILTFRIPYYVGPLARGNSRFAWMTRKSEETITPWNFEEVVDKGASAQSFIERMTNFDKNLPNEKVLPKHSLLYEYFTVYNELTKVKYVTEGMRKPAFLSGEQKKAIVDLLFKTNRKVTVKQLKEDYFKKIECFDSVEISGVEDRFNASLGTYHDLLKIIKDKDFLDNEENEDILEDIVLTLTLFEDREMIEERLKTYAHLFDDKVMKQLKRRRYTGWGRLSRKLINGIRDKQSGKTILDFLKSDGFANRNFMQLIHDDSLTFKEDIQKAQVSGQGDSLHEHIANLAGSPAIKKGILQTVKVVDELVKVMGRHKPENIVIEMARENQTTQKGQKNSRERMKRIEEGIKELGSQILKEHPVENTQLQNEKLYLYYLQNGRDMYVDQELDINRLSDYDVDHIVPQSFLKDDSIDNKVLTRSDKARGKSDNVPSEEVVKKMKNYWRQLLNAKLITQRKFDNLTKAERGGLSELDKAGFIKRQLVETRQITKHVAQILDSRMNTKYDENDKLIREVKVITLKSKLVSDFRKDFQFYKVREINNYHHAHDAYLNAVVGTALIKKYPKLESEFVYGDYKVYDVRKMIAKSEQEIGKATAKYFFYSNIMNFFKTEITLANGEIRKRPLIETNGETGEIVWDKGRDFATVRKVLSMPQVNIVKKTEVQTGGFSKESILPKRNSDKLIARKKDWDPKKYGGFDSPTVAYSVLVVAKVEKGKSKKLKSVKELLGITIMERSSFEKNPIDFLEAKGYKEVKKDLIIKLPKYSLFELENGRKRMLASAGELQKGNELALPSKYVNFLYLASHYEKLKGSPEDNEQKQLFVEQHKHYLDEIIEQISEFSKRVILADANLDKVLSAYNKHRDKPIREQAENIIHLFTLTNLGAPAAFKYFDTTIDRKRYTSTKEVLDATLIHQSITGLYETRIDLSQLGGDGGAEAAAKEAAAKEAAAKEAAAKALEAEAAAKEAAAKEAAAKEAAAKAGGLLGRDLLTKLKAQIQFSTEGPQVTWEDRPAMCLVLNLEEEYRLHEKPVPPSIDPSWLQLFPMVWAEKAGMGLANQVPPVVVELKSDASPVAVRQYPMSKEAREGIRPHIQRFLDLGILVPCQSPWNTPLLPVKKPGTNDYRPVQDLREVNKRVQDIHPTVPNPYNLLSSLPPSHTWYSVLDLKDAFFCLKLHPNSQPLFAFEWRDPEKGNTGQLTWTRLPQGFKNSPTLFNEALHRDLASFRALNPQVVMLQYVDDLLVAAPTYRDCKEGTRRLLQELSKLGYRVSAKKAQLCREEVTYLGYLLKGGKRWLTPARKATVMKIPTPTTPRQVREFLGKAGFCRLFIPGFASLAAPLYPLTRPKVPFTWTEAHQEAFGRIKEALLSAPALALPDLTKPFALYVDEKEGVARGVLTQTLGPWRRPVAYLSKKLDPVASGWPTCLKAIAAVALLLKDADKLTLGQNVLVIAPHNLESIVRQPPDRWMTNARMTHYQSLLLNERVSFAPPAILNPATLLPVESDDTPIHICSEILAEETGTRPDLRDQPLPGVPAWYTDGSSFIMDGRRQAGAAIVDNKRTVWASNLPEGTSAQKAELIALTQALRLAEGKSINIYTDSRYAFATAHVHGAIYKQRGWLTSAGKDIKNKEEILALLEAIHLPKRVAIIHCPGHQRGTDPVATGNRKADEAAKQAAQSTRILTETTKNAGKRTADGSEFEKRTADGSEFESPKKKAKVE

SEQ ID NO: 1671 - protein, 2124 aa, synthetic construct
  source 1..2124: note = Description of Artificial Sequence: Synthetic polypeptide
MPAAKRVKLDGGDKKYSIGLDIGTNSVGWAVITDEYKVPSKKFKVLGNTDRHSIKKNLIGALLFDSGETAEATRLKRTARRRYTRRKNRICYLQEIFSNEMAKVDDSFFHRLEESFLVEEDKKHERHPIFGNIVDEVAYHEKYPTIYHLRKKLVDSTDKADLRLIYLALAHMIKFRGHFLIEGDLNPDNSDVDKLFIQLVQTYNQLFEENPINASGVDAKAILSARLSKSRRLENLIAQLPGEKKNGLFGNLIALSLGLTPNFKSNFDLAEDAKLQLSKDTYDDDLDNLLAQIGDQYADLFLAAKNLSDAILLSDILRVNTEITKAPLSASMIKRYDEHHQDLTLLKALVRQQLPEKYKEIFFDQSKNGYAGYIDGGASQEEFYKFIKPILEKMDGTEELLVKLNREDLLRKQRTFDNGSIPHQIHLGELHAILRRQEDFYPFLKDNREKIEKILTFRIPYYVGPLARGNSRFAWMTRKSEETITPWNFEEVVDKGASAQSFIERMTNFDKNLPNEKVLPKHSLLYEYFTVYNELTKVKYVTEGMRKPAFLSGEQKKAIVDLLFKTNRKVTVKQLKEDYFKKIECFDSVEISGVEDRFNASLGTYHDLLKIIKDKDFLDNEENEDILEDIVLTLTLFEDREMIEERLKTYAHLFDDKVMKQLKRRRYTGWGRLSRKLINGIRDKQSGKTILDFLKSDGFANRNFMQLIHDDSLTFKEDIQKAQVSGQGDSLHEHIANLAGSPAIKKGILQTVKVVDELVKVMGRHKPENIVIEMARENQTTQKGQKNSRERMKRIEEGIKELGSQILKEHPVENTQLQNEKLYLYYLQNGRDMYVDQELDINRLSDYDVDHIVPQSFLKDDSIDNKVLTRSDKARGKSDNVPSEEVVKKMKNYWRQLLNAKLITQRKFDNLTKAERGGLSELDKAGFIKRQLVETRQITKHVAQILDSRMNTKYDENDKLIREVKVITLKSKLVSDFRKDFQFYKVREINNYHHAHDAYLNAVVGTALIKKYPKLESEFVYGDYKVYDVRKMIAKSEQEIGKATAKYFFYSNIMNFFKTEITLANGEIRKRPLIETNGETGEIVWDKGRDFATVRKVLSMPQVNIVKKTEVQTGGFSKESILPKRNSDKLIARKKDWDPKKYGGFDSPTVAYSVLVVAKVEKGKSKKLKSVKELLGITIMERSSFEKNPIDFLEAKGYKEVKKDLIIKLPKYSLFELENGRKRMLASAGELQKGNELALPSKYVNFLYLASHYEKLKGSPEDNEQKQLFVEQHKHYLDEIIEQISEFSKRVILADANLDKVLSAYNKHRDKPIREQAENIIHLFTLTNLGAPAAFKYFDTTIDRKRYTSTKEVLDATLIHQSITGLYETRIDLSQLGGDGGEAAAKGSSGGLLGRDLLTKLKAQIQFSTEGPQVTWEDRPAMCLVLNLEEEYRLHEKPVPPSIDPSWLQLFPMVWAEKAGMGLANQVPPVVVELKSDASPVAVRQYPMSKEAREGIRPHIQRFLDLGILVPCQSPWNTPLLPVKKPGTNDYRPVQDLREVNKRVQDIHPTVPNPYNLLSSLPPSHTWYSVLDLKDAFFCLKLHPNSQPLFAFEWRDPEKGNTGQLTWTRLPQGFKNSPTLFNEALHRDLASFRALNPQVVMLQYVDDLLVAAPTYRDCKEGTRRLLQELSKLGYRVSAKKAQLCREEVTYLGYLLKGGKRWLTPARKATVMKIPTPTTPRQVREFLGKAGFCRLFIPGFASLAAPLYPLTRPKVPFTWTEAHQEAFGRIKEALLSAPALALPDLTKPFALYVDEKEGVARGVLTQTLGPWRRPVAYLSKKLDPVASGWPTCLKAIAAVALLLKDADKLTLGQNVLVIAPHNLESIVRQPPDRWMTNARMTHYQSLLLNERVSFAPPAILNPATLLPVESDDTPIHICSEILAEETGTRPDLRDQPLPGVPAWYTDGSSFIMDGRRQAGAAIVDNKRTVWASNLPEGTSAQKAELIALTQALRLAEGKSINIYTDSRYAFATAHVHGAIYKQRGWLTSAGKDIKNKEEILALLEAIHLPKRVAIIHCPGHQRGTDPVATGNRKADEAAKQAAQSTRILTETTKNAGKRTADGSEFEKRTADGSEFESPKKKAKVE

SEQ ID NO: 1672 - protein, 2127 aa, synthetic construct
  source 1..2127: note = Description of Artificial Sequence: Synthetic polypeptide
MPAAKRVKLDGGDKKYSIGLDIGTNSVGWAVITDEYKVPSKKFKVLGNTDRHSIKKNLIGALLFDSGETAEATRLKRTARRRYTRRKNRICYLQEIFSNEMAKVDDSFFHRLEESFLVEEDKKHERHPIFGNIVDEVAYHEKYPTIYHLRKKLVDSTDKADLRLIYLALAHMIKFRGHFLIEGDLNPDNSDVDKLFIQLVQTYNQLFEENPINASGVDAKAILSARLSKSRRLENLIAQLPGEKKNGLFGNLIALSLGLTPNFKSNFDLAEDAKLQLSKDTYDDDLDNLLAQIGDQYADLFLAAKNLSDAILLSDILRVNTEITKAPLSASMIKRYDEHHQDLTLLKALVRQQLPEKYKEIFFDQSKNGYAGYIDGGASQEEFYKFIKPILEKMDGTEELLVKLNREDLLRKQRTFDNGSIPHQIHLGELHAILRRQEDFYPFLKDNREKIEKILTFRIPYYVGPLARGNSRFAWMTRKSEETITPWNFEEVVDKGASAQSFIERMTNFDKNLPNEKVLPKHSLLYEYFTVYNELTKVKYVTEGMRKPAFLSGEQKKAIVDLLFKTNRKVTVKQLKEDYFKKIECFDSVEISGVEDRFNASLGTYHDLLKIIKDKDFLDNEENEDILEDIVLTLTLFEDREMIEERLKTYAHLFDDKVMKQLKRRRYTGWGRLSRKLINGIRDKQSGKTILDFLKSDGFANRNFMQLIHDDSLTFKEDIQKAQVSGQGDSLHEHIANLAGSPAIKKGILQTVKVVDELVKVMGRHKPENIVIEMARENQTTQKGQKNSRERMKRIEEGIKELGSQILKEHPVENTQLQNEKLYLYYLQNGRDMYVDQELDINRLSDYDVDHIVPQSFLKDDSIDNKVLTRSDKARGKSDNVPSEEVVKKMKNYWRQLLNAKLITQRKFDNLTKAERGGLSELDKAGFIKRQLVETRQITKHVAQILDSRMNTKYDENDKLIREVKVITLKSKLVSDFRKDFQFYKVREINNYHHAHDAYLNAVVGTALIKKYPKLESEFVYGDYKVYDVRKMIAKSEQEIGKATAKYFFYSNIMNFFKTEITLANGEIRKRPLIETNGETGEIVWDKGRDFATVRKVLSMPQVNIVKKTEVQTGGFSKESILPKRNSDKLIARKKDWDPKKYGGFDSPTVAYSVLVVAKVEKGKSKKLKSVKELLGITIMERSSFEKNPIDFLEAKGYKEVKKDLIIKLPKYSLFELENGRKRMLASAGELQKGNELALPSKYVNFLYLASHYEKLKGSPEDNEQKQLFVEQHKHYLDEIIEQISEFSKRVILADANLDKVLSAYNKHRDKPIREQAENIIHLFTLTNLGAPAAFKYFDTTIDRKRYTSTKEVLDATLIHQSITGLYETRIDLSQLGGDGGGGGEAAAKPAPGGLLGRDLLTKLKAQIQFSTEGPQVTWEDRPAMCLVLNLEEEYRLHEKPVPPSIDPSWLQLFPMVWAEKAGMGLANQVPPVVVELKSDASPVAVRQYPMSKEAREGIRPHIQRFLDLGILVPCQSPWNTPLLPVKKPGTNDYRPVQDLREVNKRVQDIHPTVPNPYNLLSSLPPSHTWYSVLDLKDAFFCLKLHPNSQPLFAFEWRDPEKGNTGQLTWTRLPQGFKNSPTLFNEALHRDLASFRALNPQVVMLQYVDDLLVAAPTYRDCKEGTRRLLQELSKLGYRVSAKKAQLCREEVTYLGYLLKGGKRWLTPARKATVMKIPTPTTPRQVREFLGKAGFCRLFIPGFASLAAPLYPLTRPKVPFTWTEAHQEAFGRIKEALLSAPALALPDLTKPFALYVDEKEGVARGVLTQTLGPWRRPVAYLSKKLDPVASGWPTCLKAIAAVALLLKDADKLTLGQNVLVIAPHNLESIVRQPPDRWMTNARMTHYQSLLLNERVSFAPPAILNPATLLPVESDDTPIHICSEILAEETGTRPDLRDQPLPGVPAWYTDGSSFIMDGRRQAGAAIVDNKRTVWASNLPEGTSAQKAELIALTQALRLAEGKSINIYTDSRYAFATAHVHGAIYKQRGWLTSAGKDIKNKEEILALLEAIHLPKRVAIIHCPGHQRGTDPVATGNRKADEAAKQAAQSTRILTETTKNAGKRTADGSEFEKRTADGSEFESPKKKAKVE

SEQ ID NO: 1673 - protein, 2122 aa, synthetic construct
  source 1..2122: note = Description of Artificial Sequence: Synthetic polypeptide
MPAAKRVKLDGGDKKYSIGLDIGTNSVGWAVITDEYKVPSKKFKVLGNTDRHSIKKNLIGALLFDSGETAEATRLKRTARRRYTRRKNRICYLQEIFSNEMAKVDDSFFHRLEESFLVEEDKKHERHPIFGNIVDEVAYHEKYPTIYHLRKKLVDSTDKADLRLIYLALAHMIKFRGHFLIEGDLNPDNSDVDKLFIQLVQTYNQLFEENPINASGVDAKAILSARLSKSRRLENLIAQLPGEKKNGLFGNLIALSLGLTPNFKSNFDLAEDAKLQLSKDTYDDDLDNLLAQIGDQYADLFLAAKNLSDAILLSDILRVNTEITKAPLSASMIKRYDEHHQDLTLLKALVRQQLPEKYKEIFFDQSKNGYAGYIDGGASQEEFYKFIKPILEKMDGTEELLVKLNREDLLRKQRTFDNGSIPHQIHLGELHAILRRQEDFYPFLKDNREKIEKILTFRIPYYVGPLARGNSRFAWMTRKSEETITPWNFEEVVDKGASAQSFIERMTNFDKNLPNEKVLPKHSLLYEYFTVYNELTKVKYVTEGMRKPAFLSGEQKKAIVDLLFKTNRKVTVKQLKEDYFKKIECFDSVEISGVEDRFNASLGTYHDLLKIIKDKDFLDNEENEDILEDIVLTLTLFEDREMIEERLKTYAHLFDDKVMKQLKRRRYTGWGRLSRKLINGIRDKQSGKTILDFLKSDGFANRNFMQLIHDDSLTFKEDIQKAQVSGQGDSLHEHIANLAGSPAIKKGILQTVKVVDELVKVMGRHKPENIVIEMARENQTTQKGQKNSRERMKRIEEGIKELGSQILKEHPVENTQLQNEKLYLYYLQNGRDMYVDQELDINRLSDYDVDHIVPQSFLKDDSIDNKVLTRSDKARGKSDNVPSEEVVKKMKNYWRQLLNAKLITQRKFDNLTKAERGGLSELDKAGFIKRQLVETRQITKHVAQILDSRMNTKYDENDKLIREVKVITLKSKLVSDFRKDFQFYKVREINNYHHAHDAYLNAVVGTALIKKYPKLESEFVYGDYKVYDVRKMIAKSEQEIGKATAKYFFYSNIMNFFKTEITLANGEIRKRPLIETNGETGEIVWDKGRDFATVRKVLSMPQVNIVKKTEVQTGGFSKESILPKRNSDKLIARKKDWDPKKYGGFDSPTVAYSVLVVAKVEKGKSKKLKSVKELLGITIMERSSFEKNPIDFLEAKGYKEVKKDLIIKLPKYSLFELENGRKRMLASAGELQKGNELALPSKYVNFLYLASHYEKLKGSPEDNEQKQLFVEQHKHYLDEIIEQISEFSKRVILADANLDKVLSAYNKHRDKPIREQAENIIHLFTLTNLGAPAAFKYFDTTIDRKRYTSTKEVLDATLIHQSITGLYETRIDLSQLGGDGGGGGPAPGGLLGRDLLTKLKAQIQFSTEGPQVTWEDRPAMCLVLNLEEEYRLHEKPVPPSIDPSWLQLFPMVWAEKAGMGLANQVPPVVVELKSDASPVAVRQYPMSKEAREGIRPHIQRFLDLGILVPCQSPWNTPLLPVKKPGTNDYRPVQDLREVNKRVQDIHPTVPNPYNLLSSLPPSHTWYSVLDLKDAFFCLKLHPNSQPLFAFEWRDPEKGNTGQLTWTRLPQGFKNSPTLFNEALHRDLASFRALNPQVVMLQYVDDLLVAAPTYRDCKEGTRRLLQELSKLGYRVSAKKAQLCREEVTYLGYLLKGGKRWLTPARKATVMKIPTPTTPRQVREFLGKAGFCRLFIPGFASLAAPLYPLTRPKVPFTWTEAHQEAFGRIKEALLSAPALALPDLTKPFALYVDEKEGVARGVLTQTLGPWRRPVAYLSKKLDPVASGWPTCLKAIAAVALLLKDADKLTLGQNVLVIAPHNLESIVRQPPDRWMTNARMTHYQSLLLNERVSFAPPAILNPATLLPVESDDTPIHICSEILAEETGTRPDLRDQPLPGVPAWYTDGSSFIMDGRRQAGAAIVDNKRTVWASNLPEGTSAQKAELIALTQALRLAEGKSINIYTDSRYAFATAHVHGAIYKQRGWLTSAGKDIKNKEEILALLEAIHLPKRVAIIHCPGHQRGTDPVATGNRKADEAAKQAAQSTRILTETTKNAGKRTADGSEFEKRTADGSEFESPKKKAKVE

SEQ ID NO: 1674 - protein, 2136 aa, synthetic construct
  source 1..2136: note = Description of Artificial Sequence: Synthetic polypeptide
MPAAKRVKLDGGDKKYSIGLDIGTNSVGWAVITDEYKVPSKKFKVLGNTDRHSIKKNLIGALLFDSGETAEATRLKRTARRRYTRRKNRICYLQEIFSNEMAKVDDSFFHRLEESFLVEEDKKHERHPIFGNIVDEVAYHEKYPTIYHLRKKLVDSTDKADLRLIYLALAHMIKFRGHFLIEGDLNPDNSDVDKLFIQLVQTYNQLFEENPINASGVDAKAILSARLSKSRRLENLIAQLPGEKKNGLFGNLIALSLGLTPNFKSNFDLAEDAKLQLSKDTYDDDLDNLLAQIGDQYADLFLAAKNLSDAILLSDILRVNTEITKAPLSASMIKRYDEHHQDLTLLKALVRQQLPEKYKEIFFDQSKNGYAGYIDGGASQEEFYKFIKPILEKMDGTEELLVKLNREDLLRKQRTFDNGSIPHQIHLGELHAILRRQEDFYPFLKDNREKIEKILTFRIPYYVGPLARGNSRFAWMTRKSEETITPWNFEEVVDKGASAQSFIERMTNFDKNLPNEKVLPKHSLLYEYFTVYNELTKVKYVTEGMRKPAFLSGEQKKAIVDLLFKTNRKVTVKQLKEDYFKKIECFDSVEISGVEDRFNASLGTYHDLLKIIKDKDFLDNEENEDILEDIVLTLTLFEDREMIEERLKTYAHLFDDKVMKQLKRRRYTGWGRLSRKLINGIRDKQSGKTILDFLKSDGFANRNFMQLIHDDSLTFKEDIQKAQVSGQGDSLHEHIANLAGSPAIKKGILQTVKVVDELVKVMGRHKPENIVIEMARENQTTQKGQKNSRERMKRIEEGIKELGSQILKEHPVENTQLQNEKLYLYYLQNGRDMYVDQELDINRLSDYDVDHIVPQSFLKDDSIDNKVLTRSDKARGKSDNVPSEEVVKKMKNYWRQLLNAKLITQRKFDNLTKAERGGLSELDKAGFIKRQLVETRQITKHVAQILDSRMNTKYDENDKLIREVKVITLKSKLVSDFRKDFQFYKVREINNYHHAHDAYLNAVVGTALIKKYPKLESEFVYGDYKVYDVRKMIAKSEQEIGKATAKYFFYSNIMNFFKTEITLANGEIRKRPLIETNGETGEIVWDKGRDFATVRKVLSMPQVNIVKKTEVQTGGFSKESILPKRNSDKLIARKKDWDPKKYGGFDSPTVAYSVLVVAKVEKGKSKKLKSVKELLGITIMERSSFEKNPIDFLEAKGYKEVKKDLIIKLPKYSLFELENGRKRMLASAGELQKGNELALPSKYVNFLYLASHYEKLKGSPEDNEQKQLFVEQHKHYLDEIIEQISEFSKRVILADANLDKVLSAYNKHRDKPIREQAENIIHLFTLTNLGAPAAFKYFDTTIDRKRYTSTKEVLDATLIHQSITGLYETRIDLSQLGGDGGEAAAKEAAAKEAAAKEAAAKGGLLGRDLLTKLKAQIQFSTEGPQVTWEDRPAMCLVLNLEEEYRLHEKPVPPSIDPSWLQLFPMVWAEKAGMGLANQVPPVVVELKSDASPVAVRQYPMSKEAREGIRPHIQRFLDLGILVPCQSPWNTPLLPVKKPGTNDYRPVQDLREVNKRVQDIHPTVPNPYNLLSSLPPSHTWYSVLDLKDAFFCLKLHPNSQPLFAFEWRDPEKGNTGQLTWTRLPQGFKNSPTLFNEALHRDLASFRALNPQVVMLQYVDDLLVAAPTYRDCKEGTRRLLQELSKLGYRVSAKKAQLCREEVTYLGYLLKGGKRWLTPARKATVMKIPTPTTPRQVREFLGKAGFCRLFIPGFASLAAPLYPLTRPKVPFTWTEAHQEAFGRIKEALLSAPALALPDLTKPFALYVDEKEGVARGVLTQTLGPWRRPVAYLSKKLDPVASGWPTCLKAIAAVALLLKDADKLTLGQNVLVIAPHNLESIVRQPPDRWMTNARMTHYQSLLLNERVSFAPPAILNPATLLPVESDDTPIHICSEILAEETGTRPDLRDQPLPGVPAWYTDGSSFIMDGRRQAGAAIVDNKRTVWASNLPEGTSAQKAELIALTQALRLAEGKSINIYTDSRYAFATAHVHGAIYKQRGWLTSAGKDIKNKEEILALLEAIHLPKRVAIIHCPGHQRGTDPVATGNRKADEAAKQAAQSTRILTETTKNAGKRTADGSEFEKRTADGSEFESPKKKAKVE

SEQ ID NO: 1675 - protein, 2119 aa, synthetic construct
  source 1..2119: note = Description of Artificial Sequence: Synthetic polypeptide
MPAAKRVKLDGGDKKYSIGLDIGTNSVGWAVITDEYKVPSKKFKVLGNTDRHSIKKNLIGALLFDSGETAEATRLKRTARRRYTRRKNRICYLQEIFSNEMAKVDDSFFHRLEESFLVEEDKKHERHPIFGNIVDEVAYHEKYPTIYHLRKKLVDSTDKADLRLIYLALAHMIKFRGHFLIEGDLNPDNSDVDKLFIQLVQTYNQLFEENPINASGVDAKAILSARLSKSRRLENLIAQLPGEKKNGLFGNLIALSLGLTPNFKSNFDLAEDAKLQLSKDTYDDDLDNLLAQIGDQYADLFLAAKNLSDAILLSDILRVNTEITKAPLSASMIKRYDEHHQDLTLLKALVRQQLPEKYKEIFFDQSKNGYAGYIDGGASQEEFYKFIKPILEKMDGTEELLVKLNREDLLRKQRTFDNGSIPHQIHLGELHAILRRQEDFYPFLKDNREKIEKILTFRIPYYVGPLARGNSRFAWMTRKSEETITPWNFEEVVDKGASAQSFIERMTNFDKNLPNEKVLPKHSLLYEYFTVYNELTKVKYVTEGMRKPAFLSGEQKKAIVDLLFKTNRKVTVKQLKEDYFKKIECFDSVEISGVEDRFNASLGTYHDLLKIIKDKDFLDNEENEDILEDIVLTLTLFEDREMIEERLKTYAHLFDDKVMKQLKRRRYTGWGRLSRKLINGIRDKQSGKTILDFLKSDGFANRNFMQLIHDDSLTFKEDIQKAQVSGQGDSLHEHIANLAGSPAIKKGILQTVKVVDELVKVMGRHKPENIVIEMARENQTTQKGQKNSRERMKRIEEGIKELGSQILKEHPVENTQLQNEKLYLYYLQNGRDMYVDQELDINRLSDYDVDHIVPQSFLKDDSIDNKVLTRSDKARGKSDNVPSEEVVKKMKNYWRQLLNAKLITQRKFDNLTKAERGGLSELDKAGFIKRQLVETRQITKHVAQILDSRMNTKYDENDKLIREVKVITLKSKLVSDFRKDFQFYKVREINNYHHAHDAYLNAVVGTALIKKYPKLESEFVYGDYKVYDVRKMIAKSEQEIGKATAKYFFYSNIMNFFKTEITLANGEIRKRPLIETNGETGEIVWDKGRDFATVRKVLSMPQVNIVKKTEVQTGGFSKESILPKRNSDKLIARKKDWDPKKYGGFDSPTVAYSVLVVAKVEKGKSKKLKSVKELLGITIMERSSFEKNPIDFLEAKGYKEVKKDLIIKLPKYSLFELENGRKRMLASAGELQKGNELALPSKYVNFLYLASHYEKLKGSPEDNEQKQLFVEQHKHYLDEIIEQISEFSKRVILADANLDKVLSAYNKHRDKPIREQAENIIHLFTLTNLGAPAAFKYFDTTIDRKRYTSTKEVLDATLIHQSITGLYETRIDLSQLGGDGGGGSGGLLGRDLLTKLKAQIQFSTEGPQVTWEDRPAMCLVLNLEEEYRLHEKPVPPSIDPSWLQLFPMVWAEKAGMGLANQVPPVVVELKSDASPVAVRQYPMSKEAREGIRPHIQRFLDLGILVPCQSPWNTPLLPVKKPGTNDYRPVQDLREVNKRVQDIHPTVPNPYNLLSSLPPSHTWYSVLDLKDAFFCLKLHPNSQPLFAFEWRDPEKGNTGQLTWTRLPQGFKNSPTLFNEALHRDLASFRALNPQVVMLQYVDDLLVAAPTYRDCKEGTRRLLQELSKLGYRVSAKKAQLCREEVTYLGYLLKGGKRWLTPARKATVMKIPTPTTPRQVREFLGKAGFCRLFIPGFASLAAPLYPLTRPKVPFTWTEAHQEAFGRIKEALLSAPALALPDLTKPFALYVDEKEGVARGVLTQTLGPWRRPVAYLSKKLDPVASGWPTCLKAIAAVALLLKDADKLTLGQNVLVIAPHNLESIVRQPPDRWMTNARMTHYQSLLLNERVSFAPPAILNPATLLPVESDDTPIHICSEILAEETGTRPDLRDQPLPGVPAWYTDGSSFIMDGRRQAGAAIVDNKRTVWASNLPEGTSAQKAELIALTQALRLAEGKSINIYTDSRYAFATAHVHGAIYKQRGWLTSAGKDIKNKEEILALLEAIHLPKRVAIIHCPGHQRGTDPVATGNRKADEAAKQAAQSTRILTETTKNAGKRTADGSEFEKRTADGSEFESPKKKAKVE

SEQ ID NO: 1676 - protein, 2122 aa, synthetic construct
  source 1..2122: note = Description of Artificial Sequence: Synthetic polypeptide
MPAAKRVKLDGGDKKYSIGLDIGTNSVGWAVITDEYKVPSKKFKVLGNTDRHSIKKNLIGALLFDSGETAEATRLKRTARRRYTRRKNRICYLQEIFSNEMAKVDDSFFHRLEESFLVEEDKKHERHPIFGNIVDEVAYHEKYPTIYHLRKKLVDSTDKADLRLIYLALAHMIKFRGHFLIEGDLNPDNSDVDKLFIQLVQTYNQLFEENPINASGVDAKAILSARLSKSRRLENLIAQLPGEKKNGLFGNLIALSLGLTPNFKSNFDLAEDAKLQLSKDTYDDDLDNLLAQIGDQYADLFLAAKNLSDAILLSDILRVNTEITKAPLSASMIKRYDEHHQDLTLLKALVRQQLPEKYKEIFFDQSKNGYAGYIDGGASQEEFYKFIKPILEKMDGTEELLVKLNREDLLRKQRTFDNGSIPHQIHLGELHAILRRQEDFYPFLKDNREKIEKILTFRIPYYVGPLARGNSRFAWMTRKSEETITPWNFEEVVDKGASAQSFIERMTNFDKNLPNEKVLPKHSLLYEYFTVYNELTKVKYVTEGMRKPAFLSGEQKKAIVDLLFKTNRKVTVKQLKEDYFKKIECFDSVEISGVEDRFNASLGTYHDLLKIIKDKDFLDNEENEDILEDIVLTLTLFEDREMIEERLKTYAHLFDDKVMKQLKRRRYTGWGRLSRKLINGIRDKQSGKTILDFLKSDGFANRNFMQLIHDDSLTFKEDIQKAQVSGQGDSLHEHIANLAGSPAIKKGILQTVKVVDELVKVMGRHKPENIVIEMARENQTTQKGQKNSRERMKRIEEGIKELGSQILKEHPVENTQLQNEKLYLYYLQNGRDMYVDQELDINRLSDYDVDHIVPQSFLKDDSIDNKVLTRSDKARGKSDNVPSEEVVKKMKNYWRQLLNAKLITQRKFDNLTKAERGGLSELDKAGFIKRQLVETRQITKHVAQILDSRMNTKYDENDKLIREVKVITLKSKLVSDFRKDFQFYKVREINNYHHAHDAYLNAVVGTALIKKYPKLESEFVYGDYKVYDVRKMIAKSEQEIGKATAKYFFYSNIMNFFKTEITLANGEIRKRPLIETNGETGEIVWDKGRDFATVRKVLSMPQVNIVKKTEVQTGGFSKESILPKRNSDKLIARKKDWDPKKYGGFDSPTVAYSVLVVAKVEKGKSKKLKSVKELLGITIMERSSFEKNPIDFLEAKGYKEVKKDLIIKLPKYSLFELENGRKRMLASAGELQKGNELALPSKYVNFLYLASHYEKLKGSPEDNEQKQLFVEQHKHYLDEIIEQISEFSKRVILADANLDKVLSAYNKHRDKPIREQAENIIHLFTLTNLGAPAAFKYFDTTIDRKRYTSTKEVLDATLIHQSITGLYETRIDLSQLGGDGGGGGGSSGGLLGRDLLTKLKAQIQFSTEGPQVTWEDRPAMCLVLNLEEEYRLHEKPVPPSIDPSWLQLFPMVWAEKAGMGLANQVPPVVVELKSDASPVAVRQYPMSKEAREGIRPHIQRFLDLGILVPCQSPWNTPLLPVKKPGTNDYRPVQDLREVNKRVQDIHPTVPNPYNLLSSLPPSHTWYSVLDLKDAFFCLKLHPNSQPLFAFEWRDPEKGNTGQLTWTRLPQGFKNSPTLFNEALHRDLASFRALNPQVVMLQYVDDLLVAAPTYRDCKEGTRRLLQELSKLGYRVSAKKAQLCREEVTYLGYLLKGGKRWLTPARKATVMKIPTPTTPRQVREFLGKAGFCRLFIPGFASLAAPLYPLTRPKVPFTWTEAHQEAFGRIKEALLSAPALALPDLTKPFALYVDEKEGVARGVLTQTLGPWRRPVAYLSKKLDPVASGWPTCLKAIAAVALLLKDADKLTLGQNVLVIAPHNLESIVRQPPDRWMTNARMTHYQSLLLNERVSFAPPAILNPATLLPVESDDTPIHICSEILAEETGTRPDLRDQPLPGVPAWYTDGSSFIMDGRRQAGAAIVDNKRTVWASNLPEGTSAQKAELIALTQALRLAEGKSINIYTDSRYAFATAHVHGAIYKQRGWLTSAGKDIKNKEEILALLEAIHLPKRVAIIHCPGHQRGTDPVATGNRKADEAAKQAAQSTRILTETTKNAGKRTADGSEFEKRTADGSEFESPKKKAKVE

SEQ ID NO: 1677 - protein, 2127 aa, synthetic construct
  source 1..2127: note = Description of Artificial Sequence: Synthetic polypeptide
MPAAKRVKLDGGDKKYSIGLDIGTNSVGWAVITDEYKVPSKKFKVLGNTDRHSIKKNLIGALLFDSGETAEATRLKRTARRRYTRRKNRICYLQEIFSNEMAKVDDSFFHRLEESFLVEEDKKHERHPIFGNIVDEVAYHEKYPTIYHLRKKLVDSTDKADLRLIYLALAHMIKFRGHFLIEGDLNPDNSDVDKLFIQLVQTYNQLFEENPINASGVDAKAILSARLSKSRRLENLIAQLPGEKKNGLFGNLIALSLGLTPNFKSNFDLAEDAKLQLSKDTYDDDLDNLLAQIGDQYADLFLAAKNLSDAILLSDILRVNTEITKAPLSASMIKRYDEHHQDLTLLKALVRQQLPEKYKEIFFDQSKNGYAGYIDGGASQEEFYKFIKPILEKMDGTEELLVKLNREDLLRKQRTFDNGSIPHQIHLGELHAILRRQEDFYPFLKDNREKIEKILTFRIPYYVGPLARGNSRFAWMTRKSEETITPWNFEEVVDKGASAQSFIERMTNFDKNLPNEKVLPKHSLLYEYFTVYNELTKVKYVTEGMRKPAFLSGEQKKAIVDLLFKTNRKVTVKQLKEDYFKKIECFDSVEISGVEDRFNASLGTYHDLLKIIKDKDFLDNEENEDILEDIVLTLTLFEDREMIEERLKTYAHLFDDKVMKQLKRRRYTGWGRLSRKLINGIRDKQSGKTILDFLKSDGFANRNFMQLIHDDSLTFKEDIQKAQVSGQGDSLHEHIANLAGSPAIKKGILQTVKVVDELVKVMGRHKPENIVIEMARENQTTQKGQKNSRERMKRIEEGIKELGSQILKEHPVENTQLQNEKLYLYYLQNGRDMYVDQELDINRLSDYDVDHIVPQSFLKDDSIDNKVLTRSDKARGKSDNVPSEEVVKKMKNYWRQLLNAKLITQRKFDNLTKAERGGLSELDKAGFIKRQLVETRQITKHVAQILDSRMNTKYDENDKLIREVKVITLKSKLVSDFRKDFQFYKVREINNYHHAHDAYLNAVVGTALIKKYPKLESEFVYGDYKVYDVRKMIAKSEQEIGKATAKYFFYSNIMNFFKTEITLANGEIRKRPLIETNGETGEIVWDKGRDFATVRKVLSMPQVNIVKKTEVQTGGFSKESILPKRNSDKLIARKKDWDPKKYGGFDSPTVAYSVLVVAKVEKGKSKKLKSVKELLGITIMERSSFEKNPIDFLEAKGYKEVKKDLIIKLPKYSLFELENGRKRMLASAGELQKGNELALPSKYVNFLYLASHYEKLKGSPEDNEQKQLFVEQHKHYLDEIIEQISEFSKRVILADANLDKVLSAYNKHRDKPIREQAENIIHLFTLTNLGAPAAFKYFDTTIDRKRYTSTKEVLDATLIHQSITGLYETRIDLSQLGGDGGEAAAKGGGGSSGGLLGRDLLTKLKAQIQFSTEGPQVTWEDRPAMCLVLNLEEEYRLHEKPVPPSIDPSWLQLFPMVWAEKAGMGLANQVPPVVVELKSDASPVAVRQYPMSKEAREGIRPHIQRFLDLGILVPCQSPWNTPLLPVKKPGTNDYRPVQDLREVNKRVQDIHPTVPNPYNLLSSLPPSHTWYSVLDLKDAFFCLKLHPNSQPLFAFEWRDPEKGNTGQLTWTRLPQGFKNSPTLFNEALHRDLASFRALNPQVVMLQYVDDLLVAAPTYRDCKEGTRRLLQELSKLGYRVSAKKAQLCREEVTYLGYLLKGGKRWLTPARKATVMKIPTPTTPRQVREFLGKAGFCRLFIPGFASLAAPLYPLTRPKVPFTWTEAHQEAFGRIKEALLSAPALALPDLTKPFALYVDEKEGVARGVLTQTLGPWRRPVAYLSKKLDPVASGWPTCLKAIAAVALLLKDADKLTLGQNVLVIAPHNLESIVRQPPDRWMTNARMTHYQSLLLNERVSFAPPAILNPATLLPVESDDTPIHICSEILAEETGTRPDLRDQPLPGVPAWYTDGSSFIMDGRRQAGAAIVDNKRTVWASNLPEGTSAQKAELIALTQALRLAEGKSINIYTDSRYAFATAHVHGAIYKQRGWLTSAGKDIKNKEEILALLEAIHLPKRVAIIHCPGHQRGTDPVATGNRKADEAAKQAAQSTRILTETTKNAGKRTADGSEFEKRTADGSEFESPKKKAKVE

SEQ ID NO: 1678 - protein, 2128 aa, synthetic construct
  source 1..2128: note = Description of Artificial Sequence: Synthetic polypeptide
MPAAKRVKLDGGDKKYSIGLDIGTNSVGWAVITDEYKVPSKKFKVLGNTDRHSIKKNLIGALLFDSGETAEATRLKRTARRRYTRRKNRICYLQEIFSNEMAKVDDSFFHRLEESFLVEEDKKHERHPIFGNIVDEVAYHEKYPTIYHLRKKLVDSTDKADLRLIYLALAHMIKFRGHFLIEGDLNPDNSDVDKLFIQLVQTYNQLFEENPINASGVDAKAILSARLSKSRRLENLIAQLPGEKKNGLFGNLIALSLGLTPNFKSNFDLAEDAKLQLSKDTYDDDLDNLLAQIGDQYADLFLAAKNLSDAILLSDILRVNTEITKAPLSASMIKRYDEHHQDLTLLKALVRQQLPEKYKEIFFDQSKNGYAGYIDGGASQEEFYKFIKPILEKMDGTEELLVKLNREDLLRKQRTFDNGSIPHQIHLGELHAILRRQEDFYPFLKDNREKIEKILTFRIPYYVGPLARGNSRFAWMTRKSEETITPWNFEEVVDKGASAQSFIERMTNFDKNLPNEKVLPKHSLLYEYFTVYNELTKVKYVTEGMRKPAFLSGEQKKAIVDLLFKTNRKVTVKQLKEDYFKKIECFDSVEISGVEDRFNASLGTYHDLLKIIKDKDFLDNEENEDILEDIVLTLTLFEDREMIEERLKTYAHLFDDKVMKQLKRRRYTGWGRLSRKLINGIRDKQSGKTILDFLKSDGFANRNFMQLIHDDSLTFKEDIQKAQVSGQGDSLHEHIANLAGSPAIKKGILQTVKVVDELVKVMGRHKPENIVIEMARENQTTQKGQKNSRERMKRIEEGIKELGSQILKEHPVENTQLQNEKLYLYYLQNGRDMYVDQELDINRLSDYDVDHIVPQSFLKDDSIDNKVLTRSDKARGKSDNVPSEEVVKKMKNYWRQLLNAKLITQRKFDNLTKAERGGLSELDKAGFIKRQLVETRQITKHVAQILDSRMNTKYDENDKLIREVKVITLKSKLVSDFRKDFQFYKVREINNYHHAHDAYLNAVVGTALIKKYPKLESEFVYGDYKVYDVRKMIAKSEQEIGKATAKYFFYSNIMNFFKTEITLANGEIRKRPLIETNGETGEIVWDKGRDFATVRKVLSMPQVNIVKKTEVQTGGFSKESILPKRNSDKLIARKKDWDPKKYGGFDSPTVAYSVLVVAKVEKGKSKKLKSVKELLGITIMERSSFEKNPIDFLEAKGYKEVKKDLIIKLPKYSLFELENGRKRMLASAGELQKGNELALPSKYVNFLYLASHYEKLKGSPEDNEQKQLFVEQHKHYLDEIIEQISEFSKRVILADANLDKVLSAYNKHRDKPIREQAENIIHLFTLTNLGAPAAFKYFDTTIDRKRYTSTKEVLDATLIHQSITGLYETRIDLSQLGGDGGGGSGGSGGSGGSGGLLGRDLLTKLKAQIQFSTEGPQVTWEDRPAMCLVLNLEEEYRLHEKPVPPSIDPSWLQLFPMVWAEKAGMGLANQVPPVVVELKSDASPVAVRQYPMSKEAREGIRPHIQRFLDLGILVPCQSPWNTPLLPVKKPGTNDYRPVQDLREVNKRVQDIHPTVPNPYNLLSSLPPSHTWYSVLDLKDAFFCLKLHPNSQPLFAFEWRDPEKGNTGQLTWTRLPQGFKNSPTLFNEALHRDLASFRALNPQVVMLQYVDDLLVAAPTYRDCKEGTRRLLQELSKLGYRVSAKKAQLCREEVTYLGYLLKGGKRWLTPARKATVMKIPTPTTPRQVREFLGKAGFCRLFIPGFASLAAPLYPLTRPKVPFTWTEAHQEAFGRIKEALLSAPALALPDLTKPFALYVDEKEGVARGVLTQTLGPWRRPVAYLSKKLDPVASGWPTCLKAIAAVALLLKDADKLTLGQNVLVIAPHNLESIVRQPPDRWMTNARMTHYQSLLLNERVSFAPPAILNPATLLPVESDDTPIHICSEILAEETGTRPDLRDQPLPGVPAWYTDGSSFIMDGRRQAGAAIVDNKRTVWASNLPEGTSAQKAELIALTQALRLAEGKSINIYTDSRYAFATAHVHGAIYKQRGWLTSAGKDIKNKEEILALLEAIHLPKRVAIIHCPGHQRGTDPVATGNRKADEAAKQAAQSTRILTETTKNAGKRTADGSEFEKRTADGSEFESPKKKAKVE

SEQ ID NO: 1679 - protein, 2124 aa, synthetic construct
  source 1..2124: note = Description of Artificial Sequence: Synthetic polypeptide
MPAAKRVKLDGGDKKYSIGLDIGTNSVGWAVITDEYKVPSKKFKVLGNTDRHSIKKNLIGALLFDSGETAEATRLKRTARRRYTRRKNRICYLQEIFSNEMAKVDDSFFHRLEESFLVEEDKKHERHPIFGNIVDEVAYHEKYPTIYHLRKKLVDSTDKADLRLIYLALAHMIKFRGHFLIEGDLNPDNSDVDKLFIQLVQTYNQLFEENPINASGVDAKAILSARLSKSRRLENLIAQLPGEKKNGLFGNLIALSLGLTPNFKSNFDLAEDAKLQLSKDTYDDDLDNLLAQIGDQYADLFLAAKNLSDAILLSDILRVNTEITKAPLSASMIKRYDEHHQDLTLLKALVRQQLPEKYKEIFFDQSKNGYAGYIDGGASQEEFYKFIKPILEKMDGTEELLVKLNREDLLRKQRTFDNGSIPHQIHLGELHAILRRQEDFYPFLKDNREKIEKILTFRIPYYVGPLARGNSRFAWMTRKSEETITPWNFEEVVDKGASAQSFIERMTNFDKNLPNEKVLPKHSLLYEYFTVYNELTKVKYVTEGMRKPAFLSGEQKKAIVDLLFKTNRKVTVKQLKEDYFKKIECFDSVEISGVEDRFNASLGTYHDLLKIIKDKDFLDNEENEDILEDIVLTLTLFEDREMIEERLKTYAHLFDDKVMKQLKRRRYTGWGRLSRKLINGIRDKQSGKTILDFLKSDGFANRNFMQLIHDDSLTFKEDIQKAQVSGQGDSLHEHIANLAGSPAIKKGILQTVKVVDELVKVMGRHKPENIVIEMARENQTTQKGQKNSRERMKRIEEGIKELGSQILKEHPVENTQLQNEKLYLYYLQNGRDMYVDQELDINRLSDYDVDHIVPQSFLKDDSIDNKVLTRSDKARGKSDNVPSEEVVKKMKNYWRQLLNAKLITQRKFDNLTKAERGGLSELDKAGFIKRQLVETRQITKHVAQILDSRMNTKYDENDKLIREVKVITLKSKLVSDFRKDFQFYKVREINNYHHAHDAYLNAVVGTALIKKYPKLESEFVYGDYKVYDVRKMIAKSEQEIGKATAKYFFYSNIMNFFKTEITLANGEIRKRPLIETNGETGEIVWDKGRDFATVRKVLSMPQVNIVKKTEVQTGGFSKESILPKRNSDKLIARKKDWDPKKYGGFDSPTVAYSVLVVAKVEKGKSKKLKSVKELLGITIMERSSFEKNPIDFLEAKGYKEVKKDLIIKLPKYSLFELENGRKRMLASAGELQKGNELALPSKYVNFLYLASHYEKLKGSPEDNEQKQLFVEQHKHYLDEIIEQISEFSKRVILADANLDKVLSAYNKHRDKPIREQAENIIHLFTLTNLGAPAAFKYFDTTIDRKRYTSTKEVLDATLIHQSITGLYETRIDLSQLGGDGGEAAAKGGSGGLLGRDLLTKLKAQIQFSTEGPQVTWEDRPAMCLVLNLEEEYRLHEKPVPPSIDPSWLQLFPMVWAEKAGMGLANQVPPVVVELKSDASPVAVRQYPMSKEAREGIRPHIQRFLDLGILVPCQSPWNTPLLPVKKPGTNDYRPVQDLREVNKRVQDIHPTVPNPYNLLSSLPPSHTWYSVLDLKDAFFCLKLHPNSQPLFAFEWRDPEKGNTGQLTWTRLPQGFKNSPTLFNEALHRDLASFRALNPQVVMLQYVDDLLVAAPTYRDCKEGTRRLLQELSKLGYRVSAKKAQLCREEVTYLGYLLKGGKRWLTPARKATVMKIPTPTTPRQVREFLGKAGFCRLFIPGFASLAAPLYPLTRPKVPFTWTEAHQEAFGRIKEALLSAPALALPDLTKPFALYVDEKEGVARGVLTQTLGPWRRPVAYLSKKLDPVASGWPTCLKAIAAVALLLKDADKLTLGQNVLVIAPHNLESIVRQPPDRWMTNARMTHYQSLLLNERVSFAPPAILNPATLLPVESDDTPIHICSEILAEETGTRPDLRDQPLPGVPAWYTDGSSFIMDGRRQAGAAIVDNKRTVWASNLPEGTSAQKAELIALTQALRLAEGKSINIYTDSRYAFATAHVHGAIYKQRGWLTSAGKDIKNKEEILALLEAIHLPKRVAIIHCPGHQRGTDPVATGNRKADEAAKQAAQSTRILTETTKNAGKRTADGSEFEKRTADGSEFESPKKKAKVE

SEQ ID NO: 1680 - protein, 2123 aa, synthetic construct
  source 1..2123: note = Description of Artificial Sequence: Synthetic polypeptide
MPAAKRVKLDGGDKKYSIGLDIGTNSVGWAVITDEYKVPSKKFKVLGNTDRHSIKKNLIGALLFDSGETAEATRLKRTARRRYTRRKNRICYLQEIFSNEMAKVDDSFFHRLEESFLVEEDKKHERHPIFGNIVDEVAYHEKYPTIYHLRKKLVDSTDKADLRLIYLALAHMIKFRGHFLIEGDLNPDNSDVDKLFIQLVQTYNQLFEENPINASGVDAKAILSARLSKSRRLENLIAQLPGEKKNGLFGNLIALSLGLTPNFKSNFDLAEDAKLQLSKDTYDDDLDNLLAQIGDQYADLFLAAKNLSDAILLSDILRVNTEITKAPLSASMIKRYDEHHQDLTLLKALVRQQLPEKYKEIFFDQSKNGYAGYIDGGASQEEFYKFIKPILEKMDGTEELLVKLNREDLLRKQRTFDNGSIPHQIHLGELHAILRRQEDFYPFLKDNREKIEKILTFRIPYYVGPLARGNSRFAWMTRKSEETITPWNFEEVVDKGASAQSFIERMTNFDKNLPNEKVLPKHSLLYEYFTVYNELTKVKYVTEGMRKPAFLSGEQKKAIVDLLFKTNRKVTVKQLKEDYFKKIECFDSVEISGVEDRFNASLGTYHDLLKIIKDKDFLDNEENEDILEDIVLTLTLFEDREMIEERLKTYAHLFDDKVMKQLKRRRYTGWGRLSRKLINGIRDKQSGKTILDFLKSDGFANRNFMQLIHDDSLTFKEDIQKAQVSGQGDSLHEHIANLAGSPAIKKGILQTVKVVDELVKVMGRHKPENIVIEMARENQTTQKGQKNSRERMKRIEEGIKELGSQILKEHPVENTQLQNEKLYLYYLQNGRDMYVDQELDINRLSDYDVDHIVPQSFLKDDSIDNKVLTRSDKARGKSDNVPSEEVVKKMKNYWRQLLNAKLITQRKFDNLTKAERGGLSELDKAGFIKRQLVETRQITKHVAQILDSRMNTKYDENDKLIREVKVITLKSKLVSDFRKDFQFYKVREINNYHHAHDAYLNAVVGTALIKKYPKLESEFVYGDYKVYDVRKMIAKSEQEIGKATAKYFFYSNIMNFFKTEITLANGEIRKRPLIETNGETGEIVWDKGRDFATVRKVLSMPQVNIVKKTEVQTGGFSKESILPKRNSDKLIARKKDWDPKKYGGFDSPTVAYSVLVVAKVEKGKSKKLKSVKELLGITIMERSSFEKNPIDFLEAKGYKEVKKDLIIKLPKYSLFELENGRKRMLASAGELQKGNELALPSKYVNFLYLASHYEKLKGSPEDNEQKQLFVEQHKHYLDEIIEQISEFSKRVILADANLDKVLSAYNKHRDKPIREQAENIIHLFTLTNLGAPAAFKYFDTTIDRKRYTSTKEVLDATLIHQSITGLYETRIDLSQLGGDGGPAPAPAPGGLLGRDLLTKLKAQIQFSTEGPQVTWEDRPAMCLVLNLEEEYRLHEKPVPPSIDPSWLQLFPMVWAEKAGMGLANQVPPVVVELKSDASPVAVRQYPMSKEAREGIRPHIQRFLDLGILVPCQSPWNTPLLPVKKPGTNDYRPVQDLREVNKRVQDIHPTVPNPYNLLSSLPPSHTWYSVLDLKDAFFCLKLHPNSQPLFAFEWRDPEKGNTGQLTWTRLPQGFKNSPTLFNEALHRDLASFRALNPQVVMLQYVDDLLVAAPTYRDCKEGTRRLLQELSKLGYRVSAKKAQLCREEVTYLGYLLKGGKRWLTPARKATVMKIPTPTTPRQVREFLGKAGFCRLFIPGFASLAAPLYPLTRPKVPFTWTEAHQEAFGRIKEALLSAPALALPDLTKPFALYVDEKEGVARGVLTQTLGPWRRPVAYLSKKLDPVASGWPTCLKAIAAVALLLKDADKLTLGQNVLVIAPHNLESIVRQPPDRWMTNARMTHYQSLLLNERVSFAPPAILNPATLLPVESDDTPIHICSEILAEETGTRPDLRDQPLPGVPAWYTDGSSFIMDGRRQAGAAIVDNKRTVWASNLPEGTSAQKAELIALTQALRLAEGKSINIYTDSRYAFATAHVHGAIYKQRGWLTSAGKDIKNKEEILALLEAIHLPKRVAIIHCPGHQRGTDPVATGNRKADEAAKQAAQSTRILTETTKNAGKRTADGSEFEKRTADGSEFESPKKKAKVE

SEQ ID NO: 1681 - protein, 2131 aa, synthetic construct
  source 1..2131: note = Description of Artificial Sequence: Synthetic polypeptide
MPAAKRVKLDGGDKKYSIGLDIGTNSVGWAVITDEYKVPSKKFKVLGNTDRHSIKKNLIGALLFDSGETAEATRLKRTARRRYTRRKNRICYLQEIFSNEMAKVDDSFFHRLEESFLVEEDKKHERHPIFGNIVDEVAYHEKYPTIYHLRKKLVDSTDKADLRLIYLALAHMIKFRGHFLIEGDLNPDNSDVDKLFIQLVQTYNQLFEENPINASGVDAKAILSARLSKSRRLENLIAQLPGEKKNGLFGNLIALSLGLTPNFKSNFDLAEDAKLQLSKDTYDDDLDNLLAQIGDQYADLFLAAKNLSDAILLSDILRVNTEITKAPLSASMIKRYDEHHQDLTLLKALVRQQLPEKYKEIFFDQSKNGYAGYIDGGASQEEFYKFIKPILEKMDGTEELLVKLNREDLLRKQRTFDNGSIPHQIHLGELHAILRRQEDFYPFLKDNREKIEKILTFRIPYYVGPLARGNSRFAWMTRKSEETITPWNFEEVVDKGASAQSFIERMTNFDKNLPNEKVLPKHSLLYEYFTVYNELTKVKYVTEGMRKPAFLSGEQKKAIVDLLFKTNRKVTVKQLKEDYFKKIECFDSVEISGVEDRFNASLGTYHDLLKIIKDKDFLDNEENEDILEDIVLTLTLFEDREMIEERLKTYAHLFDDKVMKQLKRRRYTGWGRLSRKLINGIRDKQSGKTILDFLKSDGFANRNFMQLIHDDSLTFKEDIQKAQVSGQGDSLHEHIANLAGSPAIKKGILQTVKVVDELVKVMGRHKPENIVIEMARENQTTQKGQKNSRERMKRIEEGIKELGSQILKEHPVENTQLQNEKLYLYYLQNGRDMYVDQELDINRLSDYDVDHIVPQSFLKDDSIDNKVLTRSDKARGKSDNVPSEEVVKKMKNYWRQLLNAKLITQRKFDNLTKAERGGLSELDKAGFIKRQLVETRQITKHVAQILDSRMNTKYDENDKLIREVKVITLKSKLVSDFRKDFQFYKVREINNYHHAHDAYLNAVVGTALIKKYPKLESEFVYGDYKVYDVRKMIAKSEQEIGKATAKYFFYSNIMNFFKTEITLANGEIRKRPLIETNGETGEIVWDKGRDFATVRKVLSMPQVNIVKKTEVQTGGFSKESILPKRNSDKLIARKKDWDPKKYGGFDSPTVAYSVLVVAKVEKGKSKKLKSVKELLGITIMERSSFEKNPIDFLEAKGYKEVKKDLIIKLPKYSLFELENGRKRMLASAGELQKGNELALPSKYVNFLYLASHYEKLKGSPEDNEQKQLFVEQHKHYLDEIIEQISEFSKRVILADANLDKVLSAYNKHRDKPIREQAENIIHLFTLTNLGAPAAFKYFDTTIDRKRYTSTKEVLDATLIHQSITGLYETRIDLSQLGGDGGGSSGSSGSSGSSGSSGGLLGRDLLTKLKAQIQFSTEGPQVTWEDRPAMCLVLNLEEEYRLHEKPVPPSIDPSWLQLFPMVWAEKAGMGLANQVPPVVVELKSDASPVAVRQYPMSKEAREGIRPHIQRFLDLGILVPCQSPWNTPLLPVKKPGTNDYRPVQDLREVNKRVQDIHPTVPNPYNLLSSLPPSHTWYSVLDLKDAFFCLKLHPNSQPLFAFEWRDPEKGNTGQLTWTRLPQGFKNSPTLFNEALHRDLASFRALNPQVVMLQYVDDLLVAAPTYRDCKEGTRRLLQELSKLGYRVSAKKAQLCREEVTYLGYLLKGGKRWLTPARKATVMKIPTPTTPRQVREFLGKAGFCRLFIPGFASLAAPLYPLTRPKVPFTWTEAHQEAFGRIKEALLSAPALALPDLTKPFALYVDEKEGVARGVLTQTLGPWRRPVAYLSKKLDPVASGWPTCLKAIAAVALLLKDADKLTLGQNVLVIAPHNLESIVRQPPDRWMTNARMTHYQSLLLNERVSFAPPAILNPATLLPVESDDTPIHICSEILAEETGTRPDLRDQPLPGVPAWYTDGSSFIMDGRRQAGAAIVDNKRTVWASNLPEGTSAQKAELIALTQALRLAEGKSINIYTDSRYAFATAHVHGAIYKQRGWLTSAGKDIKNKEEILALLEAIHLPKRVAIIHCPGHQRGTDPVATGNRKADEAAKQAAQSTRILTETTKNAGKRTADGSEFEKRTADGSEFESPKKKAKVE

SEQ ID NO: 1682 - protein, 2127 aa, synthetic construct
  source 1..2127: note = Description of Artificial Sequence: Synthetic polypeptide
MPAAKRVKLDGGDKKYSIGLDIGTNSVGWAVITDEYKVPSKKFKVLGNTDRHSIKKNLIGALLFDSGETAEATRLKRTARRRYTRRKNRICYLQEIFSNEMAKVDDSFFHRLEESFLVEEDKKHERHPIFGNIVDEVAYHEKYPTIYHLRKKLVDSTDKADLRLIYLALAHMIKFRGHFLIEGDLNPDNSDVDKLFIQLVQTYNQLFEENPINASGVDAKAILSARLSKSRRLENLIAQLPGEKKNGLFGNLIALSLGLTPNFKSNFDLAEDAKLQLSKDTYDDDLDNLLAQIGDQYADLFLAAKNLSDAILLSDILRVNTEITKAPLSASMIKRYDEHHQDLTLLKALVRQQLPEKYKEIFFDQSKNGYAGYIDGGASQEEFYKFIKPILEKMDGTEELLVKLNREDLLRKQRTFDNGSIPHQIHLGELHAILRRQEDFYPFLKDNREKIEKILTFRIPYYVGPLARGNSRFAWMTRKSEETITPWNFEEVVDKGASAQSFIERMTNFDKNLPNEKVLPKHSLLYEYFTVYNELTKVKYVTEGMRKPAFLSGEQKKAIVDLLFKTNRKVTVKQLKEDYFKKIECFDSVEISGVEDRFNASLGTYHDLLKIIKDKDFLDNEENEDILEDIVLTLTLFEDREMIEERLKTYAHLFDDKVMKQLKRRRYTGWGRLSRKLINGIRDKQSGKTILDFLKSDGFANRNFMQLIHDDSLTFKEDIQKAQVSGQGDSLHEHIANLAGSPAIKKGILQTVKVVDELVKVMGRHKPENIVIEMARENQTTQKGQKNSRERMKRIEEGIKELGSQILKEHPVENTQLQNEKLYLYYLQNGRDMYVDQELDINRLSDYDVDHIVPQSFLKDDSIDNKVLTRSDKARGKSDNVPSEEVVKKMKNYWRQLLNAKLITQRKFDNLTKAERGGLSELDKAGFIKRQLVETRQITKHVAQILDSRMNTKYDENDKLIREVKVITLKSKLVSDFRKDFQFYKVREINNYHHAHDAYLNAVVGTALIKKYPKLESEFVYGDYKVYDVRKMIAKSEQEIGKATAKYFFYSNIMNFFKTEITLANGEIRKRPLIETNGETGEIVWDKGRDFATVRKVLSMPQVNIVKKTEVQTGGFSKESILPKRNSDKLIARKKDWDPKKYGGFDSPTVAYSVLVVAKVEKGKSKKLKSVKELLGITIMERSSFEKNPIDFLEAKGYKEVKKDLIIKLPKYSLFELENGRKRMLASAGELQKGNELALPSKYVNFLYLASHYEKLKGSPEDNEQKQLFVEQHKHYLDEIIEQISEFSKRVILADANLDKVLSAYNKHRDKPIREQAENIIHLFTLTNLGAPAAFKYFDTTIDRKRYTSTKEVLDATLIHQSITGLYETRIDLSQLGGDGGGGGGGSEAAAKGGLLGRDLLTKLKAQIQFSTEGPQVTWEDRPAMCLVLNLEEEYRLHEKPVPPSIDPSWLQLFPMVWAEKAGMGLANQVPPVVVELKSDASPVAVRQYPMSKEAREGIRPHIQRFLDLGILVPCQSPWNTPLLPVKKPGTNDYRPVQDLREVNKRVQDIHPTVPNPYNLLSSLPPSHTWYSVLDLKDAFFCLKLHPNSQPLFAFEWRDPEKGNTGQLTWTRLPQGFKNSPTLFNEALHRDLASFRALNPQVVMLQYVDDLLVAAPTYRDCKEGTRRLLQELSKLGYRVSAKKAQLCREEVTYLGYLLKGGKRWLTPARKATVMKIPTPTTPRQVREFLGKAGFCRLFIPGFASLAAPLYPLTRPKVPFTWTEAHQEAFGRIKEALLSAPALALPDLTKPFALYVDEKEGVARGVLTQTLGPWRRPVAYLSKKLDPVASGWPTCLKAIAAVALLLKDADKLTLGQNVLVIAPHNLESIVRQPPDRWMTNARMTHYQSLLLNERVSFAPPAILNPATLLPVESDDTPIHICSEILAEETGTRPDLRDQPLPGVPAWYTDGSSFIMDGRRQAGAAIVDNKRTVWASNLPEGTSAQKAELIALTQALRLAEGKSINIYTDSRYAFATAHVHGAIYKQRGWLTSAGKDIKNKEEILALLEAIHLPKRVAIIHCPGHQRGTDPVATGNRKADEAAKQAAQSTRILTETTKNAGKRTADGSEFEKRTADGSEFESPKKKAKVE

SEQ ID NO: 1683 - protein, 2125 aa, synthetic construct
  source 1..2125: note = Description of Artificial Sequence: Synthetic polypeptide
MPAAKRVKLDGGDKKYSIGLDIGTNSVGWAVITDEYKVPSKKFKVLGNTDRHSIKKNLIGALLFDSGETAEATRLKRTARRRYTRRKNRICYLQEIFSNEMAKVDDSFFHRLEESFLVEEDKKHERHPIFGNIVDEVAYHEKYPTIYHLRKKLVDSTDKADLRLIYLALAHMIKFRGHFLIEGDLNPDNSDVDKLFIQLVQTYNQLFEENPINASGVDAKAILSARLSKSRRLENLIAQLPGEKKNGLFGNLIALSLGLTPNFKSNFDLAEDAKLQLSKDTYDDDLDNLLAQIGDQYADLFLAAKNLSDAILLSDILRVNTEITKAPLSASMIKRYDEHHQDLTLLKALVRQQLPEKYKEIFFDQSKNGYAGYIDGGASQEEFYKFIKPILEKMDGTEELLVKLNREDLLRKQRTFDNGSIPHQIHLGELHAILRRQEDFYPFLKDNREKIEKILTFRIPYYVGPLARGNSRFAWMTRKSEETITPWNFEEVVDKGASAQSFIERMTNFDKNLPNEKVLPKHSLLYEYFTVYNELTKVKYVTEGMRKPAFLSGEQKKAIVDLLFKTNRKVTVKQLKEDYFKKIECFDSVEISGVEDRFNASLGTYHDLLKIIKDKDFLDNEENEDILEDIVLTLTLFEDREMIEERLKTYAHLFDDKVMKQLKRRRYTGWGRLSRKLINGIRDKQSGKTILDFLKSDGFANRNFMQLIHDDSLTFKEDIQKAQVSGQGDSLHEHIANLAGSPAIKKGILQTVKVVDELVKVMGRHKPENIVIEMARENQTTQKGQKNSRERMKRIEEGIKELGSQILKEHPVENTQLQNEKLYLYYLQNGRDMYVDQELDINRLSDYDVDHIVPQSFLKDDSIDNKVLTRSDKARGKSDNVPSEEVVKKMKNYWRQLLNAKLITQRKFDNLTKAERGGLSELDKAGFIKRQLVETRQITKHVAQILDSRMNTKYDENDKLIREVKVITLKSKLVSDFRKDFQFYKVREINNYHHAHDAYLNAVVGTALIKKYPKLESEFVYGDYKVYDVRKMIAKSEQEIGKATAKYFFYSNIMNFFKTEITLANGEIRKRPLIETNGETGEIVWDKGRDFATVRKVLSMPQVNIVKKTEVQTGGFSKESILPKRNSDKLIARKKDWDPKKYGGFDSPTVAYSVLVVAKVEKGKSKKLKSVKELLGITIMERSSFEKNPIDFLEAKGYKEVKKDLIIKLPKYSLFELENGRKRMLASAGELQKGNELALPSKYVNFLYLASHYEKLKGSPEDNEQKQLFVEQHKHYLDEIIEQISEFSKRVILADANLDKVLSAYNKHRDKPIREQAENIIHLFTLTNLGAPAAFKYFDTTIDRKRYTSTKEVLDATLIHQSITGLYETRIDLSQLGGDGGPAPGGSGSSGGLLGRDLLTKLKAQIQFSTEGPQVTWEDRPAMCLVLNLEEEYRLHEKPVPPSIDPSWLQLFPMVWAEKAGMGLANQVPPVVVELKSDASPVAVRQYPMSKEAREGIRPHIQRFLDLGILVPCQSPWNTPLLPVKKPGTNDYRPVQDLREVNKRVQDIHPTVPNPYNLLSSLPPSHTWYSVLDLKDAFFCLKLHPNSQPLFAFEWRDPEKGNTGQLTWTRLPQGFKNSPTLFNEALHRDLASFRALNPQVVMLQYVDDLLVAAPTYRDCKEGTRRLLQELSKLGYRVSAKKAQLCREEVTYLGYLLKGGKRWLTPARKATVMKIPTPTTPRQVREFLGKAGFCRLFIPGFASLAAPLYPLTRPKVPFTWTEAHQEAFGRIKEALLSAPALALPDLTKPFALYVDEKEGVARGVLTQTLGPWRRPVAYLSKKLDPVASGWPTCLKAIAAVALLLKDADKLTLGQNVLVIAPHNLESIVRQPPDRWMTNARMTHYQSLLLNERVSFAPPAILNPATLLPVESDDTPIHICSEILAEETGTRPDLRDQPLPGVPAWYTDGSSFIMDGRRQAGAAIVDNKRTVWASNLPEGTSAQKAELIALTQALRLAEGKSINIYTDSRYAFATAHVHGAIYKQRGWLTSAGKDIKNKEEILALLEAIHLPKRVAIIHCPGHQRGTDPVATGNRKADEAAKQAAQSTRILTETTKNAGKRTADGSEFEKRTADGSEFESPKKKAKVE

SEQ ID NO: 1684 - protein, 2127 aa, synthetic construct
  source 1..2127: note = Description of Artificial Sequence: Synthetic polypeptide
MPAAKRVKLDGGDKKYSIGLDIGTNSVGWAVITDEYKVPSKKFKVLGNTDRHSIKKNLIGALLFDSGETAEATRLKRTARRRYTRRKNRICYLQEIFSNEMAKVDDSFFHRLEESFLVEEDKKHERHPIFGNIVDEVAYHEKYPTIYHLRKKLVDSTDKADLRLIYLALAHMIKFRGHFLIEGDLNPDNSDVDKLFIQLVQTYNQLFEENPINASGVDAKAILSARLSKSRRLENLIAQLPGEKKNGLFGNLIALSLGLTPNFKSNFDLAEDAKLQLSKDTYDDDLDNLLAQIGDQYADLFLAAKNLSDAILLSDILRVNTEITKAPLSASMIKRYDEHHQDLTLLKALVRQQLPEKYKEIFFDQSKNGYAGYIDGGASQEEFYKFIKPILEKMDGTEELLVKLNREDLLRKQRTFDNGSIPHQIHLGELHAILRRQEDFYPFLKDNREKIEKILTFRIPYYVGPLARGNSRFAWMTRKSEETITPWNFEEVVDKGASAQSFIERMTNFDKNLPNEKVLPKHSLLYEYFTVYNELTKVKYVTEGMRKPAFLSGEQKKAIVDLLFKTNRKVTVKQLKEDYFKKIECFDSVEISGVEDRFNASLGTYHDLLKIIKDKDFLDNEENEDILEDIVLTLTLFEDREMIEERLKTYAHLFDDKVMKQLKRRRYTGWGRLSRKLINGIRDKQSGKTILDFLKSDGFANRNFMQLIHDDSLTFKEDIQKAQVSGQGDSLHEHIANLAGSPAIKKGILQTVKVVDELVKVMGRHKPENIVIEMARENQTTQKGQKNSRERMKRIEEGIKELGSQILKEHPVENTQLQNEKLYLYYLQNGRDMYVDQELDINRLSDYDVDHIVPQSFLKDDSIDNKVLTRSDKARGKSDNVPSEEVVKKMKNYWRQLLNAKLITQRKFDNLTKAERGGLSELDKAGFIKRQLVETRQITKHVAQILDSRMNTKYDENDKLIREVKVITLKSKLVSDFRKDFQFYKVREINNYHHAHDAYLNAVVGTALIKKYPKLESEFVYGDYKVYDVRKMIAKSEQEIGKATAKYFFYSNIMNFFKTEITLANGEIRKRPLIETNGETGEIVWDKGRDFATVRKVLSMPQVNIVKKTEVQTGGFSKESILPKRNSDKLIARKKDWDPKKYGGFDSPTVAYSVLVVAKVEKGKSKKLKSVKELLGITIMERSSFEKNPIDFLEAKGYKEVKKDLIIKLPKYSLFELENGRKRMLASAGELQKGNELALPSKYVNFLYLASHYEKLKGSPEDNEQKQLFVEQHKHYLDEIIEQISEFSKRVILADANLDKVLSAYNKHRDKPIREQAENIIHLFTLTNLGAPAAFKYFDTTIDRKRYTSTKEVLDATLIHQSITGLYETRIDLSQLGGDGGPAPAPAPAPAPGGLLGRDLLTKLKAQIQFSTEGPQVTWEDRPAMCLVLNLEEEYRLHEKPVPPSIDPSWLQLFPMVWAEKAGMGLANQVPPVVVELKSDASPVAVRQYPMSKEAREGIRPHIQRFLDLGILVPCQSPWNTPLLPVKKPGTNDYRPVQDLREVNKRVQDIHPTVPNPYNLLSSLPPSHTWYSVLDLKDAFFCLKLHPNSQPLFAFEWRDPEKGNTGQLTWTRLPQGFKNSPTLFNEALHRDLASFRALNPQVVMLQYVDDLLVAAPTYRDCKEGTRRLLQELSKLGYRVSAKKAQLCREEVTYLGYLLKGGKRWLTPARKATVMKIPTPTTPRQVREFLGKAGFCRLFIPGFASLAAPLYPLTRPKVPFTWTEAHQEAFGRIKEALLSAPALALPDLTKPFALYVDEKEGVARGVLTQTLGPWRRPVAYLSKKLDPVASGWPTCLKAIAAVALLLKDADKLTLGQNVLVIAPHNLESIVRQPPDRWMTNARMTHYQSLLLNERVSFAPPAILNPATLLPVESDDTPIHICSEILAEETGTRPDLRDQPLPGVPAWYTDGSSFIMDGRRQAGAAIVDNKRTVWASNLPEGTSAQKAELIALTQALRLAEGKSINIYTDSRYAFATAHVHGAIYKQRGWLTSAGKDIKNKEEILALLEAIHLPKRVAIIHCPGHQRGTDPVATGNRKADEAAKQAAQSTRILTETTKNAGKRTADGSEFEKRTADGSEFESPKKKAKVE

SEQ ID NO: 1685 - protein, 2127 aa, synthetic construct
  source 1..2127: note = Description of Artificial Sequence: Synthetic polypeptide
MPAAKRVKLDGGDKKYSIGLDIGTNSVGWAVITDEYKVPSKKFKVLGNTDRHSIKKNLIGALLFDSGETAEATRLKRTARRRYTRRKNRICYLQEIFSNEMAKVDDSFFHRLEESFLVEEDKKHERHPIFGNIVDEVAYHEKYPTIYHLRKKLVDSTDKADLRLIYLALAHMIKFRGHFLIEGDLNPDNSDVDKLFIQLVQTYNQLFEENPINASGVDAKAILSARLSKSRRLENLIAQLPGEKKNGLFGNLIALSLGLTPNFKSNFDLAEDAKLQLSKDTYDDDLDNLLAQIGDQYADLFLAAKNLSDAILLSDILRVNTEITKAPLSASMIKRYDEHHQDLTLLKALVRQQLPEKYKEIFFDQSKNGYAGYIDGGASQEEFYKFIKPILEKMDGTEELLVKLNREDLLRKQRTFDNGSIPHQIHLGELHAILRRQEDFYPFLKDNREKIEKILTFRIPYYVGPLARGNSRFAWMTRKSEETITPWNFEEVVDKGASAQSFIERMTNFDKNLPNEKVLPKHSLLYEYFTVYNELTKVKYVTEGMRKPAFLSGEQKKAIVDLLFKTNRKVTVKQLKEDYFKKIECFDSVEISGVEDRFNASLGTYHDLLKIIKDKDFLDNEENEDILEDIVLTLTLFEDREMIEERLKTYAHLFDDKVMKQLKRRRYTGWGRLSRKLINGIRDKQSGKTILDFLKSDGFANRNFMQLIHDDSLTFKEDIQKAQVSGQGDSLHEHIANLAGSPAIKKGILQTVKVVDELVKVMGRHKPENIVIEMARENQTTQKGQKNSRERMKRIEEGIKELGSQILKEHPVENTQLQNEKLYLYYLQNGRDMYVDQELDINRLSDYDVDHIVPQSFLKDDSIDNKVLTRSDKARGKSDNVPSEEVVKKMKNYWRQLLNAKLITQRKFDNLTKAERGGLSELDKAGFIKRQLVETRQITKHVAQILDSRMNTKYDENDKLIREVKVITLKSKLVSDFRKDFQFYKVREINNYHHAHDAYLNAVVGTALIKKYPKLESEFVYGDYKVYDVRKMIAKSEQEIGKATAKYFFYSNIMNFFKTEITLANGEIRKRPLIETNGETGEIVWDKGRDFATVRKVLSMPQVNIVKKTEVQTGGFSKESILPKRNSDKLIARKKDWDPKKYGGFDSPTVAYSVLVVAKVEKGKSKKLKSVKELLGITIMERSSFEKNPIDFLEAKGYKEVKKDLIIKLPKYSLFELENGRKRMLASAGELQKGNELALPSKYVNFLYLASHYEKLKGSPEDNEQKQLFVEQHKHYLDEIIEQISEFSKRVILADANLDKVLSAYNKHRDKPIREQAENIIHLFTLTNLGAPAAFKYFDTTIDRKRYTSTKEVLDATLIHQSITGLYETRIDLSQLGGDGGEAAAKPAPGGGGGLLGRDLLTKLKAQIQFSTEGPQVTWEDRPAMCLVLNLEEEYRLHEKPVPPSIDPSWLQLFPMVWAEKAGMGLANQVPPVVVELKSDASPVAVRQYPMSKEAREGIRPHIQRFLDLGILVPCQSPWNTPLLPVKKPGTNDYRPVQDLREVNKRVQDIHPTVPNPYNLLSSLPPSHTWYSVLDLKDAFFCLKLHPNSQPLFAFEWRDPEKGNTGQLTWTRLPQGFKNSPTLFNEALHRDLASFRALNPQVVMLQYVDDLLVAAPTYRDCKEGTRRLLQELSKLGYRVSAKKAQLCREEVTYLGYLLKGGKRWLTPARKATVMKIPTPTTPRQVREFLGKAGFCRLFIPGFASLAAPLYPLTRPKVPFTWTEAHQEAFGRIKEALLSAPALALPDLTKPFALYVDEKEGVARGVLTQTLGPWRRPVAYLSKKLDPVASGWPTCLKAIAAVALLLKDADKLTLGQNVLVIAPHNLESIVRQPPDRWMTNARMTHYQSLLLNERVSFAPPAILNPATLLPVESDDTPIHICSEILAEETGTRPDLRDQPLPGVPAWYTDGSSFIMDGRRQAGAAIVDNKRTVWASNLPEGTSAQKAELIALTQALRLAEGKSINIYTDSRYAFATAHVHGAIYKQRGWLTSAGKDIKNKEEILALLEAIHLPKRVAIIHCPGHQRGTDPVATGNRKADEAAKQAAQSTRILTETTKNAGKRTADGSEFEKRTADGSEFESPKKKAKVE

SEQ ID NO: 1686 - protein, 2125 aa, synthetic construct
  source 1..2125: note = Description of Artificial Sequence: Synthetic polypeptide
MPAAKRVKLDGGDKKYSIGLDIGTNSVGWAVITDEYKVPSKKFKVLGNTDRHSIKKNLIGALLFDSGETAEATRLKRTARRRYTRRKNRICYLQEIFSNEMAKVDDSFFHRLEESFLVEEDKKHERHPIFGNIVDEVAYHEKYPTIYHLRKKLVDSTDKADLRLIYLALAHMIKFRGHFLIEGDLNPDNSDVDKLFIQLVQTYNQLFEENPINASGVDAKAILSARLSKSRRLENLIAQLPGEKKNGLFGNLIALSLGLTPNFKSNFDLAEDAKLQLSKDTYDDDLDNLLAQIGDQYADLFLAAKNLSDAILLSDILRVNTEITKAPLSASMIKRYDEHHQDLTLLKALVRQQLPEKYKEIFFDQSKNGYAGYIDGGASQEEFYKFIKPILEKMDGTEELLVKLNREDLLRKQRTFDNGSIPHQIHLGELHAILRRQEDFYPFLKDNREKIEKILTFRIPYYVGPLARGNSRFAWMTRKSEETITPWNFEEVVDKGASAQSFIERMTNFDKNLPNEKVLPKHSLLYEYFTVYNELTKVKYVTEGMRKPAFLSGEQKKAIVDLLFKTNRKVTVKQLKEDYFKKIECFDSVEISGVEDRFNASLGTYHDLLKIIKDKDFLDNEENEDILEDIVLTLTLFEDREMIEERLKTYAHLFDDKVMKQLKRRRYTGWGRLSRKLINGIRDKQSGKTILDFLKSDGFANRNFMQLIHDDSLTFKEDIQKAQVSGQGDSLHEHIANLAGSPAIKKGILQTVKVVDELVKVMGRHKPENIVIEMARENQTTQKGQKNSRERMKRIEEGIKELGSQILKEHPVENTQLQNEKLYLYYLQNGRDMYVDQELDINRLSDYDVDHIVPQSFLKDDSIDNKVLTRSDKARGKSDNVPSEEVVKKMKNYWRQLLNAKLITQRKFDNLTKAERGGLSELDKAGFIKRQLVETRQITKHVAQILDSRMNTKYDENDKLIREVKVITLKSKLVSDFRKDFQFYKVREINNYHHAHDAYLNAVVGTALIKKYPKLESEFVYGDYKVYDVRKMIAKSEQEIGKATAKYFFYSNIMNFFKTEITLANGEIRKRPLIETNGETGEIVWDKGRDFATVRKVLSMPQVNIVKKTEVQTGGFSKESILPKRNSDKLIARKKDWDPKKYGGFDSPTVAYSVLVVAKVEKGKSKKLKSVKELLGITIMERSSFEKNPIDFLEAKGYKEVKKDLIIKLPKYSLFELENGRKRMLASAGELQKGNELALPSKYVNFLYLASHYEKLKGSPEDNEQKQLFVEQHKHYLDEIIEQISEFSKRVILADANLDKVLSAYNKHRDKPIREQAENIIHLFTLTNLGAPAAFKYFDTTIDRKRYTSTKEVLDATLIHQSITGLYETRIDLSQLGGDGGGGSGGSGGSGGLLGRDLLTKLKAQIQFSTEGPQVTWEDRPAMCLVLNLEEEYRLHEKPVPPSIDPSWLQLFPMVWAEKAGMGLANQVPPVVVELKSDASPVAVRQYPMSKEAREGIRPHIQRFLDLGILVPCQSPWNTPLLPVKKPGTNDYRPVQDLREVNKRVQDIHPTVPNPYNLLSSLPPSHTWYSVLDLKDAFFCLKLHPNSQPLFAFEWRDPEKGNTGQLTWTRLPQGFKNSPTLFNEALHRDLASFRALNPQVVMLQYVDDLLVAAPTYRDCKEGTRRLLQELSKLGYRVSAKKAQLCREEVTYLGYLLKGGKRWLTPARKATVMKIPTPTTPRQVREFLGKAGFCRLFIPGFASLAAPLYPLTRPKVPFTWTEAHQEAFGRIKEALLSAPALALPDLTKPFALYVDEKEGVARGVLTQTLGPWRRPVAYLSKKLDPVASGWPTCLKAIAAVALLLKDADKLTLGQNVLVIAPHNLESIVRQPPDRWMTNARMTHYQSLLLNERVSFAPPAILNPATLLPVESDDTPIHICSEILAEETGTRPDLRDQPLPGVPAWYTDGSSFIMDGRRQAGAAIVDNKRTVWASNLPEGTSAQKAELIALTQALRLAEGKSINIYTDSRYAFATAHVHGAIYKQRGWLTSAGKDIKNKEEILALLEAIHLPKRVAIIHCPGHQRGTDPVATGNRKADEAAKQAAQSTRILTETTKNAGKRTADGSEFEKRTADGSEFESPKKKAKVE

SEQ ID NO: 1687 - protein, 2127 aa, synthetic construct
  source 1..2127: note = Description of Artificial Sequence: Synthetic polypeptide
MPAAKRVKLDGGDKKYSIGLDIGTNSVGWAVITDEYKVPSKKFKVLGNTDRHSIKKNLIGALLFDSGETAEATRLKRTARRRYTRRKNRICYLQEIFSNEMAKVDDSFFHRLEESFLVEEDKKHERHPIFGNIVDEVAYHEKYPTIYHLRKKLVDSTDKADLRLIYLALAHMIKFRGHFLIEGDLNPDNSDVDKLFIQLVQTYNQLFEENPINASGVDAKAILSARLSKSRRLENLIAQLPGEKKNGLFGNLIALSLGLTPNFKSNFDLAEDAKLQLSKDTYDDDLDNLLAQIGDQYADLFLAAKNLSDAILLSDILRVNTEITKAPLSASMIKRYDEHHQDLTLLKALVRQQLPEKYKEIFFDQSKNGYAGYIDGGASQEEFYKFIKPILEKMDGTEELLVKLNREDLLRKQRTFDNGSIPHQIHLGELHAILRRQEDFYPFLKDNREKIEKILTFRIPYYVGPLARGNSRFAWMTRKSEETITPWNFEEVVDKGASAQSFIERMTNFDKNLPNEKVLPKHSLLYEYFTVYNELTKVKYVTEGMRKPAFLSGEQKKAIVDLLFKTNRKVTVKQLKEDYFKKIECFDSVEISGVEDRFNASLGTYHDLLKIIKDKDFLDNEENEDILEDIVLTLTLFEDREMIEERLKTYAHLFDDKVMKQLKRRRYTGWGRLSRKLINGIRDKQSGKTILDFLKSDGFANRNFMQLIHDDSLTFKEDIQKAQVSGQGDSLHEHIANLAGSPAIKKGILQTVKVVDELVKVMGRHKPENIVIEMARENQTTQKGQKNSRERMKRIEEGIKELGSQILKEHPVENTQLQNEKLYLYYLQNGRDMYVDQELDINRLSDYDVDHIVPQSFLKDDSIDNKVLTRSDKARGKSDNVPSEEVVKKMKNYWRQLLNAKLITQRKFDNLTKAERGGLSELDKAGFIKRQLVETRQITKHVAQILDSRMNTKYDENDKLIREVKVITLKSKLVSDFRKDFQFYKVREINNYHHAHDAYLNAVVGTALIKKYPKLESEFVYGDYKVYDVRKMIAKSEQEIGKATAKYFFYSNIMNFFKTEITLANGEIRKRPLIETNGETGEIVWDKGRDFATVRKVLSMPQVNIVKKTEVQTGGFSKESILPKRNSDKLIARKKDWDPKKYGGFDSPTVAYSVLVVAKVEKGKSKKLKSVKELLGITIMERSSFEKNPIDFLEAKGYKEVKKDLIIKLPKYSLFELENGRKRMLASAGELQKGNELALPSKYVNFLYLASHYEKLKGSPEDNEQKQLFVEQHKHYLDEIIEQISEFSKRVILADANLDKVLSAYNKHRDKPIREQAENIIHLFTLTNLGAPAAFKYFDTTIDRKRYTSTKEVLDATLIHQSITGLYETRIDLSQLGGDGGEAAAKPAPGSSGGLLGRDLLTKLKAQIQFSTEGPQVTWEDRPAMCLVLNLEEEYRLHEKPVPPSIDPSWLQLFPMVWAEKAGMGLANQVPPVVVELKSDASPVAVRQYPMSKEAREGIRPHIQRFLDLGILVPCQSPWNTPLLPVKKPGTNDYRPVQDLREVNKRVQDIHPTVPNPYNLLSSLPPSHTWYSVLDLKDAFFCLKLHPNSQPLFAFEWRDPEKGNTGQLTWTRLPQGFKNSPTLFNEALHRDLASFRALNPQVVMLQYVDDLLVAAPTYRDCKEGTRRLLQELSKLGYRVSAKKAQLCREEVTYLGYLLKGGKRWLTPARKATVMKIPTPTTPRQVREFLGKAGFCRLFIPGFASLAAPLYPLTRPKVPFTWTEAHQEAFGRIKEALLSAPALALPDLTKPFALYVDEKEGVARGVLTQTLGPWRRPVAYLSKKLDPVASGWPTCLKAIAAVALLLKDADKLTLGQNVLVIAPHNLESIVRQPPDRWMTNARMTHYQSLLLNERVSFAPPAILNPATLLPVESDDTPIHICSEILAEETGTRPDLRDQPLPGVPAWYTDGSSFIMDGRRQAGAAIVDNKRTVWASNLPEGTSAQKAELIALTQALRLAEGKSINIYTDSRYAFATAHVHGAIYKQRGWLTSAGKDIKNKEEILALLEAIHLPKRVAIIHCPGHQRGTDPVATGNRKADEAAKQAAQSTRILTETTKNAGKRTADGSEFEKRTADGSEFESPKKKAKVE

SEQ ID NO: 1688 - protein, 2127 aa, synthetic construct
  source 1..2127: note = Description of Artificial Sequence: Synthetic polypeptide
MPAAKRVKLDGGDKKYSIGLDIGTNSVGWAVITDEYKVPSKKFKVLGNTDRHSIKKNLIGALLFDSGETAEATRLKRTARRRYTRRKNRICYLQEIFSNEMAKVDDSFFHRLEESFLVEEDKKHERHPIFGNIVDEVAYHEKYPTIYHLRKKLVDSTDKADLRLIYLALAHMIKFRGHFLIEGDLNPDNSDVDKLFIQLVQTYNQLFEENPINASGVDAKAILSARLSKSRRLENLIAQLPGEKKNGLFGNLIALSLGLTPNFKSNFDLAEDAKLQLSKDTYDDDLDNLLAQIGDQYADLFLAAKNLSDAILLSDILRVNTEITKAPLSASMIKRYDEHHQDLTLLKALVRQQLPEKYKEIFFDQSKNGYAGYIDGGASQEEFYKFIKPILEKMDGTEELLVKLNREDLLRKQRTFDNGSIPHQIHLGELHAILRRQEDFYPFLKDNREKIEKILTFRIPYYVGPLARGNSRFAWMTRKSEETITPWNFEEVVDKGASAQSFIERMTNFDKNLPNEKVLPKHSLLYEYFTVYNELTKVKYVTEGMRKPAFLSGEQKKAIVDLLFKTNRKVTVKQLKEDYFKKIECFDSVEISGVEDRFNASLGTYHDLLKIIKDKDFLDNEENEDILEDIVLTLTLFEDREMIEERLKTYAHLFDDKVMKQLKRRRYTGWGRLSRKLINGIRDKQSGKTILDFLKSDGFANRNFMQLIHDDSLTFKEDIQKAQVSGQGDSLHEHIANLAGSPAIKKGILQTVKVVDELVKVMGRHKPENIVIEMARENQTTQKGQKNSRERMKRIEEGIKELGSQILKEHPVENTQLQNEKLYLYYLQNGRDMYVDQELDINRLSDYDVDHIVPQSFLKDDSIDNKVLTRSDKARGKSDNVPSEEVVKKMKNYWRQLLNAKLITQRKFDNLTKAERGGLSELDKAGFIKRQLVETRQITKHVAQILDSRMNTKYDENDKLIREVKVITLKSKLVSDFRKDFQFYKVREINNYHHAHDAYLNAVVGTALIKKYPKLESEFVYGDYKVYDVRKMIAKSEQEIGKATAKYFFYSNIMNFFKTEITLANGEIRKRPLIETNGETGEIVWDKGRDFATVRKVLSMPQVNIVKKTEVQTGGFSKESILPKRNSDKLIARKKDWDPKKYGGFDSPTVAYSVLVVAKVEKGKSKKLKSVKELLGITIMERSSFEKNPIDFLEAKGYKEVKKDLIIKLPKYSLFELENGRKRMLASAGELQKGNELALPSKYVNFLYLASHYEKLKGSPEDNEQKQLFVEQHKHYLDEIIEQISEFSKRVILADANLDKVLSAYNKHRDKPIREQAENIIHLFTLTNLGAPAAFKYFDTTIDRKRYTSTKEVLDATLIHQSITGLYETRIDLSQLGGDGGGGGEAAAKGSSGGLLGRDLLTKLKAQIQFSTEGPQVTWEDRPAMCLVLNLEEEYRLHEKPVPPSIDPSWLQLFPMVWAEKAGMGLANQVPPVVVELKSDASPVAVRQYPMSKEAREGIRPHIQRFLDLGILVPCQSPWNTPLLPVKKPGTNDYRPVQDLREVNKRVQDIHPTVPNPYNLLSSLPPSHTWYSVLDLKDAFFCLKLHPNSQPLFAFEWRDPEKGNTGQLTWTRLPQGFKNSPTLFNEALHRDLASFRALNPQVVMLQYVDDLLVAAPTYRDCKEGTRRLLQELSKLGYRVSAKKAQLCREEVTYLGYLLKGGKRWLTPARKATVMKIPTPTTPRQVREFLGKAGFCRLFIPGFASLAAPLYPLTRPKVPFTWTEAHQEAFGRIKEALLSAPALALPDLTKPFALYVDEKEGVARGVLTQTLGPWRRPVAYLSKKLDPVASGWPTCLKAIAAVALLLKDADKLTLGQNVLVIAPHNLESIVRQPPDRWMTNARMTHYQSLLLNERVSFAPPAILNPATLLPVESDDTPIHICSEILAEETGTRPDLRDQPLPGVPAWYTDGSSFIMDGRRQAGAAIVDNKRTVWASNLPEGTSAQKAELIALTQALRLAEGKSINIYTDSRYAFATAHVHGAIYKQRGWLTSAGKDIKNKEEILALLEAIHLPKRVAIIHCPGHQRGTDPVATGNRKADEAAKQAAQSTRILTETTKNAGKRTADGSEFEKRTADGSEFESPKKKAKVE

SEQ ID NO: 1689 - protein, 2121 aa, synthetic construct
  source 1..2121: note = Description of Artificial Sequence: Synthetic polypeptide
MPAAKRVKLDGGDKKYSIGLDIGTNSVGWAVITDEYKVPSKKFKVLGNTDRHSIKKNLIGALLFDSGETAEATRLKRTARRRYTRRKNRICYLQEIFSNEMAKVDDSFFHRLEESFLVEEDKKHERHPIFGNIVDEVAYHEKYPTIYHLRKKLVDSTDKADLRLIYLALAHMIKFRGHFLIEGDLNPDNSDVDKLFIQLVQTYNQLFEENPINASGVDAKAILSARLSKSRRLENLIAQLPGEKKNGLFGNLIALSLGLTPNFKSNFDLAEDAKLQLSKDTYDDDLDNLLAQIGDQYADLFLAAKNLSDAILLSDILRVNTEITKAPLSASMIKRYDEHHQDLTLLKALVRQQLPEKYKEIFFDQSKNGYAGYIDGGASQEEFYKFIKPILEKMDGTEELLVKLNREDLLRKQRTFDNGSIPHQIHLGELHAILRRQEDFYPFLKDNREKIEKILTFRIPYYVGPLARGNSRFAWMTRKSEETITPWNFEEVVDKGASAQSFIERMTNFDKNLPNEKVLPKHSLLYEYFTVYNELTKVKYVTEGMRKPAFLSGEQKKAIVDLLFKTNRKVTVKQLKEDYFKKIECFDSVEISGVEDRFNASLGTYHDLLKIIKDKDFLDNEENEDILEDIVLTLTLFEDREMIEERLKTYAHLFDDKVMKQLKRRRYTGWGRLSRKLINGIRDKQSGKTILDFLKSDGFANRNFMQLIHDDSLTFKEDIQKAQVSGQGDSLHEHIANLAGSPAIKKGILQTVKVVDELVKVMGRHKPENIVIEMARENQTTQKGQKNSRERMKRIEEGIKELGSQILKEHPVENTQLQNEKLYLYYLQNGRDMYVDQELDINRLSDYDVDHIVPQSFLKDDSIDNKVLTRSDKARGKSDNVPSEEVVKKMKNYWRQLLNAKLITQRKFDNLTKAERGGLSELDKAGFIKRQLVETRQITKHVAQILDSRMNTKYDENDKLIREVKVITLKSKLVSDFRKDFQFYKVREINNYHHAHDAYLNAVVGTALIKKYPKLESEFVYGDYKVYDVRKMIAKSEQEIGKATAKYFFYSNIMNFFKTEITLANGEIRKRPLIETNGETGEIVWDKGRDFATVRKVLSMPQVNIVKKTEVQTGGFSKESILPKRNSDKLIARKKDWDPKKYGGFDSPTVAYSVLVVAKVEKGKSKKLKSVKELLGITIMERSSFEKNPIDFLEAKGYKEVKKDLIIKLPKYSLFELENGRKRMLASAGELQKGNELALPSKYVNFLYLASHYEKLKGSPEDNEQKQLFVEQHKHYLDEIIEQISEFSKRVILADANLDKVLSAYNKHRDKPIREQAENIIHLFTLTNLGAPAAFKYFDTTIDRKRYTSTKEVLDATLIHQSITGLYETRIDLSQLGGDGGEAAAKGGLLGRDLLTKLKAQIQFSTEGPQVTWEDRPAMCLVLNLEEEYRLHEKPVPPSIDPSWLQLFPMVWAEKAGMGLANQVPPVVVELKSDASPVAVRQYPMSKEAREGIRPHIQRFLDLGILVPCQSPWNTPLLPVKKPGTNDYRPVQDLREVNKRVQDIHPTVPNPYNLLSSLPPSHTWYSVLDLKDAFFCLKLHPNSQPLFAFEWRDPEKGNTGQLTWTRLPQGFKNSPTLFNEALHRDLASFRALNPQVVMLQYVDDLLVAAPTYRDCKEGTRRLLQELSKLGYRVSAKKAQLCREEVTYLGYLLKGGKRWLTPARKATVMKIPTPTTPRQVREFLGKAGFCRLFIPGFASLAAPLYPLTRPKVPFTWTEAHQEAFGRIKEALLSAPALALPDLTKPFALYVDEKEGVARGVLTQTLGPWRRPVAYLSKKLDPVASGWPTCLKAIAAVALLLKDADKLTLGQNVLVIAPHNLESIVRQPPDRWMTNARMTHYQSLLLNERVSFAPPAILNPATLLPVESDDTPIHICSEILAEETGTRPDLRDQPLPGVPAWYTDGSSFIMDGRRQAGAAIVDNKRTVWASNLPEGTSAQKAELIALTQALRLAEGKSINIYTDSRYAFATAHVHGAIYKQRGWLTSAGKDIKNKEEILALLEAIHLPKRVAIIHCPGHQRGTDPVATGNRKADEAAKQAAQSTRILTETTKNAGKRTADGSEFEKRTADGSEFESPKKKAKVE

SEQ ID NO: 1690 - protein, 2127 aa, synthetic construct
  source 1..2127: note = Description of Artificial Sequence: Synthetic polypeptide
MPAAKRVKLDGGDKKYSIGLDIGTNSVGWAVITDEYKVPSKKFKVLGNTDRHSIKKNLIGALLFDSGETAEATRLKRTARRRYTRRKNRICYLQEIFSNEMAKVDDSFFHRLEESFLVEEDKKHERHPIFGNIVDEVAYHEKYPTIYHLRKKLVDSTDKADLRLIYLALAHMIKFRGHFLIEGDLNPDNSDVDKLFIQLVQTYNQLFEENPINASGVDAKAILSARLSKSRRLENLIAQLPGEKKNGLFGNLIALSLGLTPNFKSNFDLAEDAKLQLSKDTYDDDLDNLLAQIGDQYADLFLAAKNLSDAILLSDILRVNTEITKAPLSASMIKRYDEHHQDLTLLKALVRQQLPEKYKEIFFDQSKNGYAGYIDGGASQEEFYKFIKPILEKMDGTEELLVKLNREDLLRKQRTFDNGSIPHQIHLGELHAILRRQEDFYPFLKDNREKIEKILTFRIPYYVGPLARGNSRFAWMTRKSEETITPWNFEEVVDKGASAQSFIERMTNFDKNLPNEKVLPKHSLLYEYFTVYNELTKVKYVTEGMRKPAFLSGEQKKAIVDLLFKTNRKVTVKQLKEDYFKKIECFDSVEISGVEDRFNASLGTYHDLLKIIKDKDFLDNEENEDILEDIVLTLTLFEDREMIEERLKTYAHLFDDKVMKQLKRRRYTGWGRLSRKLINGIRDKQSGKTILDFLKSDGFANRNFMQLIHDDSLTFKEDIQKAQVSGQGDSLHEHIANLAGSPAIKKGILQTVKVVDELVKVMGRHKPENIVIEMARENQTTQKGQKNSRERMKRIEEGIKELGSQILKEHPVENTQLQNEKLYLYYLQNGRDMYVDQELDINRLSDYDVDHIVPQSFLKDDSIDNKVLTRSDKARGKSDNVPSEEVVKKMKNYWRQLLNAKLITQRKFDNLTKAERGGLSELDKAGFIKRQLVETRQITKHVAQILDSRMNTKYDENDKLIREVKVITLKSKLVSDFRKDFQFYKVREINNYHHAHDAYLNAVVGTALIKKYPKLESEFVYGDYKVYDVRKMIAKSEQEIGKATAKYFFYSNIMNFFKTEITLANGEIRKRPLIETNGETGEIVWDKGRDFATVRKVLSMPQVNIVKKTEVQTGGFSKESILPKRNSDKLIARKKDWDPKKYGGFDSPTVAYSVLVVAKVEKGKSKKLKSVKELLGITIMERSSFEKNPIDFLEAKGYKEVKKDLIIKLPKYSLFELENGRKRMLASAGELQKGNELALPSKYVNFLYLASHYEKLKGSPEDNEQKQLFVEQHKHYLDEIIEQISEFSKRVILADANLDKVLSAYNKHRDKPIREQAENIIHLFTLTNLGAPAAFKYFDTTIDRKRYTSTKEVLDATLIHQSITGLYETRIDLSQLGGDGGEAAAKGSSGGSGGLLGRDLLTKLKAQIQFSTEGPQVTWEDRPAMCLVLNLEEEYRLHEKPVPPSIDPSWLQLFPMVWAEKAGMGLANQVPPVVVELKSDASPVAVRQYPMSKEAREGIRPHIQRFLDLGILVPCQSPWNTPLLPVKKPGTNDYRPVQDLREVNKRVQDIHPTVPNPYNLLSSLPPSHTWYSVLDLKDAFFCLKLHPNSQPLFAFEWRDPEKGNTGQLTWTRLPQGFKNSPTLFNEALHRDLASFRALNPQVVMLQYVDDLLVAAPTYRDCKEGTRRLLQELSKLGYRVSAKKAQLCREEVTYLGYLLKGGKRWLTPARKATVMKIPTPTTPRQVREFLGKAGFCRLFIPGFASLAAPLYPLTRPKVPFTWTEAHQEAFGRIKEALLSAPALALPDLTKPFALYVDEKEGVARGVLTQTLGPWRRPVAYLSKKLDPVASGWPTCLKAIAAVALLLKDADKLTLGQNVLVIAPHNLESIVRQPPDRWMTNARMTHYQSLLLNERVSFAPPAILNPATLLPVESDDTPIHICSEILAEETGTRPDLRDQPLPGVPAWYTDGSSFIMDGRRQAGAAIVDNKRTVWASNLPEGTSAQKAELIALTQALRLAEGKSINIYTDSRYAFATAHVHGAIYKQRGWLTSAGKDIKNKEEILALLEAIHLPKRVAIIHCPGHQRGTDPVATGNRKADEAAKQAAQSTRILTETTKNAGKRTADGSEFEKRTADGSEFESPKKKAKVE

SEQ ID NO: 1691 - protein, 2125 aa, synthetic construct
  source 1..2125: note = Description of Artificial Sequence: Synthetic polypeptide
MPAAKRVKLDGGDKKYSIGLDIGTNSVGWAVITDEYKVPSKKFKVLGNTDRHSIKKNLIGALLFDSGETAEATRLKRTARRRYTRRKNRICYLQEIFSNEMAKVDDSFFHRLEESFLVEEDKKHERHPIFGNIVDEVAYHEKYPTIYHLRKKLVDSTDKADLRLIYLALAHMIKFRGHFLIEGDLNPDNSDVDKLFIQLVQTYNQLFEENPINASGVDAKAILSARLSKSRRLENLIAQLPGEKKNGLFGNLIALSLGLTPNFKSNFDLAEDAKLQLSKDTYDDDLDNLLAQIGDQYADLFLAAKNLSDAILLSDILRVNTEITKAPLSASMIKRYDEHHQDLTLLKALVRQQLPEKYKEIFFDQSKNGYAGYIDGGASQEEFYKFIKPILEKMDGTEELLVKLNREDLLRKQRTFDNGSIPHQIHLGELHAILRRQEDFYPFLKDNREKIEKILTFRIPYYVGPLARGNSRFAWMTRKSEETITPWNFEEVVDKGASAQSFIERMTNFDKNLPNEKVLPKHSLLYEYFTVYNELTKVKYVTEGMRKPAFLSGEQKKAIVDLLFKTNRKVTVKQLKEDYFKKIECFDSVEISGVEDRFNASLGTYHDLLKIIKDKDFLDNEENEDILEDIVLTLTLFEDREMIEERLKTYAHLFDDKVMKQLKRRRYTGWGRLSRKLINGIRDKQSGKTILDFLKSDGFANRNFMQLIHDDSLTFKEDIQKAQVSGQGDSLHEHIANLAGSPAIKKGILQTVKVVDELVKVMGRHKPENIVIEMARENQTTQKGQKNSRERMKRIEEGIKELGSQILKEHPVENTQLQNEKLYLYYLQNGRDMYVDQELDINRLSDYDVDHIVPQSFLKDDSIDNKVLTRSDKARGKSDNVPSEEVVKKMKNYWRQLLNAKLITQRKFDNLTKAERGGLSELDKAGFIKRQLVETRQITKHVAQILDSRMNTKYDENDKLIREVKVITLKSKLVSDFRKDFQFYKVREINNYHHAHDAYLNAVVGTALIKKYPKLESEFVYGDYKVYDVRKMIAKSEQEIGKATAKYFFYSNIMNFFKTEITLANGEIRKRPLIETNGETGEIVWDKGRDFATVRKVLSMPQVNIVKKTEVQTGGFSKESILPKRNSDKLIARKKDWDPKKYGGFDSPTVAYSVLVVAKVEKGKSKKLKSVKELLGITIMERSSFEKNPIDFLEAKGYKEVKKDLIIKLPKYSLFELENGRKRMLASAGELQKGNELALPSKYVNFLYLASHYEKLKGSPEDNEQKQLFVEQHKHYLDEIIEQISEFSKRVILADANLDKVLSAYNKHRDKPIREQAENIIHLFTLTNLGAPAAFKYFDTTIDRKRYTSTKEVLDATLIHQSITGLYETRIDLSQLGGDGGPAPGGGGSSGGLLGRDLLTKLKAQIQFSTEGPQVTWEDRPAMCLVLNLEEEYRLHEKPVPPSIDPSWLQLFPMVWAEKAGMGLANQVPPVVVELKSDASPVAVRQYPMSKEAREGIRPHIQRFLDLGILVPCQSPWNTPLLPVKKPGTNDYRPVQDLREVNKRVQDIHPTVPNPYNLLSSLPPSHTWYSVLDLKDAFFCLKLHPNSQPLFAFEWRDPEKGNTGQLTWTRLPQGFKNSPTLFNEALHRDLASFRALNPQVVMLQYVDDLLVAAPTYRDCKEGTRRLLQELSKLGYRVSAKKAQLCREEVTYLGYLLKGGKRWLTPARKATVMKIPTPTTPRQVREFLGKAGFCRLFIPGFASLAAPLYPLTRPKVPFTWTEAHQEAFGRIKEALLSAPALALPDLTKPFALYVDEKEGVARGVLTQTLGPWRRPVAYLSKKLDPVASGWPTCLKAIAAVALLLKDADKLTLGQNVLVIAPHNLESIVRQPPDRWMTNARMTHYQSLLLNERVSFAPPAILNPATLLPVESDDTPIHICSEILAEETGTRPDLRDQPLPGVPAWYTDGSSFIMDGRRQAGAAIVDNKRTVWASNLPEGTSAQKAELIALTQALRLAEGKSINIYTDSRYAFATAHVHGAIYKQRGWLTSAGKDIKNKEEILALLEAIHLPKRVAIIHCPGHQRGTDPVATGNRKADEAAKQAAQSTRILTETTKNAGKRTADGSEFEKRTADGSEFESPKKKAKVE

SEQ ID NO: 1692 - protein, 2119 aa, synthetic construct
  source 1..2119: note = Description of Artificial Sequence: Synthetic polypeptide
MPAAKRVKLDGGDKKYSIGLDIGTNSVGWAVITDEYKVPSKKFKVLGNTDRHSIKKNLIGALLFDSGETAEATRLKRTARRRYTRRKNRICYLQEIFSNEMAKVDDSFFHRLEESFLVEEDKKHERHPIFGNIVDEVAYHEKYPTIYHLRKKLVDSTDKADLRLIYLALAHMIKFRGHFLIEGDLNPDNSDVDKLFIQLVQTYNQLFEENPINASGVDAKAILSARLSKSRRLENLIAQLPGEKKNGLFGNLIALSLGLTPNFKSNFDLAEDAKLQLSKDTYDDDLDNLLAQIGDQYADLFLAAKNLSDAILLSDILRVNTEITKAPLSASMIKRYDEHHQDLTLLKALVRQQLPEKYKEIFFDQSKNGYAGYIDGGASQEEFYKFIKPILEKMDGTEELLVKLNREDLLRKQRTFDNGSIPHQIHLGELHAILRRQEDFYPFLKDNREKIEKILTFRIPYYVGPLARGNSRFAWMTRKSEETITPWNFEEVVDKGASAQSFIERMTNFDKNLPNEKVLPKHSLLYEYFTVYNELTKVKYVTEGMRKPAFLSGEQKKAIVDLLFKTNRKVTVKQLKEDYFKKIECFDSVEISGVEDRFNASLGTYHDLLKIIKDKDFLDNEENEDILEDIVLTLTLFEDREMIEERLKTYAHLFDDKVMKQLKRRRYTGWGRLSRKLINGIRDKQSGKTILDFLKSDGFANRNFMQLIHDDSLTFKEDIQKAQVSGQGDSLHEHIANLAGSPAIKKGILQTVKVVDELVKVMGRHKPENIVIEMARENQTTQKGQKNSRERMKRIEEGIKELGSQILKEHPVENTQLQNEKLYLYYLQNGRDMYVDQELDINRLSDYDVDHIVPQSFLKDDSIDNKVLTRSDKARGKSDNVPSEEVVKKMKNYWRQLLNAKLITQRKFDNLTKAERGGLSELDKAGFIKRQLVETRQITKHVAQILDSRMNTKYDENDKLIREVKVITLKSKLVSDFRKDFQFYKVREINNYHHAHDAYLNAVVGTALIKKYPKLESEFVYGDYKVYDVRKMIAKSEQEIGKATAKYFFYSNIMNFFKTEITLANGEIRKRPLIETNGETGEIVWDKGRDFATVRKVLSMPQVNIVKKTEVQTGGFSKESILPKRNSDKLIARKKDWDPKKYGGFDSPTVAYSVLVVAKVEKGKSKKLKSVKELLGITIMERSSFEKNPIDFLEAKGYKEVKKDLIIKLPKYSLFELENGRKRMLASAGELQKGNELALPSKYVNFLYLASHYEKLKGSPEDNEQKQLFVEQHKHYLDEIIEQISEFSKRVILADANLDKVLSAYNKHRDKPIREQAENIIHLFTLTNLGAPAAFKYFDTTIDRKRYTSTKEVLDATLIHQSITGLYETRIDLSQLGGDGGPAPGGLLGRDLLTKLKAQIQFSTEGPQVTWEDRPAMCLVLNLEEEYRLHEKPVPPSIDPSWLQLFPMVWAEKAGMGLANQVPPVVVELKSDASPVAVRQYPMSKEAREGIRPHIQRFLDLGILVPCQSPWNTPLLPVKKPGTNDYRPVQDLREVNKRVQDIHPTVPNPYNLLSSLPPSHTWYSVLDLKDAFFCLKLHPNSQPLFAFEWRDPEKGNTGQLTWTRLPQGFKNSPTLFNEALHRDLASFRALNPQVVMLQYVDDLLVAAPTYRDCKEGTRRLLQELSKLGYRVSAKKAQLCREEVTYLGYLLKGGKRWLTPARKATVMKIPTPTTPRQVREFLGKAGFCRLFIPGFASLAAPLYPLTRPKVPFTWTEAHQEAFGRIKEALLSAPALALPDLTKPFALYVDEKEGVARGVLTQTLGPWRRPVAYLSKKLDPVASGWPTCLKAIAAVALLLKDADKLTLGQNVLVIAPHNLESIVRQPPDRWMTNARMTHYQSLLLNERVSFAPPAILNPATLLPVESDDTPIHICSEILAEETGTRPDLRDQPLPGVPAWYTDGSSFIMDGRRQAGAAIVDNKRTVWASNLPEGTSAQKAELIALTQALRLAEGKSINIYTDSRYAFATAHVHGAIYKQRGWLTSAGKDIKNKEEILALLEAIHLPKRVAIIHCPGHQRGTDPVATGNRKADEAAKQAAQSTRILTETTKNAGKRTADGSEFEKRTADGSEFESPKKKAKVE

SEQ ID NO: 1693 - protein, 2128 aa, synthetic construct
  source 1..2128: note = Description of Artificial Sequence: Synthetic polypeptide
MPAAKRVKLDGGDKKYSIGLDIGTNSVGWAVITDEYKVPSKKFKVLGNTDRHSIKKNLIGALLFDSGETAEATRLKRTARRRYTRRKNRICYLQEIFSNEMAKVDDSFFHRLEESFLVEEDKKHERHPIFGNIVDEVAYHEKYPTIYHLRKKLVDSTDKADLRLIYLALAHMIKFRGHFLIEGDLNPDNSDVDKLFIQLVQTYNQLFEENPINASGVDAKAILSARLSKSRRLENLIAQLPGEKKNGLFGNLIALSLGLTPNFKSNFDLAEDAKLQLSKDTYDDDLDNLLAQIGDQYADLFLAAKNLSDAILLSDILRVNTEITKAPLSASMIKRYDEHHQDLTLLKALVRQQLPEKYKEIFFDQSKNGYAGYIDGGASQEEFYKFIKPILEKMDGTEELLVKLNREDLLRKQRTFDNGSIPHQIHLGELHAILRRQEDFYPFLKDNREKIEKILTFRIPYYVGPLARGNSRFAWMTRKSEETITPWNFEEVVDKGASAQSFIERMTNFDKNLPNEKVLPKHSLLYEYFTVYNELTKVKYVTEGMRKPAFLSGEQKKAIVDLLFKTNRKVTVKQLKEDYFKKIECFDSVEISGVEDRFNASLGTYHDLLKIIKDKDFLDNEENEDILEDIVLTLTLFEDREMIEERLKTYAHLFDDKVMKQLKRRRYTGWGRLSRKLINGIRDKQSGKTILDFLKSDGFANRNFMQLIHDDSLTFKEDIQKAQVSGQGDSLHEHIANLAGSPAIKKGILQTVKVVDELVKVMGRHKPENIVIEMARENQTTQKGQKNSRERMKRIEEGIKELGSQILKEHPVENTQLQNEKLYLYYLQNGRDMYVDQELDINRLSDYDVDHIVPQSFLKDDSIDNKVLTRSDKARGKSDNVPSEEVVKKMKNYWRQLLNAKLITQRKFDNLTKAERGGLSELDKAGFIKRQLVETRQITKHVAQILDSRMNTKYDENDKLIREVKVITLKSKLVSDFRKDFQFYKVREINNYHHAHDAYLNAVVGTALIKKYPKLESEFVYGDYKVYDVRKMIAKSEQEIGKATAKYFFYSNIMNFFKTEITLANGEIRKRPLIETNGETGEIVWDKGRDFATVRKVLSMPQVNIVKKTEVQTGGFSKESILPKRNSDKLIARKKDWDPKKYGGFDSPTVAYSVLVVAKVEKGKSKKLKSVKELLGITIMERSSFEKNPIDFLEAKGYKEVKKDLIIKLPKYSLFELENGRKRMLASAGELQKGNELALPSKYVNFLYLASHYEKLKGSPEDNEQKQLFVEQHKHYLDEIIEQISEFSKRVILADANLDKVLSAYNKHRDKPIREQAENIIHLFTLTNLGAPAAFKYFDTTIDRKRYTSTKEVLDATLIHQSITGLYETRIDLSQLGGDGGGSAGSAAGSGEFGGLLGRDLLTKLKAQIQFSTEGPQVTWEDRPAMCLVLNLEEEYRLHEKPVPPSIDPSWLQLFPMVWAEKAGMGLANQVPPVVVELKSDASPVAVRQYPMSKEAREGIRPHIQRFLDLGILVPCQSPWNTPLLPVKKPGTNDYRPVQDLREVNKRVQDIHPTVPNPYNLLSSLPPSHTWYSVLDLKDAFFCLKLHPNSQPLFAFEWRDPEKGNTGQLTWTRLPQGFKNSPTLFNEALHRDLASFRALNPQVVMLQYVDDLLVAAPTYRDCKEGTRRLLQELSKLGYRVSAKKAQLCREEVTYLGYLLKGGKRWLTPARKATVMKIPTPTTPRQVREFLGKAGFCRLFIPGFASLAAPLYPLTRPKVPFTWTEAHQEAFGRIKEALLSAPALALPDLTKPFALYVDEKEGVARGVLTQTLGPWRRPVAYLSKKLDPVASGWPTCLKAIAAVALLLKDADKLTLGQNVLVIAPHNLESIVRQPPDRWMTNARMTHYQSLLLNERVSFAPPAILNPATLLPVESDDTPIHICSEILAEETGTRPDLRDQPLPGVPAWYTDGSSFIMDGRRQAGAAIVDNKRTVWASNLPEGTSAQKAELIALTQALRLAEGKSINIYTDSRYAFATAHVHGAIYKQRGWLTSAGKDIKNKEEILALLEAIHLPKRVAIIHCPGHQRGTDPVATGNRKADEAAKQAAQSTRILTETTKNAGKRTADGSEFEKRTADGSEFESPKKKAKVE

SEQ ID NO: 1694 - protein, 2125 aa, synthetic construct
  source 1..2125: note = Description of Artificial Sequence: Synthetic polypeptide
MPAAKRVKLDGGDKKYSIGLDIGTNSVGWAVITDEYKVPSKKFKVLGNTDRHSIKKNLIGALLFDSGETAEATRLKRTARRRYTRRKNRICYLQEIFSNEMAKVDDSFFHRLEESFLVEEDKKHERHPIFGNIVDEVAYHEKYPTIYHLRKKLVDSTDKADLRLIYLALAHMIKFRGHFLIEGDLNPDNSDVDKLFIQLVQTYNQLFEENPINASGVDAKAILSARLSKSRRLENLIAQLPGEKKNGLFGNLIALSLGLTPNFKSNFDLAEDAKLQLSKDTYDDDLDNLLAQIGDQYADLFLAAKNLSDAILLSDILRVNTEITKAPLSASMIKRYDEHHQDLTLLKALVRQQLPEKYKEIFFDQSKNGYAGYIDGGASQEEFYKFIKPILEKMDGTEELLVKLNREDLLRKQRTFDNGSIPHQIHLGELHAILRRQEDFYPFLKDNREKIEKILTFRIPYYVGPLARGNSRFAWMTRKSEETITPWNFEEVVDKGASAQSFIERMTNFDKNLPNEKVLPKHSLLYEYFTVYNELTKVKYVTEGMRKPAFLSGEQKKAIVDLLFKTNRKVTVKQLKEDYFKKIECFDSVEISGVEDRFNASLGTYHDLLKIIKDKDFLDNEENEDILEDIVLTLTLFEDREMIEERLKTYAHLFDDKVMKQLKRRRYTGWGRLSRKLINGIRDKQSGKTILDFLKSDGFANRNFMQLIHDDSLTFKEDIQKAQVSGQGDSLHEHIANLAGSPAIKKGILQTVKVVDELVKVMGRHKPENIVIEMARENQTTQKGQKNSRERMKRIEEGIKELGSQILKEHPVENTQLQNEKLYLYYLQNGRDMYVDQELDINRLSDYDVDHIVPQSFLKDDSIDNKVLTRSDKARGKSDNVPSEEVVKKMKNYWRQLLNAKLITQRKFDNLTKAERGGLSELDKAGFIKRQLVETRQITKHVAQILDSRMNTKYDENDKLIREVKVITLKSKLVSDFRKDFQFYKVREINNYHHAHDAYLNAVVGTALIKKYPKLESEFVYGDYKVYDVRKMIAKSEQEIGKATAKYFFYSNIMNFFKTEITLANGEIRKRPLIETNGETGEIVWDKGRDFATVRKVLSMPQVNIVKKTEVQTGGFSKESILPKRNSDKLIARKKDWDPKKYGGFDSPTVAYSVLVVAKVEKGKSKKLKSVKELLGITIMERSSFEKNPIDFLEAKGYKEVKKDLIIKLPKYSLFELENGRKRMLASAGELQKGNELALPSKYVNFLYLASHYEKLKGSPEDNEQKQLFVEQHKHYLDEIIEQISEFSKRVILADANLDKVLSAYNKHRDKPIREQAENIIHLFTLTNLGAPAAFKYFDTTIDRKRYTSTKEVLDATLIHQSITGLYETRIDLSQLGGDGGGSSPAPGGGGGLLGRDLLTKLKAQIQFSTEGPQVTWEDRPAMCLVLNLEEEYRLHEKPVPPSIDPSWLQLFPMVWAEKAGMGLANQVPPVVVELKSDASPVAVRQYPMSKEAREGIRPHIQRFLDLGILVPCQSPWNTPLLPVKKPGTNDYRPVQDLREVNKRVQDIHPTVPNPYNLLSSLPPSHTWYSVLDLKDAFFCLKLHPNSQPLFAFEWRDPEKGNTGQLTWTRLPQGFKNSPTLFNEALHRDLASFRALNPQVVMLQYVDDLLVAAPTYRDCKEGTRRLLQELSKLGYRVSAKKAQLCREEVTYLGYLLKGGKRWLTPARKATVMKIPTPTTPRQVREFLGKAGFCRLFIPGFASLAAPLYPLTRPKVPFTWTEAHQEAFGRIKEALLSAPALALPDLTKPFALYVDEKEGVARGVLTQTLGPWRRPVAYLSKKLDPVASGWPTCLKAIAAVALLLKDADKLTLGQNVLVIAPHNLESIVRQPPDRWMTNARMTHYQSLLLNERVSFAPPAILNPATLLPVESDDTPIHICSEILAEETGTRPDLRDQPLPGVPAWYTDGSSFIMDGRRQAGAAIVDNKRTVWASNLPEGTSAQKAELIALTQALRLAEGKSINIYTDSRYAFATAHVHGAIYKQRGWLTSAGKDIKNKEEILALLEAIHLPKRVAIIHCPGHQRGTDPVATGNRKADEAAKQAAQSTRILTETTKNAGKRTADGSEFEKRTADGSEFESPKKKAKVE

SEQ ID NO: 1695 - protein, 2122 aa, synthetic construct
  source 1..2122: note = Description of Artificial Sequence: Synthetic polypeptide
MPAAKRVKLDGGDKKYSIGLDIGTNSVGWAVITDEYKVPSKKFKVLGNTDRHSIKKNLIGALLFDSGETAEATRLKRTARRRYTRRKNRICYLQEIFSNEMAKVDDSFFHRLEESFLVEEDKKHERHPIFGNIVDEVAYHEKYPTIYHLRKKLVDSTDKADLRLIYLALAHMIKFRGHFLIEGDLNPDNSDVDKLFIQLVQTYNQLFEENPINASGVDAKAILSARLSKSRRLENLIAQLPGEKKNGLFGNLIALSLGLTPNFKSNFDLAEDAKLQLSKDTYDDDLDNLLAQIGDQYADLFLAAKNLSDAILLSDILRVNTEITKAPLSASMIKRYDEHHQDLTLLKALVRQQLPEKYKEIFFDQSKNGYAGYIDGGASQEEFYKFIKPILEKMDGTEELLVKLNREDLLRKQRTFDNGSIPHQIHLGELHAILRRQEDFYPFLKDNREKIEKILTFRIPYYVGPLARGNSRFAWMTRKSEETITPWNFEEVVDKGASAQSFIERMTNFDKNLPNEKVLPKHSLLYEYFTVYNELTKVKYVTEGMRKPAFLSGEQKKAIVDLLFKTNRKVTVKQLKEDYFKKIECFDSVEISGVEDRFNASLGTYHDLLKIIKDKDFLDNEENEDILEDIVLTLTLFEDREMIEERLKTYAHLFDDKVMKQLKRRRYTGWGRLSRKLINGIRDKQSGKTILDFLKSDGFANRNFMQLIHDDSLTFKEDIQKAQVSGQGDSLHEHIANLAGSPAIKKGILQTVKVVDELVKVMGRHKPENIVIEMARENQTTQKGQKNSRERMKRIEEGIKELGSQILKEHPVENTQLQNEKLYLYYLQNGRDMYVDQELDINRLSDYDVDHIVPQSFLKDDSIDNKVLTRSDKARGKSDNVPSEEVVKKMKNYWRQLLNAKLITQRKFDNLTKAERGGLSELDKAGFIKRQLVETRQITKHVAQILDSRMNTKYDENDKLIREVKVITLKSKLVSDFRKDFQFYKVREINNYHHAHDAYLNAVVGTALIKKYPKLESEFVYGDYKVYDVRKMIAKSEQEIGKATAKYFFYSNIMNFFKTEITLANGEIRKRPLIETNGETGEIVWDKGRDFATVRKVLSMPQVNIVKKTEVQTGGFSKESILPKRNSDKLIARKKDWDPKKYGGFDSPTVAYSVLVVAKVEKGKSKKLKSVKELLGITIMERSSFEKNPIDFLEAKGYKEVKKDLIIKLPKYSLFELENGRKRMLASAGELQKGNELALPSKYVNFLYLASHYEKLKGSPEDNEQKQLFVEQHKHYLDEIIEQISEFSKRVILADANLDKVLSAYNKHRDKPIREQAENIIHLFTLTNLGAPAAFKYFDTTIDRKRYTSTKEVLDATLIHQSITGLYETRIDLSQLGGDGGPAPGSSGGLLGRDLLTKLKAQIQFSTEGPQVTWEDRPAMCLVLNLEEEYRLHEKPVPPSIDPSWLQLFPMVWAEKAGMGLANQVPPVVVELKSDASPVAVRQYPMSKEAREGIRPHIQRFLDLGILVPCQSPWNTPLLPVKKPGTNDYRPVQDLREVNKRVQDIHPTVPNPYNLLSSLPPSHTWYSVLDLKDAFFCLKLHPNSQPLFAFEWRDPEKGNTGQLTWTRLPQGFKNSPTLFNEALHRDLASFRALNPQVVMLQYVDDLLVAAPTYRDCKEGTRRLLQELSKLGYRVSAKKAQLCREEVTYLGYLLKGGKRWLTPARKATVMKIPTPTTPRQVREFLGKAGFCRLFIPGFASLAAPLYPLTRPKVPFTWTEAHQEAFGRIKEALLSAPALALPDLTKPFALYVDEKEGVARGVLTQTLGPWRRPVAYLSKKLDPVASGWPTCLKAIAAVALLLKDADKLTLGQNVLVIAPHNLESIVRQPPDRWMTNARMTHYQSLLLNERVSFAPPAILNPATLLPVESDDTPIHICSEILAEETGTRPDLRDQPLPGVPAWYTDGSSFIMDGRRQAGAAIVDNKRTVWASNLPEGTSAQKAELIALTQALRLAEGKSINIYTDSRYAFATAHVHGAIYKQRGWLTSAGKDIKNKEEILALLEAIHLPKRVAIIHCPGHQRGTDPVATGNRKADEAAKQAAQSTRILTETTKNAGKRTADGSEFEKRTADGSEFESPKKKAKVE

SEQ ID NO: 1696 - protein, 2125 aa, synthetic construct
  source 1..2125: note = Description of Artificial Sequence: Synthetic polypeptide
MPAAKRVKLDGGDKKYSIGLDIGTNSVGWAVITDEYKVPSKKFKVLGNTDRHSIKKNLIGALLFDSGETAEATRLKRTARRRYTRRKNRICYLQEIFSNEMAKVDDSFFHRLEESFLVEEDKKHERHPIFGNIVDEVAYHEKYPTIYHLRKKLVDSTDKADLRLIYLALAHMIKFRGHFLIEGDLNPDNSDVDKLFIQLVQTYNQLFEENPINASGVDAKAILSARLSKSRRLENLIAQLPGEKKNGLFGNLIALSLGLTPNFKSNFDLAEDAKLQLSKDTYDDDLDNLLAQIGDQYADLFLAAKNLSDAILLSDILRVNTEITKAPLSASMIKRYDEHHQDLTLLKALVRQQLPEKYKEIFFDQSKNGYAGYIDGGASQEEFYKFIKPILEKMDGTEELLVKLNREDLLRKQRTFDNGSIPHQIHLGELHAILRRQEDFYPFLKDNREKIEKILTFRIPYYVGPLARGNSRFAWMTRKSEETITPWNFEEVVDKGASAQSFIERMTNFDKNLPNEKVLPKHSLLYEYFTVYNELTKVKYVTEGMRKPAFLSGEQKKAIVDLLFKTNRKVTVKQLKEDYFKKIECFDSVEISGVEDRFNASLGTYHDLLKIIKDKDFLDNEENEDILEDIVLTLTLFEDREMIEERLKTYAHLFDDKVMKQLKRRRYTGWGRLSRKLINGIRDKQSGKTILDFLKSDGFANRNFMQLIHDDSLTFKEDIQKAQVSGQGDSLHEHIANLAGSPAIKKGILQTVKVVDELVKVMGRHKPENIVIEMARENQTTQKGQKNSRERMKRIEEGIKELGSQILKEHPVENTQLQNEKLYLYYLQNGRDMYVDQELDINRLSDYDVDHIVPQSFLKDDSIDNKVLTRSDKARGKSDNVPSEEVVKKMKNYWRQLLNAKLITQRKFDNLTKAERGGLSELDKAGFIKRQLVETRQITKHVAQILDSRMNTKYDENDKLIREVKVITLKSKLVSDFRKDFQFYKVREINNYHHAHDAYLNAVVGTALIKKYPKLESEFVYGDYKVYDVRKMIAKSEQEIGKATAKYFFYSNIMNFFKTEITLANGEIRKRPLIETNGETGEIVWDKGRDFATVRKVLSMPQVNIVKKTEVQTGGFSKESILPKRNSDKLIARKKDWDPKKYGGFDSPTVAYSVLVVAKVEKGKSKKLKSVKELLGITIMERSSFEKNPIDFLEAKGYKEVKKDLIIKLPKYSLFELENGRKRMLASAGELQKGNELALPSKYVNFLYLASHYEKLKGSPEDNEQKQLFVEQHKHYLDEIIEQISEFSKRVILADANLDKVLSAYNKHRDKPIREQAENIIHLFTLTNLGAPAAFKYFDTTIDRKRYTSTKEVLDATLIHQSITGLYETRIDLSQLGGDGGPAPAPAPAPGGLLGRDLLTKLKAQIQFSTEGPQVTWEDRPAMCLVLNLEEEYRLHEKPVPPSIDPSWLQLFPMVWAEKAGMGLANQVPPVVVELKSDASPVAVRQYPMSKEAREGIRPHIQRFLDLGILVPCQSPWNTPLLPVKKPGTNDYRPVQDLREVNKRVQDIHPTVPNPYNLLSSLPPSHTWYSVLDLKDAFFCLKLHPNSQPLFAFEWRDPEKGNTGQLTWTRLPQGFKNSPTLFNEALHRDLASFRALNPQVVMLQYVDDLLVAAPTYRDCKEGTRRLLQELSKLGYRVSAKKAQLCREEVTYLGYLLKGGKRWLTPARKATVMKIPTPTTPRQVREFLGKAGFCRLFIPGFASLAAPLYPLTRPKVPFTWTEAHQEAFGRIKEALLSAPALALPDLTKPFALYVDEKEGVARGVLTQTLGPWRRPVAYLSKKLDPVASGWPTCLKAIAAVALLLKDADKLTLGQNVLVIAPHNLESIVRQPPDRWMTNARMTHYQSLLLNERVSFAPPAILNPATLLPVESDDTPIHICSEILAEETGTRPDLRDQPLPGVPAWYTDGSSFIMDGRRQAGAAIVDNKRTVWASNLPEGTSAQKAELIALTQALRLAEGKSINIYTDSRYAFATAHVHGAIYKQRGWLTSAGKDIKNKEEILALLEAIHLPKRVAIIHCPGHQRGTDPVATGNRKADEAAKQAAQSTRILTETTKNAGKRTADGSEFEKRTADGSEFESPKKKAKVE

SEQ ID NO: 1697 - protein, 2119 aa, synthetic construct
  source 1..2119: note = Description of Artificial Sequence: Synthetic polypeptide
MPAAKRVKLDGGDKKYSIGLDIGTNSVGWAVITDEYKVPSKKFKVLGNTDRHSIKKNLIGALLFDSGETAEATRLKRTARRRYTRRKNRICYLQEIFSNEMAKVDDSFFHRLEESFLVEEDKKHERHPIFGNIVDEVAYHEKYPTIYHLRKKLVDSTDKADLRLIYLALAHMIKFRGHFLIEGDLNPDNSDVDKLFIQLVQTYNQLFEENPINASGVDAKAILSARLSKSRRLENLIAQLPGEKKNGLFGNLIALSLGLTPNFKSNFDLAEDAKLQLSKDTYDDDLDNLLAQIGDQYADLFLAAKNLSDAILLSDILRVNTEITKAPLSASMIKRYDEHHQDLTLLKALVRQQLPEKYKEIFFDQSKNGYAGYIDGGASQEEFYKFIKPILEKMDGTEELLVKLNREDLLRKQRTFDNGSIPHQIHLGELHAILRRQEDFYPFLKDNREKIEKILTFRIPYYVGPLARGNSRFAWMTRKSEETITPWNFEEVVDKGASAQSFIERMTNFDKNLPNEKVLPKHSLLYEYFTVYNELTKVKYVTEGMRKPAFLSGEQKKAIVDLLFKTNRKVTVKQLKEDYFKKIECFDSVEISGVEDRFNASLGTYHDLLKIIKDKDFLDNEENEDILEDIVLTLTLFEDREMIEERLKTYAHLFDDKVMKQLKRRRYTGWGRLSRKLINGIRDKQSGKTILDFLKSDGFANRNFMQLIHDDSLTFKEDIQKAQVSGQGDSLHEHIANLAGSPAIKKGILQTVKVVDELVKVMGRHKPENIVIEMARENQTTQKGQKNSRERMKRIEEGIKELGSQILKEHPVENTQLQNEKLYLYYLQNGRDMYVDQELDINRLSDYDVDHIVPQSFLKDDSIDNKVLTRSDKARGKSDNVPSEEVVKKMKNYWRQLLNAKLITQRKFDNLTKAERGGLSELDKAGFIKRQLVETRQITKHVAQILDSRMNTKYDENDKLIREVKVITLKSKLVSDFRKDFQFYKVREINNYHHAHDAYLNAVVGTALIKKYPKLESEFVYGDYKVYDVRKMIAKSEQEIGKATAKYFFYSNIMNFFKTEITLANGEIRKRPLIETNGETGEIVWDKGRDFATVRKVLSMPQVNIVKKTEVQTGGFSKESILPKRNSDKLIARKKDWDPKKYGGFDSPTVAYSVLVVAKVEKGKSKKLKSVKELLGITIMERSSFEKNPIDFLEAKGYKEVKKDLIIKLPKYSLFELENGRKRMLASAGELQKGNELALPSKYVNFLYLASHYEKLKGSPEDNEQKQLFVEQHKHYLDEIIEQISEFSKRVILADANLDKVLSAYNKHRDKPIREQAENIIHLFTLTNLGAPAAFKYFDTTIDRKRYTSTKEVLDATLIHQSITGLYETRIDLSQLGGDGGGSSGGLLGRDLLTKLKAQIQFSTEGPQVTWEDRPAMCLVLNLEEEYRLHEKPVPPSIDPSWLQLFPMVWAEKAGMGLANQVPPVVVELKSDASPVAVRQYPMSKEAREGIRPHIQRFLDLGILVPCQSPWNTPLLPVKKPGTNDYRPVQDLREVNKRVQDIHPTVPNPYNLLSSLPPSHTWYSVLDLKDAFFCLKLHPNSQPLFAFEWRDPEKGNTGQLTWTRLPQGFKNSPTLFNEALHRDLASFRALNPQVVMLQYVDDLLVAAPTYRDCKEGTRRLLQELSKLGYRVSAKKAQLCREEVTYLGYLLKGGKRWLTPARKATVMKIPTPTTPRQVREFLGKAGFCRLFIPGFASLAAPLYPLTRPKVPFTWTEAHQEAFGRIKEALLSAPALALPDLTKPFALYVDEKEGVARGVLTQTLGPWRRPVAYLSKKLDPVASGWPTCLKAIAAVALLLKDADKLTLGQNVLVIAPHNLESIVRQPPDRWMTNARMTHYQSLLLNERVSFAPPAILNPATLLPVESDDTPIHICSEILAEETGTRPDLRDQPLPGVPAWYTDGSSFIMDGRRQAGAAIVDNKRTVWASNLPEGTSAQKAELIALTQALRLAEGKSINIYTDSRYAFATAHVHGAIYKQRGWLTSAGKDIKNKEEILALLEAIHLPKRVAIIHCPGHQRGTDPVATGNRKADEAAKQAAQSTRILTETTKNAGKRTADGSEFEKRTADGSEFESPKKKAKVE

SEQ ID NO: 1698 - protein, 2122 aa, synthetic construct
  source 1..2122: note = Description of Artificial Sequence: Synthetic polypeptide
MPAAKRVKLDGGDKKYSIGLDIGTNSVGWAVITDEYKVPSKKFKVLGNTDRHSIKKNLIGALLFDSGETAEATRLKRTARRRYTRRKNRICYLQEIFSNEMAKVDDSFFHRLEESFLVEEDKKHERHPIFGNIVDEVAYHEKYPTIYHLRKKLVDSTDKADLRLIYLALAHMIKFRGHFLIEGDLNPDNSDVDKLFIQLVQTYNQLFEENPINASGVDAKAILSARLSKSRRLENLIAQLPGEKKNGLFGNLIALSLGLTPNFKSNFDLAEDAKLQLSKDTYDDDLDNLLAQIGDQYADLFLAAKNLSDAILLSDILRVNTEITKAPLSASMIKRYDEHHQDLTLLKALVRQQLPEKYKEIFFDQSKNGYAGYIDGGASQEEFYKFIKPILEKMDGTEELLVKLNREDLLRKQRTFDNGSIPHQIHLGELHAILRRQEDFYPFLKDNREKIEKILTFRIPYYVGPLARGNSRFAWMTRKSEETITPWNFEEVVDKGASAQSFIERMTNFDKNLPNEKVLPKHSLLYEYFTVYNELTKVKYVTEGMRKPAFLSGEQKKAIVDLLFKTNRKVTVKQLKEDYFKKIECFDSVEISGVEDRFNASLGTYHDLLKIIKDKDFLDNEENEDILEDIVLTLTLFEDREMIEERLKTYAHLFDDKVMKQLKRRRYTGWGRLSRKLINGIRDKQSGKTILDFLKSDGFANRNFMQLIHDDSLTFKEDIQKAQVSGQGDSLHEHIANLAGSPAIKKGILQTVKVVDELVKVMGRHKPENIVIEMARENQTTQKGQKNSRERMKRIEEGIKELGSQILKEHPVENTQLQNEKLYLYYLQNGRDMYVDQELDINRLSDYDVDHIVPQSFLKDDSIDNKVLTRSDKARGKSDNVPSEEVVKKMKNYWRQLLNAKLITQRKFDNLTKAERGGLSELDKAGFIKRQLVETRQITKHVAQILDSRMNTKYDENDKLIREVKVITLKSKLVSDFRKDFQFYKVREINNYHHAHDAYLNAVVGTALIKKYPKLESEFVYGDYKVYDVRKMIAKSEQEIGKATAKYFFYSNIMNFFKTEITLANGEIRKRPLIETNGETGEIVWDKGRDFATVRKVLSMPQVNIVKKTEVQTGGFSKESILPKRNSDKLIARKKDWDPKKYGGFDSPTVAYSVLVVAKVEKGKSKKLKSVKELLGITIMERSSFEKNPIDFLEAKGYKEVKKDLIIKLPKYSLFELENGRKRMLASAGELQKGNELALPSKYVNFLYLASHYEKLKGSPEDNEQKQLFVEQHKHYLDEIIEQISEFSKRVILADANLDKVLSAYNKHRDKPIREQAENIIHLFTLTNLGAPAAFKYFDTTIDRKRYTSTKEVLDATLIHQSITGLYETRIDLSQLGGDGGGSSGGGGGLLGRDLLTKLKAQIQFSTEGPQVTWEDRPAMCLVLNLEEEYRLHEKPVPPSIDPSWLQLFPMVWAEKAGMGLANQVPPVVVELKSDASPVAVRQYPMSKEAREGIRPHIQRFLDLGILVPCQSPWNTPLLPVKKPGTNDYRPVQDLREVNKRVQDIHPTVPNPYNLLSSLPPSHTWYSVLDLKDAFFCLKLHPNSQPLFAFEWRDPEKGNTGQLTWTRLPQGFKNSPTLFNEALHRDLASFRALNPQVVMLQYVDDLLVAAPTYRDCKEGTRRLLQELSKLGYRVSAKKAQLCREEVTYLGYLLKGGKRWLTPARKATVMKIPTPTTPRQVREFLGKAGFCRLFIPGFASLAAPLYPLTRPKVPFTWTEAHQEAFGRIKEALLSAPALALPDLTKPFALYVDEKEGVARGVLTQTLGPWRRPVAYLSKKLDPVASGWPTCLKAIAAVALLLKDADKLTLGQNVLVIAPHNLESIVRQPPDRWMTNARMTHYQSLLLNERVSFAPPAILNPATLLPVESDDTPIHICSEILAEETGTRPDLRDQPLPGVPAWYTDGSSFIMDGRRQAGAAIVDNKRTVWASNLPEGTSAQKAELIALTQALRLAEGKSINIYTDSRYAFATAHVHGAIYKQRGWLTSAGKDIKNKEEILALLEAIHLPKRVAIIHCPGHQRGTDPVATGNRKADEAAKQAAQSTRILTETTKNAGKRTADGSEFEKRTADGSEFESPKKKAKVE

SEQ ID NO: 1699 - protein, 2127 aa, synthetic construct
  source 1..2127: note = Description of Artificial Sequence: Synthetic polypeptide
MPAAKRVKLDGGDKKYSIGLDIGTNSVGWAVITDEYKVPSKKFKVLGNTDRHSIKKNLIGALLFDSGETAEATRLKRTARRRYTRRKNRICYLQEIFSNEMAKVDDSFFHRLEESFLVEEDKKHERHPIFGNIVDEVAYHEKYPTIYHLRKKLVDSTDKADLRLIYLALAHMIKFRGHFLIEGDLNPDNSDVDKLFIQLVQTYNQLFEENPINASGVDAKAILSARLSKSRRLENLIAQLPGEKKNGLFGNLIALSLGLTPNFKSNFDLAEDAKLQLSKDTYDDDLDNLLAQIGDQYADLFLAAKNLSDAILLSDILRVNTEITKAPLSASMIKRYDEHHQDLTLLKALVRQQLPEKYKEIFFDQSKNGYAGYIDGGASQEEFYKFIKPILEKMDGTEELLVKLNREDLLRKQRTFDNGSIPHQIHLGELHAILRRQEDFYPFLKDNREKIEKILTFRIPYYVGPLARGNSRFAWMTRKSEETITPWNFEEVVDKGASAQSFIERMTNFDKNLPNEKVLPKHSLLYEYFTVYNELTKVKYVTEGMRKPAFLSGEQKKAIVDLLFKTNRKVTVKQLKEDYFKKIECFDSVEISGVEDRFNASLGTYHDLLKIIKDKDFLDNEENEDILEDIVLTLTLFEDREMIEERLKTYAHLFDDKVMKQLKRRRYTGWGRLSRKLINGIRDKQSGKTILDFLKSDGFANRNFMQLIHDDSLTFKEDIQKAQVSGQGDSLHEHIANLAGSPAIKKGILQTVKVVDELVKVMGRHKPENIVIEMARENQTTQKGQKNSRERMKRIEEGIKELGSQILKEHPVENTQLQNEKLYLYYLQNGRDMYVDQELDINRLSDYDVDHIVPQSFLKDDSIDNKVLTRSDKARGKSDNVPSEEVVKKMKNYWRQLLNAKLITQRKFDNLTKAERGGLSELDKAGFIKRQLVETRQITKHVAQILDSRMNTKYDENDKLIREVKVITLKSKLVSDFRKDFQFYKVREINNYHHAHDAYLNAVVGTALIKKYPKLESEFVYGDYKVYDVRKMIAKSEQEIGKATAKYFFYSNIMNFFKTEITLANGEIRKRPLIETNGETGEIVWDKGRDFATVRKVLSMPQVNIVKKTEVQTGGFSKESILPKRNSDKLIARKKDWDPKKYGGFDSPTVAYSVLVVAKVEKGKSKKLKSVKELLGITIMERSSFEKNPIDFLEAKGYKEVKKDLIIKLPKYSLFELENGRKRMLASAGELQKGNELALPSKYVNFLYLASHYEKLKGSPEDNEQKQLFVEQHKHYLDEIIEQISEFSKRVILADANLDKVLSAYNKHRDKPIREQAENIIHLFTLTNLGAPAAFKYFDTTIDRKRYTSTKEVLDATLIHQSITGLYETRIDLSQLGGDGGPAPEAAAKGSSGGLLGRDLLTKLKAQIQFSTEGPQVTWEDRPAMCLVLNLEEEYRLHEKPVPPSIDPSWLQLFPMVWAEKAGMGLANQVPPVVVELKSDASPVAVRQYPMSKEAREGIRPHIQRFLDLGILVPCQSPWNTPLLPVKKPGTNDYRPVQDLREVNKRVQDIHPTVPNPYNLLSSLPPSHTWYSVLDLKDAFFCLKLHPNSQPLFAFEWRDPEKGNTGQLTWTRLPQGFKNSPTLFNEALHRDLASFRALNPQVVMLQYVDDLLVAAPTYRDCKEGTRRLLQELSKLGYRVSAKKAQLCREEVTYLGYLLKGGKRWLTPARKATVMKIPTPTTPRQVREFLGKAGFCRLFIPGFASLAAPLYPLTRPKVPFTWTEAHQEAFGRIKEALLSAPALALPDLTKPFALYVDEKEGVARGVLTQTLGPWRRPVAYLSKKLDPVASGWPTCLKAIAAVALLLKDADKLTLGQNVLVIAPHNLESIVRQPPDRWMTNARMTHYQSLLLNERVSFAPPAILNPATLLPVESDDTPIHICSEILAEETGTRPDLRDQPLPGVPAWYTDGSSFIMDGRRQAGAAIVDNKRTVWASNLPEGTSAQKAELIALTQALRLAEGKSINIYTDSRYAFATAHVHGAIYKQRGWLTSAGKDIKNKEEILALLEAIHLPKRVAIIHCPGHQRGTDPVATGNRKADEAAKQAAQSTRILTETTKNAGKRTADGSEFEKRTADGSEFESPKKKAKVE

SEQ ID NO: 1700 - protein, 2127 aa, synthetic construct
  source 1..2127: note = Description of Artificial Sequence: Synthetic polypeptide
MPAAKRVKLDGGDKKYSIGLDIGTNSVGWAVITDEYKVPSKKFKVLGNTDRHSIKKNLIGALLFDSGETAEATRLKRTARRRYTRRKNRICYLQEIFSNEMAKVDDSFFHRLEESFLVEEDKKHERHPIFGNIVDEVAYHEKYPTIYHLRKKLVDSTDKADLRLIYLALAHMIKFRGHFLIEGDLNPDNSDVDKLFIQLVQTYNQLFEENPINASGVDAKAILSARLSKSRRLENLIAQLPGEKKNGLFGNLIALSLGLTPNFKSNFDLAEDAKLQLSKDTYDDDLDNLLAQIGDQYADLFLAAKNLSDAILLSDILRVNTEITKAPLSASMIKRYDEHHQDLTLLKALVRQQLPEKYKEIFFDQSKNGYAGYIDGGASQEEFYKFIKPILEKMDGTEELLVKLNREDLLRKQRTFDNGSIPHQIHLGELHAILRRQEDFYPFLKDNREKIEKILTFRIPYYVGPLARGNSRFAWMTRKSEETITPWNFEEVVDKGASAQSFIERMTNFDKNLPNEKVLPKHSLLYEYFTVYNELTKVKYVTEGMRKPAFLSGEQKKAIVDLLFKTNRKVTVKQLKEDYFKKIECFDSVEISGVEDRFNASLGTYHDLLKIIKDKDFLDNEENEDILEDIVLTLTLFEDREMIEERLKTYAHLFDDKVMKQLKRRRYTGWGRLSRKLINGIRDKQSGKTILDFLKSDGFANRNFMQLIHDDSLTFKEDIQKAQVSGQGDSLHEHIANLAGSPAIKKGILQTVKVVDELVKVMGRHKPENIVIEMARENQTTQKGQKNSRERMKRIEEGIKELGSQILKEHPVENTQLQNEKLYLYYLQNGRDMYVDQELDINRLSDYDVDHIVPQSFLKDDSIDNKVLTRSDKARGKSDNVPSEEVVKKMKNYWRQLLNAKLITQRKFDNLTKAERGGLSELDKAGFIKRQLVETRQITKHVAQILDSRMNTKYDENDKLIREVKVITLKSKLVSDFRKDFQFYKVREINNYHHAHDAYLNAVVGTALIKKYPKLESEFVYGDYKVYDVRKMIAKSEQEIGKATAKYFFYSNIMNFFKTEITLANGEIRKRPLIETNGETGEIVWDKGRDFATVRKVLSMPQVNIVKKTEVQTGGFSKESILPKRNSDKLIARKKDWDPKKYGGFDSPTVAYSVLVVAKVEKGKSKKLKSVKELLGITIMERSSFEKNPIDFLEAKGYKEVKKDLIIKLPKYSLFELENGRKRMLASAGELQKGNELALPSKYVNFLYLASHYEKLKGSPEDNEQKQLFVEQHKHYLDEIIEQISEFSKRVILADANLDKVLSAYNKHRDKPIREQAENIIHLFTLTNLGAPAAFKYFDTTIDRKRYTSTKEVLDATLIHQSITGLYETRIDLSQLGGDGGEAAAKGSSGGGGGLLGRDLLTKLKAQIQFSTEGPQVTWEDRPAMCLVLNLEEEYRLHEKPVPPSIDPSWLQLFPMVWAEKAGMGLANQVPPVVVELKSDASPVAVRQYPMSKEAREGIRPHIQRFLDLGILVPCQSPWNTPLLPVKKPGTNDYRPVQDLREVNKRVQDIHPTVPNPYNLLSSLPPSHTWYSVLDLKDAFFCLKLHPNSQPLFAFEWRDPEKGNTGQLTWTRLPQGFKNSPTLFNEALHRDLASFRALNPQVVMLQYVDDLLVAAPTYRDCKEGTRRLLQELSKLGYRVSAKKAQLCREEVTYLGYLLKGGKRWLTPARKATVMKIPTPTTPRQVREFLGKAGFCRLFIPGFASLAAPLYPLTRPKVPFTWTEAHQEAFGRIKEALLSAPALALPDLTKPFALYVDEKEGVARGVLTQTLGPWRRPVAYLSKKLDPVASGWPTCLKAIAAVALLLKDADKLTLGQNVLVIAPHNLESIVRQPPDRWMTNARMTHYQSLLLNERVSFAPPAILNPATLLPVESDDTPIHICSEILAEETGTRPDLRDQPLPGVPAWYTDGSSFIMDGRRQAGAAIVDNKRTVWASNLPEGTSAQKAELIALTQALRLAEGKSINIYTDSRYAFATAHVHGAIYKQRGWLTSAGKDIKNKEEILALLEAIHLPKRVAIIHCPGHQRGTDPVATGNRKADEAAKQAAQSTRILTETTKNAGKRTADGSEFEKRTADGSEFESPKKKAKVE

SEQ ID NO: 1701 - protein, 2129 aa, synthetic construct
  source 1..2129: note = Description of Artificial Sequence: Synthetic polypeptide
MPAAKRVKLDGGDKKYSIGLDIGTNSVGWAVITDEYKVPSKKFKVLGNTDRHSIKKNLIGALLFDSGETAEATRLKRTARRRYTRRKNRICYLQEIFSNEMAKVDDSFFHRLEESFLVEEDKKHERHPIFGNIVDEVAYHEKYPTIYHLRKKLVDSTDKADLRLIYLALAHMIKFRGHFLIEGDLNPDNSDVDKLFIQLVQTYNQLFEENPINASGVDAKAILSARLSKSRRLENLIAQLPGEKKNGLFGNLIALSLGLTPNFKSNFDLAEDAKLQLSKDTYDDDLDNLLAQIGDQYADLFLAAKNLSDAILLSDILRVNTEITKAPLSASMIKRYDEHHQDLTLLKALVRQQLPEKYKEIFFDQSKNGYAGYIDGGASQEEFYKFIKPILEKMDGTEELLVKLNREDLLRKQRTFDNGSIPHQIHLGELHAILRRQEDFYPFLKDNREKIEKILTFRIPYYVGPLARGNSRFAWMTRKSEETITPWNFEEVVDKGASAQSFIERMTNFDKNLPNEKVLPKHSLLYEYFTVYNELTKVKYVTEGMRKPAFLSGEQKKAIVDLLFKTNRKVTVKQLKEDYFKKIECFDSVEISGVEDRFNASLGTYHDLLKIIKDKDFLDNEENEDILEDIVLTLTLFEDREMIEERLKTYAHLFDDKVMKQLKRRRYTGWGRLSRKLINGIRDKQSGKTILDFLKSDGFANRNFMQLIHDDSLTFKEDIQKAQVSGQGDSLHEHIANLAGSPAIKKGILQTVKVVDELVKVMGRHKPENIVIEMARENQTTQKGQKNSRERMKRIEEGIKELGSQILKEHPVENTQLQNEKLYLYYLQNGRDMYVDQELDINRLSDYDVDHIVPQSFLKDDSIDNKVLTRSDKARGKSDNVPSEEVVKKMKNYWRQLLNAKLITQRKFDNLTKAERGGLSELDKAGFIKRQLVETRQITKHVAQILDSRMNTKYDENDKLIREVKVITLKSKLVSDFRKDFQFYKVREINNYHHAHDAYLNAVVGTALIKKYPKLESEFVYGDYKVYDVRKMIAKSEQEIGKATAKYFFYSNIMNFFKTEITLANGEIRKRPLIETNGETGEIVWDKGRDFATVRKVLSMPQVNIVKKTEVQTGGFSKESILPKRNSDKLIARKKDWDPKKYGGFDSPTVAYSVLVVAKVEKGKSKKLKSVKELLGITIMERSSFEKNPIDFLEAKGYKEVKKDLIIKLPKYSLFELENGRKRMLASAGELQKGNELALPSKYVNFLYLASHYEKLKGSPEDNEQKQLFVEQHKHYLDEIIEQISEFSKRVILADANLDKVLSAYNKHRDKPIREQAENIIHLFTLTNLGAPAAFKYFDTTIDRKRYTSTKEVLDATLIHQSITGLYETRIDLSQLGGDGGPAPAPAPAPAPAPGGLLGRDLLTKLKAQIQFSTEGPQVTWEDRPAMCLVLNLEEEYRLHEKPVPPSIDPSWLQLFPMVWAEKAGMGLANQVPPVVVELKSDASPVAVRQYPMSKEAREGIRPHIQRFLDLGILVPCQSPWNTPLLPVKKPGTNDYRPVQDLREVNKRVQDIHPTVPNPYNLLSSLPPSHTWYSVLDLKDAFFCLKLHPNSQPLFAFEWRDPEKGNTGQLTWTRLPQGFKNSPTLFNEALHRDLASFRALNPQVVMLQYVDDLLVAAPTYRDCKEGTRRLLQELSKLGYRVSAKKAQLCREEVTYLGYLLKGGKRWLTPARKATVMKIPTPTTPRQVREFLGKAGFCRLFIPGFASLAAPLYPLTRPKVPFTWTEAHQEAFGRIKEALLSAPALALPDLTKPFALYVDEKEGVARGVLTQTLGPWRRPVAYLSKKLDPVASGWPTCLKAIAAVALLLKDADKLTLGQNVLVIAPHNLESIVRQPPDRWMTNARMTHYQSLLLNERVSFAPPAILNPATLLPVESDDTPIHICSEILAEETGTRPDLRDQPLPGVPAWYTDGSSFIMDGRRQAGAAIVDNKRTVWASNLPEGTSAQKAELIALTQALRLAEGKSINIYTDSRYAFATAHVHGAIYKQRGWLTSAGKDIKNKEEILALLEAIHLPKRVAIIHCPGHQRGTDPVATGNRKADEAAKQAAQSTRILTETTKNAGKRTADGSEFEKRTADGSEFESPKKKAKVE

SEQ ID NO: 1702 - protein, 2127 aa, synthetic construct
  source 1..2127: note = Description of Artificial Sequence: Synthetic polypeptide
MPAAKRVKLDGGDKKYSIGLDIGTNSVGWAVITDEYKVPSKKFKVLGNTDRHSIKKNLIGALLFDSGETAEATRLKRTARRRYTRRKNRICYLQEIFSNEMAKVDDSFFHRLEESFLVEEDKKHERHPIFGNIVDEVAYHEKYPTIYHLRKKLVDSTDKADLRLIYLALAHMIKFRGHFLIEGDLNPDNSDVDKLFIQLVQTYNQLFEENPINASGVDAKAILSARLSKSRRLENLIAQLPGEKKNGLFGNLIALSLGLTPNFKSNFDLAEDAKLQLSKDTYDDDLDNLLAQIGDQYADLFLAAKNLSDAILLSDILRVNTEITKAPLSASMIKRYDEHHQDLTLLKALVRQQLPEKYKEIFFDQSKNGYAGYIDGGASQEEFYKFIKPILEKMDGTEELLVKLNREDLLRKQRTFDNGSIPHQIHLGELHAILRRQEDFYPFLKDNREKIEKILTFRIPYYVGPLARGNSRFAWMTRKSEETITPWNFEEVVDKGASAQSFIERMTNFDKNLPNEKVLPKHSLLYEYFTVYNELTKVKYVTEGMRKPAFLSGEQKKAIVDLLFKTNRKVTVKQLKEDYFKKIECFDSVEISGVEDRFNASLGTYHDLLKIIKDKDFLDNEENEDILEDIVLTLTLFEDREMIEERLKTYAHLFDDKVMKQLKRRRYTGWGRLSRKLINGIRDKQSGKTILDFLKSDGFANRNFMQLIHDDSLTFKEDIQKAQVSGQGDSLHEHIANLAGSPAIKKGILQTVKVVDELVKVMGRHKPENIVIEMARENQTTQKGQKNSRERMKRIEEGIKELGSQILKEHPVENTQLQNEKLYLYYLQNGRDMYVDQELDINRLSDYDVDHIVPQSFLKDDSIDNKVLTRSDKARGKSDNVPSEEVVKKMKNYWRQLLNAKLITQRKFDNLTKAERGGLSELDKAGFIKRQLVETRQITKHVAQILDSRMNTKYDENDKLIREVKVITLKSKLVSDFRKDFQFYKVREINNYHHAHDAYLNAVVGTALIKKYPKLESEFVYGDYKVYDVRKMIAKSEQEIGKATAKYFFYSNIMNFFKTEITLANGEIRKRPLIETNGETGEIVWDKGRDFATVRKVLSMPQVNIVKKTEVQTGGFSKESILPKRNSDKLIARKKDWDPKKYGGFDSPTVAYSVLVVAKVEKGKSKKLKSVKELLGITIMERSSFEKNPIDFLEAKGYKEVKKDLIIKLPKYSLFELENGRKRMLASAGELQKGNELALPSKYVNFLYLASHYEKLKGSPEDNEQKQLFVEQHKHYLDEIIEQISEFSKRVILADANLDKVLSAYNKHRDKPIREQAENIIHLFTLTNLGAPAAFKYFDTTIDRKRYTSTKEVLDATLIHQSITGLYETRIDLSQLGGDGGGGGEAAAKGGSGGLLGRDLLTKLKAQIQFSTEGPQVTWEDRPAMCLVLNLEEEYRLHEKPVPPSIDPSWLQLFPMVWAEKAGMGLANQVPPVVVELKSDASPVAVRQYPMSKEAREGIRPHIQRFLDLGILVPCQSPWNTPLLPVKKPGTNDYRPVQDLREVNKRVQDIHPTVPNPYNLLSSLPPSHTWYSVLDLKDAFFCLKLHPNSQPLFAFEWRDPEKGNTGQLTWTRLPQGFKNSPTLFNEALHRDLASFRALNPQVVMLQYVDDLLVAAPTYRDCKEGTRRLLQELSKLGYRVSAKKAQLCREEVTYLGYLLKGGKRWLTPARKATVMKIPTPTTPRQVREFLGKAGFCRLFIPGFASLAAPLYPLTRPKVPFTWTEAHQEAFGRIKEALLSAPALALPDLTKPFALYVDEKEGVARGVLTQTLGPWRRPVAYLSKKLDPVASGWPTCLKAIAAVALLLKDADKLTLGQNVLVIAPHNLESIVRQPPDRWMTNARMTHYQSLLLNERVSFAPPAILNPATLLPVESDDTPIHICSEILAEETGTRPDLRDQPLPGVPAWYTDGSSFIMDGRRQAGAAIVDNKRTVWASNLPEGTSAQKAELIALTQALRLAEGKSINIYTDSRYAFATAHVHGAIYKQRGWLTSAGKDIKNKEEILALLEAIHLPKRVAIIHCPGHQRGTDPVATGNRKADEAAKQAAQSTRILTETTKNAGKRTADGSEFEKRTADGSEFESPKKKAKVE

SEQ ID NO: 1703 - protein, 2122 aa, synthetic construct
  source 1..2122: note = Description of Artificial Sequence: Synthetic polypeptide
MPAAKRVKLDGGDKKYSIGLDIGTNSVGWAVITDEYKVPSKKFKVLGNTDRHSIKKNLIGALLFDSGETAEATRLKRTARRRYTRRKNRICYLQEIFSNEMAKVDDSFFHRLEESFLVEEDKKHERHPIFGNIVDEVAYHEKYPTIYHLRKKLVDSTDKADLRLIYLALAHMIKFRGHFLIEGDLNPDNSDVDKLFIQLVQTYNQLFEENPINASGVDAKAILSARLSKSRRLENLIAQLPGEKKNGLFGNLIALSLGLTPNFKSNFDLAEDAKLQLSKDTYDDDLDNLLAQIGDQYADLFLAAKNLSDAILLSDILRVNTEITKAPLSASMIKRYDEHHQDLTLLKALVRQQLPEKYKEIFFDQSKNGYAGYIDGGASQEEFYKFIKPILEKMDGTEELLVKLNREDLLRKQRTFDNGSIPHQIHLGELHAILRRQEDFYPFLKDNREKIEKILTFRIPYYVGPLARGNSRFAWMTRKSEETITPWNFEEVVDKGASAQSFIERMTNFDKNLPNEKVLPKHSLLYEYFTVYNELTKVKYVTEGMRKPAFLSGEQKKAIVDLLFKTNRKVTVKQLKEDYFKKIECFDSVEISGVEDRFNASLGTYHDLLKIIKDKDFLDNEENEDILEDIVLTLTLFEDREMIEERLKTYAHLFDDKVMKQLKRRRYTGWGRLSRKLINGIRDKQSGKTILDFLKSDGFANRNFMQLIHDDSLTFKEDIQKAQVSGQGDSLHEHIANLAGSPAIKKGILQTVKVVDELVKVMGRHKPENIVIEMARENQTTQKGQKNSRERMKRIEEGIKELGSQILKEHPVENTQLQNEKLYLYYLQNGRDMYVDQELDINRLSDYDVDHIVPQSFLKDDSIDNKVLTRSDKARGKSDNVPSEEVVKKMKNYWRQLLNAKLITQRKFDNLTKAERGGLSELDKAGFIKRQLVETRQITKHVAQILDSRMNTKYDENDKLIREVKVITLKSKLVSDFRKDFQFYKVREINNYHHAHDAYLNAVVGTALIKKYPKLESEFVYGDYKVYDVRKMIAKSEQEIGKATAKYFFYSNIMNFFKTEITLANGEIRKRPLIETNGETGEIVWDKGRDFATVRKVLSMPQVNIVKKTEVQTGGFSKESILPKRNSDKLIARKKDWDPKKYGGFDSPTVAYSVLVVAKVEKGKSKKLKSVKELLGITIMERSSFEKNPIDFLEAKGYKEVKKDLIIKLPKYSLFELENGRKRMLASAGELQKGNELALPSKYVNFLYLASHYEKLKGSPEDNEQKQLFVEQHKHYLDEIIEQISEFSKRVILADANLDKVLSAYNKHRDKPIREQAENIIHLFTLTNLGAPAAFKYFDTTIDRKRYTSTKEVLDATLIHQSITGLYETRIDLSQLGGDGGGGSPAPGGLLGRDLLTKLKAQIQFSTEGPQVTWEDRPAMCLVLNLEEEYRLHEKPVPPSIDPSWLQLFPMVWAEKAGMGLANQVPPVVVELKSDASPVAVRQYPMSKEAREGIRPHIQRFLDLGILVPCQSPWNTPLLPVKKPGTNDYRPVQDLREVNKRVQDIHPTVPNPYNLLSSLPPSHTWYSVLDLKDAFFCLKLHPNSQPLFAFEWRDPEKGNTGQLTWTRLPQGFKNSPTLFNEALHRDLASFRALNPQVVMLQYVDDLLVAAPTYRDCKEGTRRLLQELSKLGYRVSAKKAQLCREEVTYLGYLLKGGKRWLTPARKATVMKIPTPTTPRQVREFLGKAGFCRLFIPGFASLAAPLYPLTRPKVPFTWTEAHQEAFGRIKEALLSAPALALPDLTKPFALYVDEKEGVARGVLTQTLGPWRRPVAYLSKKLDPVASGWPTCLKAIAAVALLLKDADKLTLGQNVLVIAPHNLESIVRQPPDRWMTNARMTHYQSLLLNERVSFAPPAILNPATLLPVESDDTPIHICSEILAEETGTRPDLRDQPLPGVPAWYTDGSSFIMDGRRQAGAAIVDNKRTVWASNLPEGTSAQKAELIALTQALRLAEGKSINIYTDSRYAFATAHVHGAIYKQRGWLTSAGKDIKNKEEILALLEAIHLPKRVAIIHCPGHQRGTDPVATGNRKADEAAKQAAQSTRILTETTKNAGKRTADGSEFEKRTADGSEFESPKKKAKVE

SEQ ID NO: 1704 - protein, 2127 aa, synthetic construct
  source 1..2127: note = Description of Artificial Sequence: Synthetic polypeptide
MPAAKRVKLDGGDKKYSIGLDIGTNSVGWAVITDEYKVPSKKFKVLGNTDRHSIKKNLIGALLFDSGETAEATRLKRTARRRYTRRKNRICYLQEIFSNEMAKVDDSFFHRLEESFLVEEDKKHERHPIFGNIVDEVAYHEKYPTIYHLRKKLVDSTDKADLRLIYLALAHMIKFRGHFLIEGDLNPDNSDVDKLFIQLVQTYNQLFEENPINASGVDAKAILSARLSKSRRLENLIAQLPGEKKNGLFGNLIALSLGLTPNFKSNFDLAEDAKLQLSKDTYDDDLDNLLAQIGDQYADLFLAAKNLSDAILLSDILRVNTEITKAPLSASMIKRYDEHHQDLTLLKALVRQQLPEKYKEIFFDQSKNGYAGYIDGGASQEEFYKFIKPILEKMDGTEELLVKLNREDLLRKQRTFDNGSIPHQIHLGELHAILRRQEDFYPFLKDNREKIEKILTFRIPYYVGPLARGNSRFAWMTRKSEETITPWNFEEVVDKGASAQSFIERMTNFDKNLPNEKVLPKHSLLYEYFTVYNELTKVKYVTEGMRKPAFLSGEQKKAIVDLLFKTNRKVTVKQLKEDYFKKIECFDSVEISGVEDRFNASLGTYHDLLKIIKDKDFLDNEENEDILEDIVLTLTLFEDREMIEERLKTYAHLFDDKVMKQLKRRRYTGWGRLSRKLINGIRDKQSGKTILDFLKSDGFANRNFMQLIHDDSLTFKEDIQKAQVSGQGDSLHEHIANLAGSPAIKKGILQTVKVVDELVKVMGRHKPENIVIEMARENQTTQKGQKNSRERMKRIEEGIKELGSQILKEHPVENTQLQNEKLYLYYLQNGRDMYVDQELDINRLSDYDVDHIVPQSFLKDDSIDNKVLTRSDKARGKSDNVPSEEVVKKMKNYWRQLLNAKLITQRKFDNLTKAERGGLSELDKAGFIKRQLVETRQITKHVAQILDSRMNTKYDENDKLIREVKVITLKSKLVSDFRKDFQFYKVREINNYHHAHDAYLNAVVGTALIKKYPKLESEFVYGDYKVYDVRKMIAKSEQEIGKATAKYFFYSNIMNFFKTEITLANGEIRKRPLIETNGETGEIVWDKGRDFATVRKVLSMPQVNIVKKTEVQTGGFSKESILPKRNSDKLIARKKDWDPKKYGGFDSPTVAYSVLVVAKVEKGKSKKLKSVKELLGITIMERSSFEKNPIDFLEAKGYKEVKKDLIIKLPKYSLFELENGRKRMLASAGELQKGNELALPSKYVNFLYLASHYEKLKGSPEDNEQKQLFVEQHKHYLDEIIEQISEFSKRVILADANLDKVLSAYNKHRDKPIREQAENIIHLFTLTNLGAPAAFKYFDTTIDRKRYTSTKEVLDATLIHQSITGLYETRIDLSQLGGDGGGGSEAAAKPAPGGLLGRDLLTKLKAQIQFSTEGPQVTWEDRPAMCLVLNLEEEYRLHEKPVPPSIDPSWLQLFPMVWAEKAGMGLANQVPPVVVELKSDASPVAVRQYPMSKEAREGIRPHIQRFLDLGILVPCQSPWNTPLLPVKKPGTNDYRPVQDLREVNKRVQDIHPTVPNPYNLLSSLPPSHTWYSVLDLKDAFFCLKLHPNSQPLFAFEWRDPEKGNTGQLTWTRLPQGFKNSPTLFNEALHRDLASFRALNPQVVMLQYVDDLLVAAPTYRDCKEGTRRLLQELSKLGYRVSAKKAQLCREEVTYLGYLLKGGKRWLTPARKATVMKIPTPTTPRQVREFLGKAGFCRLFIPGFASLAAPLYPLTRPKVPFTWTEAHQEAFGRIKEALLSAPALALPDLTKPFALYVDEKEGVARGVLTQTLGPWRRPVAYLSKKLDPVASGWPTCLKAIAAVALLLKDADKLTLGQNVLVIAPHNLESIVRQPPDRWMTNARMTHYQSLLLNERVSFAPPAILNPATLLPVESDDTPIHICSEILAEETGTRPDLRDQPLPGVPAWYTDGSSFIMDGRRQAGAAIVDNKRTVWASNLPEGTSAQKAELIALTQALRLAEGKSINIYTDSRYAFATAHVHGAIYKQRGWLTSAGKDIKNKEEILALLEAIHLPKRVAIIHCPGHQRGTDPVATGNRKADEAAKQAAQSTRILTETTKNAGKRTADGSEFEKRTADGSEFESPKKKAKVE

SEQ ID NO: 1705 - protein, 2121 aa, synthetic construct
  source 1..2121: note = Description of Artificial Sequence: Synthetic polypeptide
MPAAKRVKLDGGDKKYSIGLDIGTNSVGWAVITDEYKVPSKKFKVLGNTDRHSIKKNLIGALLFDSGETAEATRLKRTARRRYTRRKNRICYLQEIFSNEMAKVDDSFFHRLEESFLVEEDKKHERHPIFGNIVDEVAYHEKYPTIYHLRKKLVDSTDKADLRLIYLALAHMIKFRGHFLIEGDLNPDNSDVDKLFIQLVQTYNQLFEENPINASGVDAKAILSARLSKSRRLENLIAQLPGEKKNGLFGNLIALSLGLTPNFKSNFDLAEDAKLQLSKDTYDDDLDNLLAQIGDQYADLFLAAKNLSDAILLSDILRVNTEITKAPLSASMIKRYDEHHQDLTLLKALVRQQLPEKYKEIFFDQSKNGYAGYIDGGASQEEFYKFIKPILEKMDGTEELLVKLNREDLLRKQRTFDNGSIPHQIHLGELHAILRRQEDFYPFLKDNREKIEKILTFRIPYYVGPLARGNSRFAWMTRKSEETITPWNFEEVVDKGASAQSFIERMTNFDKNLPNEKVLPKHSLLYEYFTVYNELTKVKYVTEGMRKPAFLSGEQKKAIVDLLFKTNRKVTVKQLKEDYFKKIECFDSVEISGVEDRFNASLGTYHDLLKIIKDKDFLDNEENEDILEDIVLTLTLFEDREMIEERLKTYAHLFDDKVMKQLKRRRYTGWGRLSRKLINGIRDKQSGKTILDFLKSDGFANRNFMQLIHDDSLTFKEDIQKAQVSGQGDSLHEHIANLAGSPAIKKGILQTVKVVDELVKVMGRHKPENIVIEMARENQTTQKGQKNSRERMKRIEEGIKELGSQILKEHPVENTQLQNEKLYLYYLQNGRDMYVDQELDINRLSDYDVDHIVPQSFLKDDSIDNKVLTRSDKARGKSDNVPSEEVVKKMKNYWRQLLNAKLITQRKFDNLTKAERGGLSELDKAGFIKRQLVETRQITKHVAQILDSRMNTKYDENDKLIREVKVITLKSKLVSDFRKDFQFYKVREINNYHHAHDAYLNAVVGTALIKKYPKLESEFVYGDYKVYDVRKMIAKSEQEIGKATAKYFFYSNIMNFFKTEITLANGEIRKRPLIETNGETGEIVWDKGRDFATVRKVLSMPQVNIVKKTEVQTGGFSKESILPKRNSDKLIARKKDWDPKKYGGFDSPTVAYSVLVVAKVEKGKSKKLKSVKELLGITIMERSSFEKNPIDFLEAKGYKEVKKDLIIKLPKYSLFELENGRKRMLASAGELQKGNELALPSKYVNFLYLASHYEKLKGSPEDNEQKQLFVEQHKHYLDEIIEQISEFSKRVILADANLDKVLSAYNKHRDKPIREQAENIIHLFTLTNLGAPAAFKYFDTTIDRKRYTSTKEVLDATLIHQSITGLYETRIDLSQLGGDGGGGGGSGGLLGRDLLTKLKAQIQFSTEGPQVTWEDRPAMCLVLNLEEEYRLHEKPVPPSIDPSWLQLFPMVWAEKAGMGLANQVPPVVVELKSDASPVAVRQYPMSKEAREGIRPHIQRFLDLGILVPCQSPWNTPLLPVKKPGTNDYRPVQDLREVNKRVQDIHPTVPNPYNLLSSLPPSHTWYSVLDLKDAFFCLKLHPNSQPLFAFEWRDPEKGNTGQLTWTRLPQGFKNSPTLFNEALHRDLASFRALNPQVVMLQYVDDLLVAAPTYRDCKEGTRRLLQELSKLGYRVSAKKAQLCREEVTYLGYLLKGGKRWLTPARKATVMKIPTPTTPRQVREFLGKAGFCRLFIPGFASLAAPLYPLTRPKVPFTWTEAHQEAFGRIKEALLSAPALALPDLTKPFALYVDEKEGVARGVLTQTLGPWRRPVAYLSKKLDPVASGWPTCLKAIAAVALLLKDADKLTLGQNVLVIAPHNLESIVRQPPDRWMTNARMTHYQSLLLNERVSFAPPAILNPATLLPVESDDTPIHICSEILAEETGTRPDLRDQPLPGVPAWYTDGSSFIMDGRRQAGAAIVDNKRTVWASNLPEGTSAQKAELIALTQALRLAEGKSINIYTDSRYAFATAHVHGAIYKQRGWLTSAGKDIKNKEEILALLEAIHLPKRVAIIHCPGHQRGTDPVATGNRKADEAAKQAAQSTRILTETTKNAGKRTADGSEFEKRTADGSEFESPKKKAKVE

SEQ ID NO: 1706 - protein, 2146 aa, synthetic construct
  source 1..2146: note = Description of Artificial Sequence: Synthetic polypeptide
MPAAKRVKLDGGDKKYSIGLDIGTNSVGWAVITDEYKVPSKKFKVLGNTDRHSIKKNLIGALLFDSGETAEATRLKRTARRRYTRRKNRICYLQEIFSNEMAKVDDSFFHRLEESFLVEEDKKHERHPIFGNIVDEVAYHEKYPTIYHLRKKLVDSTDKADLRLIYLALAHMIKFRGHFLIEGDLNPDNSDVDKLFIQLVQTYNQLFEENPINASGVDAKAILSARLSKSRRLENLIAQLPGEKKNGLFGNLIALSLGLTPNFKSNFDLAEDAKLQLSKDTYDDDLDNLLAQIGDQYADLFLAAKNLSDAILLSDILRVNTEITKAPLSASMIKRYDEHHQDLTLLKALVRQQLPEKYKEIFFDQSKNGYAGYIDGGASQEEFYKFIKPILEKMDGTEELLVKLNREDLLRKQRTFDNGSIPHQIHLGELHAILRRQEDFYPFLKDNREKIEKILTFRIPYYVGPLARGNSRFAWMTRKSEETITPWNFEEVVDKGASAQSFIERMTNFDKNLPNEKVLPKHSLLYEYFTVYNELTKVKYVTEGMRKPAFLSGEQKKAIVDLLFKTNRKVTVKQLKEDYFKKIECFDSVEISGVEDRFNASLGTYHDLLKIIKDKDFLDNEENEDILEDIVLTLTLFEDREMIEERLKTYAHLFDDKVMKQLKRRRYTGWGRLSRKLINGIRDKQSGKTILDFLKSDGFANRNFMQLIHDDSLTFKEDIQKAQVSGQGDSLHEHIANLAGSPAIKKGILQTVKVVDELVKVMGRHKPENIVIEMARENQTTQKGQKNSRERMKRIEEGIKELGSQILKEHPVENTQLQNEKLYLYYLQNGRDMYVDQELDINRLSDYDVDHIVPQSFLKDDSIDNKVLTRSDKARGKSDNVPSEEVVKKMKNYWRQLLNAKLITQRKFDNLTKAERGGLSELDKAGFIKRQLVETRQITKHVAQILDSRMNTKYDENDKLIREVKVITLKSKLVSDFRKDFQFYKVREINNYHHAHDAYLNAVVGTALIKKYPKLESEFVYGDYKVYDVRKMIAKSEQEIGKATAKYFFYSNIMNFFKTEITLANGEIRKRPLIETNGETGEIVWDKGRDFATVRKVLSMPQVNIVKKTEVQTGGFSKESILPKRNSDKLIARKKDWDPKKYGGFDSPTVAYSVLVVAKVEKGKSKKLKSVKELLGITIMERSSFEKNPIDFLEAKGYKEVKKDLIIKLPKYSLFELENGRKRMLASAGELQKGNELALPSKYVNFLYLASHYEKLKGSPEDNEQKQLFVEQHKHYLDEIIEQISEFSKRVILADANLDKVLSAYNKHRDKPIREQAENIIHLFTLTNLGAPAAFKYFDTTIDRKRYTSTKEVLDATLIHQSITGLYETRIDLSQLGGDGGEAAAKEAAAKEAAAKEAAAKEAAAKEAAAKGGLLGRDLLTKLKAQIQFSTEGPQVTWEDRPAMCLVLNLEEEYRLHEKPVPPSIDPSWLQLFPMVWAEKAGMGLANQVPPVVVELKSDASPVAVRQYPMSKEAREGIRPHIQRFLDLGILVPCQSPWNTPLLPVKKPGTNDYRPVQDLREVNKRVQDIHPTVPNPYNLLSSLPPSHTWYSVLDLKDAFFCLKLHPNSQPLFAFEWRDPEKGNTGQLTWTRLPQGFKNSPTLFNEALHRDLASFRALNPQVVMLQYVDDLLVAAPTYRDCKEGTRRLLQELSKLGYRVSAKKAQLCREEVTYLGYLLKGGKRWLTPARKATVMKIPTPTTPRQVREFLGKAGFCRLFIPGFASLAAPLYPLTRPKVPFTWTEAHQEAFGRIKEALLSAPALALPDLTKPFALYVDEKEGVARGVLTQTLGPWRRPVAYLSKKLDPVASGWPTCLKAIAAVALLLKDADKLTLGQNVLVIAPHNLESIVRQPPDRWMTNARMTHYQSLLLNERVSFAPPAILNPATLLPVESDDTPIHICSEILAEETGTRPDLRDQPLPGVPAWYTDGSSFIMDGRRQAGAAIVDNKRTVWASNLPEGTSAQKAELIALTQALRLAEGKSINIYTDSRYAFATAHVHGAIYKQRGWLTSAGKDIKNKEEILALLEAIHLPKRVAIIHCPGHQRGTDPVATGNRKADEAAKQAAQSTRILTETTKNAGKRTADGSEFEKRTADGSEFESPKKKAKVE

SEQ ID NO: 1707 - protein, 2122 aa, synthetic construct
  source 1..2122: note = Description of Artificial Sequence: Synthetic polypeptide
MPAAKRVKLDGGDKKYSIGLDIGTNSVGWAVITDEYKVPSKKFKVLGNTDRHSIKKNLIGALLFDSGETAEATRLKRTARRRYTRRKNRICYLQEIFSNEMAKVDDSFFHRLEESFLVEEDKKHERHPIFGNIVDEVAYHEKYPTIYHLRKKLVDSTDKADLRLIYLALAHMIKFRGHFLIEGDLNPDNSDVDKLFIQLVQTYNQLFEENPINASGVDAKAILSARLSKSRRLENLIAQLPGEKKNGLFGNLIALSLGLTPNFKSNFDLAEDAKLQLSKDTYDDDLDNLLAQIGDQYADLFLAAKNLSDAILLSDILRVNTEITKAPLSASMIKRYDEHHQDLTLLKALVRQQLPEKYKEIFFDQSKNGYAGYIDGGASQEEFYKFIKPILEKMDGTEELLVKLNREDLLRKQRTFDNGSIPHQIHLGELHAILRRQEDFYPFLKDNREKIEKILTFRIPYYVGPLARGNSRFAWMTRKSEETITPWNFEEVVDKGASAQSFIERMTNFDKNLPNEKVLPKHSLLYEYFTVYNELTKVKYVTEGMRKPAFLSGEQKKAIVDLLFKTNRKVTVKQLKEDYFKKIECFDSVEISGVEDRFNASLGTYHDLLKIIKDKDFLDNEENEDILEDIVLTLTLFEDREMIEERLKTYAHLFDDKVMKQLKRRRYTGWGRLSRKLINGIRDKQSGKTILDFLKSDGFANRNFMQLIHDDSLTFKEDIQKAQVSGQGDSLHEHIANLAGSPAIKKGILQTVKVVDELVKVMGRHKPENIVIEMARENQTTQKGQKNSRERMKRIEEGIKELGSQILKEHPVENTQLQNEKLYLYYLQNGRDMYVDQELDINRLSDYDVDHIVPQSFLKDDSIDNKVLTRSDKARGKSDNVPSEEVVKKMKNYWRQLLNAKLITQRKFDNLTKAERGGLSELDKAGFIKRQLVETRQITKHVAQILDSRMNTKYDENDKLIREVKVITLKSKLVSDFRKDFQFYKVREINNYHHAHDAYLNAVVGTALIKKYPKLESEFVYGDYKVYDVRKMIAKSEQEIGKATAKYFFYSNIMNFFKTEITLANGEIRKRPLIETNGETGEIVWDKGRDFATVRKVLSMPQVNIVKKTEVQTGGFSKESILPKRNSDKLIARKKDWDPKKYGGFDSPTVAYSVLVVAKVEKGKSKKLKSVKELLGITIMERSSFEKNPIDFLEAKGYKEVKKDLIIKLPKYSLFELENGRKRMLASAGELQKGNELALPSKYVNFLYLASHYEKLKGSPEDNEQKQLFVEQHKHYLDEIIEQISEFSKRVILADANLDKVLSAYNKHRDKPIREQAENIIHLFTLTNLGAPAAFKYFDTTIDRKRYTSTKEVLDATLIHQSITGLYETRIDLSQLGGDGGGGGGGGGGLLGRDLLTKLKAQIQFSTEGPQVTWEDRPAMCLVLNLEEEYRLHEKPVPPSIDPSWLQLFPMVWAEKAGMGLANQVPPVVVELKSDASPVAVRQYPMSKEAREGIRPHIQRFLDLGILVPCQSPWNTPLLPVKKPGTNDYRPVQDLREVNKRVQDIHPTVPNPYNLLSSLPPSHTWYSVLDLKDAFFCLKLHPNSQPLFAFEWRDPEKGNTGQLTWTRLPQGFKNSPTLFNEALHRDLASFRALNPQVVMLQYVDDLLVAAPTYRDCKEGTRRLLQELSKLGYRVSAKKAQLCREEVTYLGYLLKGGKRWLTPARKATVMKIPTPTTPRQVREFLGKAGFCRLFIPGFASLAAPLYPLTRPKVPFTWTEAHQEAFGRIKEALLSAPALALPDLTKPFALYVDEKEGVARGVLTQTLGPWRRPVAYLSKKLDPVASGWPTCLKAIAAVALLLKDADKLTLGQNVLVIAPHNLESIVRQPPDRWMTNARMTHYQSLLLNERVSFAPPAILNPATLLPVESDDTPIHICSEILAEETGTRPDLRDQPLPGVPAWYTDGSSFIMDGRRQAGAAIVDNKRTVWASNLPEGTSAQKAELIALTQALRLAEGKSINIYTDSRYAFATAHVHGAIYKQRGWLTSAGKDIKNKEEILALLEAIHLPKRVAIIHCPGHQRGTDPVATGNRKADEAAKQAAQSTRILTETTKNAGKRTADGSEFEKRTADGSEFESPKKKAKVE

SEQ ID NO: 1708 - protein, 2127 aa, synthetic construct
  source 1..2127: note = Description of Artificial Sequence: Synthetic polypeptide
MPAAKRVKLDGGDKKYSIGLDIGTNSVGWAVITDEYKVPSKKFKVLGNTDRHSIKKNLIGALLFDSGETAEATRLKRTARRRYTRRKNRICYLQEIFSNEMAKVDDSFFHRLEESFLVEEDKKHERHPIFGNIVDEVAYHEKYPTIYHLRKKLVDSTDKADLRLIYLALAHMIKFRGHFLIEGDLNPDNSDVDKLFIQLVQTYNQLFEENPINASGVDAKAILSARLSKSRRLENLIAQLPGEKKNGLFGNLIALSLGLTPNFKSNFDLAEDAKLQLSKDTYDDDLDNLLAQIGDQYADLFLAAKNLSDAILLSDILRVNTEITKAPLSASMIKRYDEHHQDLTLLKALVRQQLPEKYKEIFFDQSKNGYAGYIDGGASQEEFYKFIKPILEKMDGTEELLVKLNREDLLRKQRTFDNGSIPHQIHLGELHAILRRQEDFYPFLKDNREKIEKILTFRIPYYVGPLARGNSRFAWMTRKSEETITPWNFEEVVDKGASAQSFIERMTNFDKNLPNEKVLPKHSLLYEYFTVYNELTKVKYVTEGMRKPAFLSGEQKKAIVDLLFKTNRKVTVKQLKEDYFKKIECFDSVEISGVEDRFNASLGTYHDLLKIIKDKDFLDNEENEDILEDIVLTLTLFEDREMIEERLKTYAHLFDDKVMKQLKRRRYTGWGRLSRKLINGIRDKQSGKTILDFLKSDGFANRNFMQLIHDDSLTFKEDIQKAQVSGQGDSLHEHIANLAGSPAIKKGILQTVKVVDELVKVMGRHKPENIVIEMARENQTTQKGQKNSRERMKRIEEGIKELGSQILKEHPVENTQLQNEKLYLYYLQNGRDMYVDQELDINRLSDYDVDHIVPQSFLKDDSIDNKVLTRSDKARGKSDNVPSEEVVKKMKNYWRQLLNAKLITQRKFDNLTKAERGGLSELDKAGFIKRQLVETRQITKHVAQILDSRMNTKYDENDKLIREVKVITLKSKLVSDFRKDFQFYKVREINNYHHAHDAYLNAVVGTALIKKYPKLESEFVYGDYKVYDVRKMIAKSEQEIGKATAKYFFYSNIMNFFKTEITLANGEIRKRPLIETNGETGEIVWDKGRDFATVRKVLSMPQVNIVKKTEVQTGGFSKESILPKRNSDKLIARKKDWDPKKYGGFDSPTVAYSVLVVAKVEKGKSKKLKSVKELLGITIMERSSFEKNPIDFLEAKGYKEVKKDLIIKLPKYSLFELENGRKRMLASAGELQKGNELALPSKYVNFLYLASHYEKLKGSPEDNEQKQLFVEQHKHYLDEIIEQISEFSKRVILADANLDKVLSAYNKHRDKPIREQAENIIHLFTLTNLGAPAAFKYFDTTIDRKRYTSTKEVLDATLIHQSITGLYETRIDLSQLGGDGGGSSGGGEAAAKGGLLGRDLLTKLKAQIQFSTEGPQVTWEDRPAMCLVLNLEEEYRLHEKPVPPSIDPSWLQLFPMVWAEKAGMGLANQVPPVVVELKSDASPVAVRQYPMSKEAREGIRPHIQRFLDLGILVPCQSPWNTPLLPVKKPGTNDYRPVQDLREVNKRVQDIHPTVPNPYNLLSSLPPSHTWYSVLDLKDAFFCLKLHPNSQPLFAFEWRDPEKGNTGQLTWTRLPQGFKNSPTLFNEALHRDLASFRALNPQVVMLQYVDDLLVAAPTYRDCKEGTRRLLQELSKLGYRVSAKKAQLCREEVTYLGYLLKGGKRWLTPARKATVMKIPTPTTPRQVREFLGKAGFCRLFIPGFASLAAPLYPLTRPKVPFTWTEAHQEAFGRIKEALLSAPALALPDLTKPFALYVDEKEGVARGVLTQTLGPWRRPVAYLSKKLDPVASGWPTCLKAIAAVALLLKDADKLTLGQNVLVIAPHNLESIVRQPPDRWMTNARMTHYQSLLLNERVSFAPPAILNPATLLPVESDDTPIHICSEILAEETGTRPDLRDQPLPGVPAWYTDGSSFIMDGRRQAGAAIVDNKRTVWASNLPEGTSAQKAELIALTQALRLAEGKSINIYTDSRYAFATAHVHGAIYKQRGWLTSAGKDIKNKEEILALLEAIHLPKRVAIIHCPGHQRGTDPVATGNRKADEAAKQAAQSTRILTETTKNAGKRTADGSEFEKRTADGSEFESPKKKAKVE

SEQ ID NO: 1709 - protein, 2124 aa, synthetic construct
  source 1..2124: note = Description of Artificial Sequence: Synthetic polypeptide
MPAAKRVKLDGGDKKYSIGLDIGTNSVGWAVITDEYKVPSKKFKVLGNTDRHSIKKNLIGALLFDSGETAEATRLKRTARRRYTRRKNRICYLQEIFSNEMAKVDDSFFHRLEESFLVEEDKKHERHPIFGNIVDEVAYHEKYPTIYHLRKKLVDSTDKADLRLIYLALAHMIKFRGHFLIEGDLNPDNSDVDKLFIQLVQTYNQLFEENPINASGVDAKAILSARLSKSRRLENLIAQLPGEKKNGLFGNLIALSLGLTPNFKSNFDLAEDAKLQLSKDTYDDDLDNLLAQIGDQYADLFLAAKNLSDAILLSDILRVNTEITKAPLSASMIKRYDEHHQDLTLLKALVRQQLPEKYKEIFFDQSKNGYAGYIDGGASQEEFYKFIKPILEKMDGTEELLVKLNREDLLRKQRTFDNGSIPHQIHLGELHAILRRQEDFYPFLKDNREKIEKILTFRIPYYVGPLARGNSRFAWMTRKSEETITPWNFEEVVDKGASAQSFIERMTNFDKNLPNEKVLPKHSLLYEYFTVYNELTKVKYVTEGMRKPAFLSGEQKKAIVDLLFKTNRKVTVKQLKEDYFKKIECFDSVEISGVEDRFNASLGTYHDLLKIIKDKDFLDNEENEDILEDIVLTLTLFEDREMIEERLKTYAHLFDDKVMKQLKRRRYTGWGRLSRKLINGIRDKQSGKTILDFLKSDGFANRNFMQLIHDDSLTFKEDIQKAQVSGQGDSLHEHIANLAGSPAIKKGILQTVKVVDELVKVMGRHKPENIVIEMARENQTTQKGQKNSRERMKRIEEGIKELGSQILKEHPVENTQLQNEKLYLYYLQNGRDMYVDQELDINRLSDYDVDHIVPQSFLKDDSIDNKVLTRSDKARGKSDNVPSEEVVKKMKNYWRQLLNAKLITQRKFDNLTKAERGGLSELDKAGFIKRQLVETRQITKHVAQILDSRMNTKYDENDKLIREVKVITLKSKLVSDFRKDFQFYKVREINNYHHAHDAYLNAVVGTALIKKYPKLESEFVYGDYKVYDVRKMIAKSEQEIGKATAKYFFYSNIMNFFKTEITLANGEIRKRPLIETNGETGEIVWDKGRDFATVRKVLSMPQVNIVKKTEVQTGGFSKESILPKRNSDKLIARKKDWDPKKYGGFDSPTVAYSVLVVAKVEKGKSKKLKSVKELLGITIMERSSFEKNPIDFLEAKGYKEVKKDLIIKLPKYSLFELENGRKRMLASAGELQKGNELALPSKYVNFLYLASHYEKLKGSPEDNEQKQLFVEQHKHYLDEIIEQISEFSKRVILADANLDKVLSAYNKHRDKPIREQAENIIHLFTLTNLGAPAAFKYFDTTIDRKRYTSTKEVLDATLIHQSITGLYETRIDLSQLGGDGGGSSEAAAKGGLLGRDLLTKLKAQIQFSTEGPQVTWEDRPAMCLVLNLEEEYRLHEKPVPPSIDPSWLQLFPMVWAEKAGMGLANQVPPVVVELKSDASPVAVRQYPMSKEAREGIRPHIQRFLDLGILVPCQSPWNTPLLPVKKPGTNDYRPVQDLREVNKRVQDIHPTVPNPYNLLSSLPPSHTWYSVLDLKDAFFCLKLHPNSQPLFAFEWRDPEKGNTGQLTWTRLPQGFKNSPTLFNEALHRDLASFRALNPQVVMLQYVDDLLVAAPTYRDCKEGTRRLLQELSKLGYRVSAKKAQLCREEVTYLGYLLKGGKRWLTPARKATVMKIPTPTTPRQVREFLGKAGFCRLFIPGFASLAAPLYPLTRPKVPFTWTEAHQEAFGRIKEALLSAPALALPDLTKPFALYVDEKEGVARGVLTQTLGPWRRPVAYLSKKLDPVASGWPTCLKAIAAVALLLKDADKLTLGQNVLVIAPHNLESIVRQPPDRWMTNARMTHYQSLLLNERVSFAPPAILNPATLLPVESDDTPIHICSEILAEETGTRPDLRDQPLPGVPAWYTDGSSFIMDGRRQAGAAIVDNKRTVWASNLPEGTSAQKAELIALTQALRLAEGKSINIYTDSRYAFATAHVHGAIYKQRGWLTSAGKDIKNKEEILALLEAIHLPKRVAIIHCPGHQRGTDPVATGNRKADEAAKQAAQSTRILTETTKNAGKRTADGSEFEKRTADGSEFESPKKKAKVE

SEQ ID NO: 1710 - protein, 2125 aa, synthetic construct
  source 1..2125: note = Description of Artificial Sequence: Synthetic polypeptide
MPAAKRVKLDGGDKKYSIGLDIGTNSVGWAVITDEYKVPSKKFKVLGNTDRHSIKKNLIGALLFDSGETAEATRLKRTARRRYTRRKNRICYLQEIFSNEMAKVDDSFFHRLEESFLVEEDKKHERHPIFGNIVDEVAYHEKYPTIYHLRKKLVDSTDKADLRLIYLALAHMIKFRGHFLIEGDLNPDNSDVDKLFIQLVQTYNQLFEENPINASGVDAKAILSARLSKSRRLENLIAQLPGEKKNGLFGNLIALSLGLTPNFKSNFDLAEDAKLQLSKDTYDDDLDNLLAQIGDQYADLFLAAKNLSDAILLSDILRVNTEITKAPLSASMIKRYDEHHQDLTLLKALVRQQLPEKYKEIFFDQSKNGYAGYIDGGASQEEFYKFIKPILEKMDGTEELLVKLNREDLLRKQRTFDNGSIPHQIHLGELHAILRRQEDFYPFLKDNREKIEKILTFRIPYYVGPLARGNSRFAWMTRKSEETITPWNFEEVVDKGASAQSFIERMTNFDKNLPNEKVLPKHSLLYEYFTVYNELTKVKYVTEGMRKPAFLSGEQKKAIVDLLFKTNRKVTVKQLKEDYFKKIECFDSVEISGVEDRFNASLGTYHDLLKIIKDKDFLDNEENEDILEDIVLTLTLFEDREMIEERLKTYAHLFDDKVMKQLKRRRYTGWGRLSRKLINGIRDKQSGKTILDFLKSDGFANRNFMQLIHDDSLTFKEDIQKAQVSGQGDSLHEHIANLAGSPAIKKGILQTVKVVDELVKVMGRHKPENIVIEMARENQTTQKGQKNSRERMKRIEEGIKELGSQILKEHPVENTQLQNEKLYLYYLQNGRDMYVDQELDINRLSDYDVDHIVPQSFLKDDSIDNKVLTRSDKARGKSDNVPSEEVVKKMKNYWRQLLNAKLITQRKFDNLTKAERGGLSELDKAGFIKRQLVETRQITKHVAQILDSRMNTKYDENDKLIREVKVITLKSKLVSDFRKDFQFYKVREINNYHHAHDAYLNAVVGTALIKKYPKLESEFVYGDYKVYDVRKMIAKSEQEIGKATAKYFFYSNIMNFFKTEITLANGEIRKRPLIETNGETGEIVWDKGRDFATVRKVLSMPQVNIVKKTEVQTGGFSKESILPKRNSDKLIARKKDWDPKKYGGFDSPTVAYSVLVVAKVEKGKSKKLKSVKELLGITIMERSSFEKNPIDFLEAKGYKEVKKDLIIKLPKYSLFELENGRKRMLASAGELQKGNELALPSKYVNFLYLASHYEKLKGSPEDNEQKQLFVEQHKHYLDEIIEQISEFSKRVILADANLDKVLSAYNKHRDKPIREQAENIIHLFTLTNLGAPAAFKYFDTTIDRKRYTSTKEVLDATLIHQSITGLYETRIDLSQLGGDGGGGGPAPGGSGGLLGRDLLTKLKAQIQFSTEGPQVTWEDRPAMCLVLNLEEEYRLHEKPVPPSIDPSWLQLFPMVWAEKAGMGLANQVPPVVVELKSDASPVAVRQYPMSKEAREGIRPHIQRFLDLGILVPCQSPWNTPLLPVKKPGTNDYRPVQDLREVNKRVQDIHPTVPNPYNLLSSLPPSHTWYSVLDLKDAFFCLKLHPNSQPLFAFEWRDPEKGNTGQLTWTRLPQGFKNSPTLFNEALHRDLASFRALNPQVVMLQYVDDLLVAAPTYRDCKEGTRRLLQELSKLGYRVSAKKAQLCREEVTYLGYLLKGGKRWLTPARKATVMKIPTPTTPRQVREFLGKAGFCRLFIPGFASLAAPLYPLTRPKVPFTWTEAHQEAFGRIKEALLSAPALALPDLTKPFALYVDEKEGVARGVLTQTLGPWRRPVAYLSKKLDPVASGWPTCLKAIAAVALLLKDADKLTLGQNVLVIAPHNLESIVRQPPDRWMTNARMTHYQSLLLNERVSFAPPAILNPATLLPVESDDTPIHICSEILAEETGTRPDLRDQPLPGVPAWYTDGSSFIMDGRRQAGAAIVDNKRTVWASNLPEGTSAQKAELIALTQALRLAEGKSINIYTDSRYAFATAHVHGAIYKQRGWLTSAGKDIKNKEEILALLEAIHLPKRVAIIHCPGHQRGTDPVATGNRKADEAAKQAAQSTRILTETTKNAGKRTADGSEFEKRTADGSEFESPKKKAKVE

SEQ ID NO: 1711 - protein, 2127 aa, synthetic construct
  source 1..2127: note = Description of Artificial Sequence: Synthetic polypeptide
MPAAKRVKLDGGDKKYSIGLDIGTNSVGWAVITDEYKVPSKKFKVLGNTDRHSIKKNLIGALLFDSGETAEATRLKRTARRRYTRRKNRICYLQEIFSNEMAKVDDSFFHRLEESFLVEEDKKHERHPIFGNIVDEVAYHEKYPTIYHLRKKLVDSTDKADLRLIYLALAHMIKFRGHFLIEGDLNPDNSDVDKLFIQLVQTYNQLFEENPINASGVDAKAILSARLSKSRRLENLIAQLPGEKKNGLFGNLIALSLGLTPNFKSNFDLAEDAKLQLSKDTYDDDLDNLLAQIGDQYADLFLAAKNLSDAILLSDILRVNTEITKAPLSASMIKRYDEHHQDLTLLKALVRQQLPEKYKEIFFDQSKNGYAGYIDGGASQEEFYKFIKPILEKMDGTEELLVKLNREDLLRKQRTFDNGSIPHQIHLGELHAILRRQEDFYPFLKDNREKIEKILTFRIPYYVGPLARGNSRFAWMTRKSEETITPWNFEEVVDKGASAQSFIERMTNFDKNLPNEKVLPKHSLLYEYFTVYNELTKVKYVTEGMRKPAFLSGEQKKAIVDLLFKTNRKVTVKQLKEDYFKKIECFDSVEISGVEDRFNASLGTYHDLLKIIKDKDFLDNEENEDILEDIVLTLTLFEDREMIEERLKTYAHLFDDKVMKQLKRRRYTGWGRLSRKLINGIRDKQSGKTILDFLKSDGFANRNFMQLIHDDSLTFKEDIQKAQVSGQGDSLHEHIANLAGSPAIKKGILQTVKVVDELVKVMGRHKPENIVIEMARENQTTQKGQKNSRERMKRIEEGIKELGSQILKEHPVENTQLQNEKLYLYYLQNGRDMYVDQELDINRLSDYDVDHIVPQSFLKDDSIDNKVLTRSDKARGKSDNVPSEEVVKKMKNYWRQLLNAKLITQRKFDNLTKAERGGLSELDKAGFIKRQLVETRQITKHVAQILDSRMNTKYDENDKLIREVKVITLKSKLVSDFRKDFQFYKVREINNYHHAHDAYLNAVVGTALIKKYPKLESEFVYGDYKVYDVRKMIAKSEQEIGKATAKYFFYSNIMNFFKTEITLANGEIRKRPLIETNGETGEIVWDKGRDFATVRKVLSMPQVNIVKKTEVQTGGFSKESILPKRNSDKLIARKKDWDPKKYGGFDSPTVAYSVLVVAKVEKGKSKKLKSVKELLGITIMERSSFEKNPIDFLEAKGYKEVKKDLIIKLPKYSLFELENGRKRMLASAGELQKGNELALPSKYVNFLYLASHYEKLKGSPEDNEQKQLFVEQHKHYLDEIIEQISEFSKRVILADANLDKVLSAYNKHRDKPIREQAENIIHLFTLTNLGAPAAFKYFDTTIDRKRYTSTKEVLDATLIHQSITGLYETRIDLSQLGGDGGGSSEAAAKPAPGGLLGRDLLTKLKAQIQFSTEGPQVTWEDRPAMCLVLNLEEEYRLHEKPVPPSIDPSWLQLFPMVWAEKAGMGLANQVPPVVVELKSDASPVAVRQYPMSKEAREGIRPHIQRFLDLGILVPCQSPWNTPLLPVKKPGTNDYRPVQDLREVNKRVQDIHPTVPNPYNLLSSLPPSHTWYSVLDLKDAFFCLKLHPNSQPLFAFEWRDPEKGNTGQLTWTRLPQGFKNSPTLFNEALHRDLASFRALNPQVVMLQYVDDLLVAAPTYRDCKEGTRRLLQELSKLGYRVSAKKAQLCREEVTYLGYLLKGGKRWLTPARKATVMKIPTPTTPRQVREFLGKAGFCRLFIPGFASLAAPLYPLTRPKVPFTWTEAHQEAFGRIKEALLSAPALALPDLTKPFALYVDEKEGVARGVLTQTLGPWRRPVAYLSKKLDPVASGWPTCLKAIAAVALLLKDADKLTLGQNVLVIAPHNLESIVRQPPDRWMTNARMTHYQSLLLNERVSFAPPAILNPATLLPVESDDTPIHICSEILAEETGTRPDLRDQPLPGVPAWYTDGSSFIMDGRRQAGAAIVDNKRTVWASNLPEGTSAQKAELIALTQALRLAEGKSINIYTDSRYAFATAHVHGAIYKQRGWLTSAGKDIKNKEEILALLEAIHLPKRVAIIHCPGHQRGTDPVATGNRKADEAAKQAAQSTRILTETTKNAGKRTADGSEFEKRTADGSEFESPKKKAKVE

SEQ ID NO: 1712 - protein, 2131 aa, synthetic construct
  source 1..2131: note = Description of Artificial Sequence: Synthetic polypeptide
MPAAKRVKLDGGDKKYSIGLDIGTNSVGWAVITDEYKVPSKKFKVLGNTDRHSIKKNLIGALLFDSGETAEATRLKRTARRRYTRRKNRICYLQEIFSNEMAKVDDSFFHRLEESFLVEEDKKHERHPIFGNIVDEVAYHEKYPTIYHLRKKLVDSTDKADLRLIYLALAHMIKFRGHFLIEGDLNPDNSDVDKLFIQLVQTYNQLFEENPINASGVDAKAILSARLSKSRRLENLIAQLPGEKKNGLFGNLIALSLGLTPNFKSNFDLAEDAKLQLSKDTYDDDLDNLLAQIGDQYADLFLAAKNLSDAILLSDILRVNTEITKAPLSASMIKRYDEHHQDLTLLKALVRQQLPEKYKEIFFDQSKNGYAGYIDGGASQEEFYKFIKPILEKMDGTEELLVKLNREDLLRKQRTFDNGSIPHQIHLGELHAILRRQEDFYPFLKDNREKIEKILTFRIPYYVGPLARGNSRFAWMTRKSEETITPWNFEEVVDKGASAQSFIERMTNFDKNLPNEKVLPKHSLLYEYFTVYNELTKVKYVTEGMRKPAFLSGEQKKAIVDLLFKTNRKVTVKQLKEDYFKKIECFDSVEISGVEDRFNASLGTYHDLLKIIKDKDFLDNEENEDILEDIVLTLTLFEDREMIEERLKTYAHLFDDKVMKQLKRRRYTGWGRLSRKLINGIRDKQSGKTILDFLKSDGFANRNFMQLIHDDSLTFKEDIQKAQVSGQGDSLHEHIANLAGSPAIKKGILQTVKVVDELVKVMGRHKPENIVIEMARENQTTQKGQKNSRERMKRIEEGIKELGSQILKEHPVENTQLQNEKLYLYYLQNGRDMYVDQELDINRLSDYDVDHIVPQSFLKDDSIDNKVLTRSDKARGKSDNVPSEEVVKKMKNYWRQLLNAKLITQRKFDNLTKAERGGLSELDKAGFIKRQLVETRQITKHVAQILDSRMNTKYDENDKLIREVKVITLKSKLVSDFRKDFQFYKVREINNYHHAHDAYLNAVVGTALIKKYPKLESEFVYGDYKVYDVRKMIAKSEQEIGKATAKYFFYSNIMNFFKTEITLANGEIRKRPLIETNGETGEIVWDKGRDFATVRKVLSMPQVNIVKKTEVQTGGFSKESILPKRNSDKLIARKKDWDPKKYGGFDSPTVAYSVLVVAKVEKGKSKKLKSVKELLGITIMERSSFEKNPIDFLEAKGYKEVKKDLIIKLPKYSLFELENGRKRMLASAGELQKGNELALPSKYVNFLYLASHYEKLKGSPEDNEQKQLFVEQHKHYLDEIIEQISEFSKRVILADANLDKVLSAYNKHRDKPIREQAENIIHLFTLTNLGAPAAFKYFDTTIDRKRYTSTKEVLDATLIHQSITGLYETRIDLSQLGGDGGEAAAKGGGGSEAAAKGGLLGRDLLTKLKAQIQFSTEGPQVTWEDRPAMCLVLNLEEEYRLHEKPVPPSIDPSWLQLFPMVWAEKAGMGLANQVPPVVVELKSDASPVAVRQYPMSKEAREGIRPHIQRFLDLGILVPCQSPWNTPLLPVKKPGTNDYRPVQDLREVNKRVQDIHPTVPNPYNLLSSLPPSHTWYSVLDLKDAFFCLKLHPNSQPLFAFEWRDPEKGNTGQLTWTRLPQGFKNSPTLFNEALHRDLASFRALNPQVVMLQYVDDLLVAAPTYRDCKEGTRRLLQELSKLGYRVSAKKAQLCREEVTYLGYLLKGGKRWLTPARKATVMKIPTPTTPRQVREFLGKAGFCRLFIPGFASLAAPLYPLTRPKVPFTWTEAHQEAFGRIKEALLSAPALALPDLTKPFALYVDEKEGVARGVLTQTLGPWRRPVAYLSKKLDPVASGWPTCLKAIAAVALLLKDADKLTLGQNVLVIAPHNLESIVRQPPDRWMTNARMTHYQSLLLNERVSFAPPAILNPATLLPVESDDTPIHICSEILAEETGTRPDLRDQPLPGVPAWYTDGSSFIMDGRRQAGAAIVDNKRTVWASNLPEGTSAQKAELIALTQALRLAEGKSINIYTDSRYAFATAHVHGAIYKQRGWLTSAGKDIKNKEEILALLEAIHLPKRVAIIHCPGHQRGTDPVATGNRKADEAAKQAAQSTRILTETTKNAGKRTADGSEFEKRTADGSEFESPKKKAKVE

SEQ ID NO: 1713 - protein, 2127 aa, synthetic construct
  source 1..2127: note = Description of Artificial Sequence: Synthetic polypeptide
MPAAKRVKLDGGDKKYSIGLDIGTNSVGWAVITDEYKVPSKKFKVLGNTDRHSIKKNLIGALLFDSGETAEATRLKRTARRRYTRRKNRICYLQEIFSNEMAKVDDSFFHRLEESFLVEEDKKHERHPIFGNIVDEVAYHEKYPTIYHLRKKLVDSTDKADLRLIYLALAHMIKFRGHFLIEGDLNPDNSDVDKLFIQLVQTYNQLFEENPINASGVDAKAILSARLSKSRRLENLIAQLPGEKKNGLFGNLIALSLGLTPNFKSNFDLAEDAKLQLSKDTYDDDLDNLLAQIGDQYADLFLAAKNLSDAILLSDILRVNTEITKAPLSASMIKRYDEHHQDLTLLKALVRQQLPEKYKEIFFDQSKNGYAGYIDGGASQEEFYKFIKPILEKMDGTEELLVKLNREDLLRKQRTFDNGSIPHQIHLGELHAILRRQEDFYPFLKDNREKIEKILTFRIPYYVGPLARGNSRFAWMTRKSEETITPWNFEEVVDKGASAQSFIERMTNFDKNLPNEKVLPKHSLLYEYFTVYNELTKVKYVTEGMRKPAFLSGEQKKAIVDLLFKTNRKVTVKQLKEDYFKKIECFDSVEISGVEDRFNASLGTYHDLLKIIKDKDFLDNEENEDILEDIVLTLTLFEDREMIEERLKTYAHLFDDKVMKQLKRRRYTGWGRLSRKLINGIRDKQSGKTILDFLKSDGFANRNFMQLIHDDSLTFKEDIQKAQVSGQGDSLHEHIANLAGSPAIKKGILQTVKVVDELVKVMGRHKPENIVIEMARENQTTQKGQKNSRERMKRIEEGIKELGSQILKEHPVENTQLQNEKLYLYYLQNGRDMYVDQELDINRLSDYDVDHIVPQSFLKDDSIDNKVLTRSDKARGKSDNVPSEEVVKKMKNYWRQLLNAKLITQRKFDNLTKAERGGLSELDKAGFIKRQLVETRQITKHVAQILDSRMNTKYDENDKLIREVKVITLKSKLVSDFRKDFQFYKVREINNYHHAHDAYLNAVVGTALIKKYPKLESEFVYGDYKVYDVRKMIAKSEQEIGKATAKYFFYSNIMNFFKTEITLANGEIRKRPLIETNGETGEIVWDKGRDFATVRKVLSMPQVNIVKKTEVQTGGFSKESILPKRNSDKLIARKKDWDPKKYGGFDSPTVAYSVLVVAKVEKGKSKKLKSVKELLGITIMERSSFEKNPIDFLEAKGYKEVKKDLIIKLPKYSLFELENGRKRMLASAGELQKGNELALPSKYVNFLYLASHYEKLKGSPEDNEQKQLFVEQHKHYLDEIIEQISEFSKRVILADANLDKVLSAYNKHRDKPIREQAENIIHLFTLTNLGAPAAFKYFDTTIDRKRYTSTKEVLDATLIHQSITGLYETRIDLSQLGGDGGGSSGGSEAAAKGGLLGRDLLTKLKAQIQFSTEGPQVTWEDRPAMCLVLNLEEEYRLHEKPVPPSIDPSWLQLFPMVWAEKAGMGLANQVPPVVVELKSDASPVAVRQYPMSKEAREGIRPHIQRFLDLGILVPCQSPWNTPLLPVKKPGTNDYRPVQDLREVNKRVQDIHPTVPNPYNLLSSLPPSHTWYSVLDLKDAFFCLKLHPNSQPLFAFEWRDPEKGNTGQLTWTRLPQGFKNSPTLFNEALHRDLASFRALNPQVVMLQYVDDLLVAAPTYRDCKEGTRRLLQELSKLGYRVSAKKAQLCREEVTYLGYLLKGGKRWLTPARKATVMKIPTPTTPRQVREFLGKAGFCRLFIPGFASLAAPLYPLTRPKVPFTWTEAHQEAFGRIKEALLSAPALALPDLTKPFALYVDEKEGVARGVLTQTLGPWRRPVAYLSKKLDPVASGWPTCLKAIAAVALLLKDADKLTLGQNVLVIAPHNLESIVRQPPDRWMTNARMTHYQSLLLNERVSFAPPAILNPATLLPVESDDTPIHICSEILAEETGTRPDLRDQPLPGVPAWYTDGSSFIMDGRRQAGAAIVDNKRTVWASNLPEGTSAQKAELIALTQALRLAEGKSINIYTDSRYAFATAHVHGAIYKQRGWLTSAGKDIKNKEEILALLEAIHLPKRVAIIHCPGHQRGTDPVATGNRKADEAAKQAAQSTRILTETTKNAGKRTADGSEFEKRTADGSEFESPKKKAKVE

SEQ ID NO: 1714 - protein, 2125 aa, synthetic construct
  source 1..2125: note = Description of Artificial Sequence: Synthetic polypeptide
MPAAKRVKLDGGDKKYSIGLDIGTNSVGWAVITDEYKVPSKKFKVLGNTDRHSIKKNLIGALLFDSGETAEATRLKRTARRRYTRRKNRICYLQEIFSNEMAKVDDSFFHRLEESFLVEEDKKHERHPIFGNIVDEVAYHEKYPTIYHLRKKLVDSTDKADLRLIYLALAHMIKFRGHFLIEGDLNPDNSDVDKLFIQLVQTYNQLFEENPINASGVDAKAILSARLSKSRRLENLIAQLPGEKKNGLFGNLIALSLGLTPNFKSNFDLAEDAKLQLSKDTYDDDLDNLLAQIGDQYADLFLAAKNLSDAILLSDILRVNTEITKAPLSASMIKRYDEHHQDLTLLKALVRQQLPEKYKEIFFDQSKNGYAGYIDGGASQEEFYKFIKPILEKMDGTEELLVKLNREDLLRKQRTFDNGSIPHQIHLGELHAILRRQEDFYPFLKDNREKIEKILTFRIPYYVGPLARGNSRFAWMTRKSEETITPWNFEEVVDKGASAQSFIERMTNFDKNLPNEKVLPKHSLLYEYFTVYNELTKVKYVTEGMRKPAFLSGEQKKAIVDLLFKTNRKVTVKQLKEDYFKKIECFDSVEISGVEDRFNASLGTYHDLLKIIKDKDFLDNEENEDILEDIVLTLTLFEDREMIEERLKTYAHLFDDKVMKQLKRRRYTGWGRLSRKLINGIRDKQSGKTILDFLKSDGFANRNFMQLIHDDSLTFKEDIQKAQVSGQGDSLHEHIANLAGSPAIKKGILQTVKVVDELVKVMGRHKPENIVIEMARENQTTQKGQKNSRERMKRIEEGIKELGSQILKEHPVENTQLQNEKLYLYYLQNGRDMYVDQELDINRLSDYDVDHIVPQSFLKDDSIDNKVLTRSDKARGKSDNVPSEEVVKKMKNYWRQLLNAKLITQRKFDNLTKAERGGLSELDKAGFIKRQLVETRQITKHVAQILDSRMNTKYDENDKLIREVKVITLKSKLVSDFRKDFQFYKVREINNYHHAHDAYLNAVVGTALIKKYPKLESEFVYGDYKVYDVRKMIAKSEQEIGKATAKYFFYSNIMNFFKTEITLANGEIRKRPLIETNGETGEIVWDKGRDFATVRKVLSMPQVNIVKKTEVQTGGFSKESILPKRNSDKLIARKKDWDPKKYGGFDSPTVAYSVLVVAKVEKGKSKKLKSVKELLGITIMERSSFEKNPIDFLEAKGYKEVKKDLIIKLPKYSLFELENGRKRMLASAGELQKGNELALPSKYVNFLYLASHYEKLKGSPEDNEQKQLFVEQHKHYLDEIIEQISEFSKRVILADANLDKVLSAYNKHRDKPIREQAENIIHLFTLTNLGAPAAFKYFDTTIDRKRYTSTKEVLDATLIHQSITGLYETRIDLSQLGGDGGGSSGSSGSSGGLLGRDLLTKLKAQIQFSTEGPQVTWEDRPAMCLVLNLEEEYRLHEKPVPPSIDPSWLQLFPMVWAEKAGMGLANQVPPVVVELKSDASPVAVRQYPMSKEAREGIRPHIQRFLDLGILVPCQSPWNTPLLPVKKPGTNDYRPVQDLREVNKRVQDIHPTVPNPYNLLSSLPPSHTWYSVLDLKDAFFCLKLHPNSQPLFAFEWRDPEKGNTGQLTWTRLPQGFKNSPTLFNEALHRDLASFRALNPQVVMLQYVDDLLVAAPTYRDCKEGTRRLLQELSKLGYRVSAKKAQLCREEVTYLGYLLKGGKRWLTPARKATVMKIPTPTTPRQVREFLGKAGFCRLFIPGFASLAAPLYPLTRPKVPFTWTEAHQEAFGRIKEALLSAPALALPDLTKPFALYVDEKEGVARGVLTQTLGPWRRPVAYLSKKLDPVASGWPTCLKAIAAVALLLKDADKLTLGQNVLVIAPHNLESIVRQPPDRWMTNARMTHYQSLLLNERVSFAPPAILNPATLLPVESDDTPIHICSEILAEETGTRPDLRDQPLPGVPAWYTDGSSFIMDGRRQAGAAIVDNKRTVWASNLPEGTSAQKAELIALTQALRLAEGKSINIYTDSRYAFATAHVHGAIYKQRGWLTSAGKDIKNKEEILALLEAIHLPKRVAIIHCPGHQRGTDPVATGNRKADEAAKQAAQSTRILTETTKNAGKRTADGSEFEKRTADGSEFESPKKKAKVE

SEQ ID NO: 1715 - protein, 2127 aa, synthetic construct
  source 1..2127: note = Description of Artificial Sequence: Synthetic polypeptide
MPAAKRVKLDGGDKKYSIGLDIGTNSVGWAVITDEYKVPSKKFKVLGNTDRHSIKKNLIGALLFDSGETAEATRLKRTARRRYTRRKNRICYLQEIFSNEMAKVDDSFFHRLEESFLVEEDKKHERHPIFGNIVDEVAYHEKYPTIYHLRKKLVDSTDKADLRLIYLALAHMIKFRGHFLIEGDLNPDNSDVDKLFIQLVQTYNQLFEENPINASGVDAKAILSARLSKSRRLENLIAQLPGEKKNGLFGNLIALSLGLTPNFKSNFDLAEDAKLQLSKDTYDDDLDNLLAQIGDQYADLFLAAKNLSDAILLSDILRVNTEITKAPLSASMIKRYDEHHQDLTLLKALVRQQLPEKYKEIFFDQSKNGYAGYIDGGASQEEFYKFIKPILEKMDGTEELLVKLNREDLLRKQRTFDNGSIPHQIHLGELHAILRRQEDFYPFLKDNREKIEKILTFRIPYYVGPLARGNSRFAWMTRKSEETITPWNFEEVVDKGASAQSFIERMTNFDKNLPNEKVLPKHSLLYEYFTVYNELTKVKYVTEGMRKPAFLSGEQKKAIVDLLFKTNRKVTVKQLKEDYFKKIECFDSVEISGVEDRFNASLGTYHDLLKIIKDKDFLDNEENEDILEDIVLTLTLFEDREMIEERLKTYAHLFDDKVMKQLKRRRYTGWGRLSRKLINGIRDKQSGKTILDFLKSDGFANRNFMQLIHDDSLTFKEDIQKAQVSGQGDSLHEHIANLAGSPAIKKGILQTVKVVDELVKVMGRHKPENIVIEMARENQTTQKGQKNSRERMKRIEEGIKELGSQILKEHPVENTQLQNEKLYLYYLQNGRDMYVDQELDINRLSDYDVDHIVPQSFLKDDSIDNKVLTRSDKARGKSDNVPSEEVVKKMKNYWRQLLNAKLITQRKFDNLTKAERGGLSELDKAGFIKRQLVETRQITKHVAQILDSRMNTKYDENDKLIREVKVITLKSKLVSDFRKDFQFYKVREINNYHHAHDAYLNAVVGTALIKKYPKLESEFVYGDYKVYDVRKMIAKSEQEIGKATAKYFFYSNIMNFFKTEITLANGEIRKRPLIETNGETGEIVWDKGRDFATVRKVLSMPQVNIVKKTEVQTGGFSKESILPKRNSDKLIARKKDWDPKKYGGFDSPTVAYSVLVVAKVEKGKSKKLKSVKELLGITIMERSSFEKNPIDFLEAKGYKEVKKDLIIKLPKYSLFELENGRKRMLASAGELQKGNELALPSKYVNFLYLASHYEKLKGSPEDNEQKQLFVEQHKHYLDEIIEQISEFSKRVILADANLDKVLSAYNKHRDKPIREQAENIIHLFTLTNLGAPAAFKYFDTTIDRKRYTSTKEVLDATLIHQSITGLYETRIDLSQLGGDGGEAAAKGGSGSSGGLLGRDLLTKLKAQIQFSTEGPQVTWEDRPAMCLVLNLEEEYRLHEKPVPPSIDPSWLQLFPMVWAEKAGMGLANQVPPVVVELKSDASPVAVRQYPMSKEAREGIRPHIQRFLDLGILVPCQSPWNTPLLPVKKPGTNDYRPVQDLREVNKRVQDIHPTVPNPYNLLSSLPPSHTWYSVLDLKDAFFCLKLHPNSQPLFAFEWRDPEKGNTGQLTWTRLPQGFKNSPTLFNEALHRDLASFRALNPQVVMLQYVDDLLVAAPTYRDCKEGTRRLLQELSKLGYRVSAKKAQLCREEVTYLGYLLKGGKRWLTPARKATVMKIPTPTTPRQVREFLGKAGFCRLFIPGFASLAAPLYPLTRPKVPFTWTEAHQEAFGRIKEALLSAPALALPDLTKPFALYVDEKEGVARGVLTQTLGPWRRPVAYLSKKLDPVASGWPTCLKAIAAVALLLKDADKLTLGQNVLVIAPHNLESIVRQPPDRWMTNARMTHYQSLLLNERVSFAPPAILNPATLLPVESDDTPIHICSEILAEETGTRPDLRDQPLPGVPAWYTDGSSFIMDGRRQAGAAIVDNKRTVWASNLPEGTSAQKAELIALTQALRLAEGKSINIYTDSRYAFATAHVHGAIYKQRGWLTSAGKDIKNKEEILALLEAIHLPKRVAIIHCPGHQRGTDPVATGNRKADEAAKQAAQSTRILTETTKNAGKRTADGSEFEKRTADGSEFESPKKKAKVE

SEQ ID NO: 1716 - protein, 2127 aa, synthetic construct
  source 1..2127: note = Description of Artificial Sequence: Synthetic polypeptide
MPAAKRVKLDGGDKKYSIGLDIGTNSVGWAVITDEYKVPSKKFKVLGNTDRHSIKKNLIGALLFDSGETAEATRLKRTARRRYTRRKNRICYLQEIFSNEMAKVDDSFFHRLEESFLVEEDKKHERHPIFGNIVDEVAYHEKYPTIYHLRKKLVDSTDKADLRLIYLALAHMIKFRGHFLIEGDLNPDNSDVDKLFIQLVQTYNQLFEENPINASGVDAKAILSARLSKSRRLENLIAQLPGEKKNGLFGNLIALSLGLTPNFKSNFDLAEDAKLQLSKDTYDDDLDNLLAQIGDQYADLFLAAKNLSDAILLSDILRVNTEITKAPLSASMIKRYDEHHQDLTLLKALVRQQLPEKYKEIFFDQSKNGYAGYIDGGASQEEFYKFIKPILEKMDGTEELLVKLNREDLLRKQRTFDNGSIPHQIHLGELHAILRRQEDFYPFLKDNREKIEKILTFRIPYYVGPLARGNSRFAWMTRKSEETITPWNFEEVVDKGASAQSFIERMTNFDKNLPNEKVLPKHSLLYEYFTVYNELTKVKYVTEGMRKPAFLSGEQKKAIVDLLFKTNRKVTVKQLKEDYFKKIECFDSVEISGVEDRFNASLGTYHDLLKIIKDKDFLDNEENEDILEDIVLTLTLFEDREMIEERLKTYAHLFDDKVMKQLKRRRYTGWGRLSRKLINGIRDKQSGKTILDFLKSDGFANRNFMQLIHDDSLTFKEDIQKAQVSGQGDSLHEHIANLAGSPAIKKGILQTVKVVDELVKVMGRHKPENIVIEMARENQTTQKGQKNSRERMKRIEEGIKELGSQILKEHPVENTQLQNEKLYLYYLQNGRDMYVDQELDINRLSDYDVDHIVPQSFLKDDSIDNKVLTRSDKARGKSDNVPSEEVVKKMKNYWRQLLNAKLITQRKFDNLTKAERGGLSELDKAGFIKRQLVETRQITKHVAQILDSRMNTKYDENDKLIREVKVITLKSKLVSDFRKDFQFYKVREINNYHHAHDAYLNAVVGTALIKKYPKLESEFVYGDYKVYDVRKMIAKSEQEIGKATAKYFFYSNIMNFFKTEITLANGEIRKRPLIETNGETGEIVWDKGRDFATVRKVLSMPQVNIVKKTEVQTGGFSKESILPKRNSDKLIARKKDWDPKKYGGFDSPTVAYSVLVVAKVEKGKSKKLKSVKELLGITIMERSSFEKNPIDFLEAKGYKEVKKDLIIKLPKYSLFELENGRKRMLASAGELQKGNELALPSKYVNFLYLASHYEKLKGSPEDNEQKQLFVEQHKHYLDEIIEQISEFSKRVILADANLDKVLSAYNKHRDKPIREQAENIIHLFTLTNLGAPAAFKYFDTTIDRKRYTSTKEVLDATLIHQSITGLYETRIDLSQLGGDGGGGSGSSEAAAKGGLLGRDLLTKLKAQIQFSTEGPQVTWEDRPAMCLVLNLEEEYRLHEKPVPPSIDPSWLQLFPMVWAEKAGMGLANQVPPVVVELKSDASPVAVRQYPMSKEAREGIRPHIQRFLDLGILVPCQSPWNTPLLPVKKPGTNDYRPVQDLREVNKRVQDIHPTVPNPYNLLSSLPPSHTWYSVLDLKDAFFCLKLHPNSQPLFAFEWRDPEKGNTGQLTWTRLPQGFKNSPTLFNEALHRDLASFRALNPQVVMLQYVDDLLVAAPTYRDCKEGTRRLLQELSKLGYRVSAKKAQLCREEVTYLGYLLKGGKRWLTPARKATVMKIPTPTTPRQVREFLGKAGFCRLFIPGFASLAAPLYPLTRPKVPFTWTEAHQEAFGRIKEALLSAPALALPDLTKPFALYVDEKEGVARGVLTQTLGPWRRPVAYLSKKLDPVASGWPTCLKAIAAVALLLKDADKLTLGQNVLVIAPHNLESIVRQPPDRWMTNARMTHYQSLLLNERVSFAPPAILNPATLLPVESDDTPIHICSEILAEETGTRPDLRDQPLPGVPAWYTDGSSFIMDGRRQAGAAIVDNKRTVWASNLPEGTSAQKAELIALTQALRLAEGKSINIYTDSRYAFATAHVHGAIYKQRGWLTSAGKDIKNKEEILALLEAIHLPKRVAIIHCPGHQRGTDPVATGNRKADEAAKQAAQSTRILTETTKNAGKRTADGSEFEKRTADGSEFESPKKKAKVE

SEQ ID NO: 1717 - protein, 2127 aa, synthetic construct
  source 1..2127: note = Description of Artificial Sequence: Synthetic polypeptide
MPAAKRVKLDGGDKKYSIGLDIGTNSVGWAVITDEYKVPSKKFKVLGNTDRHSIKKNLIGALLFDSGETAEATRLKRTARRRYTRRKNRICYLQEIFSNEMAKVDDSFFHRLEESFLVEEDKKHERHPIFGNIVDEVAYHEKYPTIYHLRKKLVDSTDKADLRLIYLALAHMIKFRGHFLIEGDLNPDNSDVDKLFIQLVQTYNQLFEENPINASGVDAKAILSARLSKSRRLENLIAQLPGEKKNGLFGNLIALSLGLTPNFKSNFDLAEDAKLQLSKDTYDDDLDNLLAQIGDQYADLFLAAKNLSDAILLSDILRVNTEITKAPLSASMIKRYDEHHQDLTLLKALVRQQLPEKYKEIFFDQSKNGYAGYIDGGASQEEFYKFIKPILEKMDGTEELLVKLNREDLLRKQRTFDNGSIPHQIHLGELHAILRRQEDFYPFLKDNREKIEKILTFRIPYYVGPLARGNSRFAWMTRKSEETITPWNFEEVVDKGASAQSFIERMTNFDKNLPNEKVLPKHSLLYEYFTVYNELTKVKYVTEGMRKPAFLSGEQKKAIVDLLFKTNRKVTVKQLKEDYFKKIECFDSVEISGVEDRFNASLGTYHDLLKIIKDKDFLDNEENEDILEDIVLTLTLFEDREMIEERLKTYAHLFDDKVMKQLKRRRYTGWGRLSRKLINGIRDKQSGKTILDFLKSDGFANRNFMQLIHDDSLTFKEDIQKAQVSGQGDSLHEHIANLAGSPAIKKGILQTVKVVDELVKVMGRHKPENIVIEMARENQTTQKGQKNSRERMKRIEEGIKELGSQILKEHPVENTQLQNEKLYLYYLQNGRDMYVDQELDINRLSDYDVDHIVPQSFLKDDSIDNKVLTRSDKARGKSDNVPSEEVVKKMKNYWRQLLNAKLITQRKFDNLTKAERGGLSELDKAGFIKRQLVETRQITKHVAQILDSRMNTKYDENDKLIREVKVITLKSKLVSDFRKDFQFYKVREINNYHHAHDAYLNAVVGTALIKKYPKLESEFVYGDYKVYDVRKMIAKSEQEIGKATAKYFFYSNIMNFFKTEITLANGEIRKRPLIETNGETGEIVWDKGRDFATVRKVLSMPQVNIVKKTEVQTGGFSKESILPKRNSDKLIARKKDWDPKKYGGFDSPTVAYSVLVVAKVEKGKSKKLKSVKELLGITIMERSSFEKNPIDFLEAKGYKEVKKDLIIKLPKYSLFELENGRKRMLASAGELQKGNELALPSKYVNFLYLASHYEKLKGSPEDNEQKQLFVEQHKHYLDEIIEQISEFSKRVILADANLDKVLSAYNKHRDKPIREQAENIIHLFTLTNLGAPAAFKYFDTTIDRKRYTSTKEVLDATLIHQSITGLYETRIDLSQLGGDGGGGSEAAAKGGGGGLLGRDLLTKLKAQIQFSTEGPQVTWEDRPAMCLVLNLEEEYRLHEKPVPPSIDPSWLQLFPMVWAEKAGMGLANQVPPVVVELKSDASPVAVRQYPMSKEAREGIRPHIQRFLDLGILVPCQSPWNTPLLPVKKPGTNDYRPVQDLREVNKRVQDIHPTVPNPYNLLSSLPPSHTWYSVLDLKDAFFCLKLHPNSQPLFAFEWRDPEKGNTGQLTWTRLPQGFKNSPTLFNEALHRDLASFRALNPQVVMLQYVDDLLVAAPTYRDCKEGTRRLLQELSKLGYRVSAKKAQLCREEVTYLGYLLKGGKRWLTPARKATVMKIPTPTTPRQVREFLGKAGFCRLFIPGFASLAAPLYPLTRPKVPFTWTEAHQEAFGRIKEALLSAPALALPDLTKPFALYVDEKEGVARGVLTQTLGPWRRPVAYLSKKLDPVASGWPTCLKAIAAVALLLKDADKLTLGQNVLVIAPHNLESIVRQPPDRWMTNARMTHYQSLLLNERVSFAPPAILNPATLLPVESDDTPIHICSEILAEETGTRPDLRDQPLPGVPAWYTDGSSFIMDGRRQAGAAIVDNKRTVWASNLPEGTSAQKAELIALTQALRLAEGKSINIYTDSRYAFATAHVHGAIYKQRGWLTSAGKDIKNKEEILALLEAIHLPKRVAIIHCPGHQRGTDPVATGNRKADEAAKQAAQSTRILTETTKNAGKRTADGSEFEKRTADGSEFESPKKKAKVE

SEQ ID NO: 1718 - protein, 2127 aa, synthetic construct
  source 1..2127: note = Description of Artificial Sequence: Synthetic polypeptide
MPAAKRVKLDGGDKKYSIGLDIGTNSVGWAVITDEYKVPSKKFKVLGNTDRHSIKKNLIGALLFDSGETAEATRLKRTARRRYTRRKNRICYLQEIFSNEMAKVDDSFFHRLEESFLVEEDKKHERHPIFGNIVDEVAYHEKYPTIYHLRKKLVDSTDKADLRLIYLALAHMIKFRGHFLIEGDLNPDNSDVDKLFIQLVQTYNQLFEENPINASGVDAKAILSARLSKSRRLENLIAQLPGEKKNGLFGNLIALSLGLTPNFKSNFDLAEDAKLQLSKDTYDDDLDNLLAQIGDQYADLFLAAKNLSDAILLSDILRVNTEITKAPLSASMIKRYDEHHQDLTLLKALVRQQLPEKYKEIFFDQSKNGYAGYIDGGASQEEFYKFIKPILEKMDGTEELLVKLNREDLLRKQRTFDNGSIPHQIHLGELHAILRRQEDFYPFLKDNREKIEKILTFRIPYYVGPLARGNSRFAWMTRKSEETITPWNFEEVVDKGASAQSFIERMTNFDKNLPNEKVLPKHSLLYEYFTVYNELTKVKYVTEGMRKPAFLSGEQKKAIVDLLFKTNRKVTVKQLKEDYFKKIECFDSVEISGVEDRFNASLGTYHDLLKIIKDKDFLDNEENEDILEDIVLTLTLFEDREMIEERLKTYAHLFDDKVMKQLKRRRYTGWGRLSRKLINGIRDKQSGKTILDFLKSDGFANRNFMQLIHDDSLTFKEDIQKAQVSGQGDSLHEHIANLAGSPAIKKGILQTVKVVDELVKVMGRHKPENIVIEMARENQTTQKGQKNSRERMKRIEEGIKELGSQILKEHPVENTQLQNEKLYLYYLQNGRDMYVDQELDINRLSDYDVDHIVPQSFLKDDSIDNKVLTRSDKARGKSDNVPSEEVVKKMKNYWRQLLNAKLITQRKFDNLTKAERGGLSELDKAGFIKRQLVETRQITKHVAQILDSRMNTKYDENDKLIREVKVITLKSKLVSDFRKDFQFYKVREINNYHHAHDAYLNAVVGTALIKKYPKLESEFVYGDYKVYDVRKMIAKSEQEIGKATAKYFFYSNIMNFFKTEITLANGEIRKRPLIETNGETGEIVWDKGRDFATVRKVLSMPQVNIVKKTEVQTGGFSKESILPKRNSDKLIARKKDWDPKKYGGFDSPTVAYSVLVVAKVEKGKSKKLKSVKELLGITIMERSSFEKNPIDFLEAKGYKEVKKDLIIKLPKYSLFELENGRKRMLASAGELQKGNELALPSKYVNFLYLASHYEKLKGSPEDNEQKQLFVEQHKHYLDEIIEQISEFSKRVILADANLDKVLSAYNKHRDKPIREQAENIIHLFTLTNLGAPAAFKYFDTTIDRKRYTSTKEVLDATLIHQSITGLYETRIDLSQLGGDGGPAPGGSEAAAKGGLLGRDLLTKLKAQIQFSTEGPQVTWEDRPAMCLVLNLEEEYRLHEKPVPPSIDPSWLQLFPMVWAEKAGMGLANQVPPVVVELKSDASPVAVRQYPMSKEAREGIRPHIQRFLDLGILVPCQSPWNTPLLPVKKPGTNDYRPVQDLREVNKRVQDIHPTVPNPYNLLSSLPPSHTWYSVLDLKDAFFCLKLHPNSQPLFAFEWRDPEKGNTGQLTWTRLPQGFKNSPTLFNEALHRDLASFRALNPQVVMLQYVDDLLVAAPTYRDCKEGTRRLLQELSKLGYRVSAKKAQLCREEVTYLGYLLKGGKRWLTPARKATVMKIPTPTTPRQVREFLGKAGFCRLFIPGFASLAAPLYPLTRPKVPFTWTEAHQEAFGRIKEALLSAPALALPDLTKPFALYVDEKEGVARGVLTQTLGPWRRPVAYLSKKLDPVASGWPTCLKAIAAVALLLKDADKLTLGQNVLVIAPHNLESIVRQPPDRWMTNARMTHYQSLLLNERVSFAPPAILNPATLLPVESDDTPIHICSEILAEETGTRPDLRDQPLPGVPAWYTDGSSFIMDGRRQAGAAIVDNKRTVWASNLPEGTSAQKAELIALTQALRLAEGKSINIYTDSRYAFATAHVHGAIYKQRGWLTSAGKDIKNKEEILALLEAIHLPKRVAIIHCPGHQRGTDPVATGNRKADEAAKQAAQSTRILTETTKNAGKRTADGSEFEKRTADGSEFESPKKKAKVE

SEQ ID NO: 1719 - protein, 2125 aa, synthetic construct
  source 1..2125: note = Description of Artificial Sequence: Synthetic polypeptide
MPAAKRVKLDGGDKKYSIGLDIGTNSVGWAVITDEYKVPSKKFKVLGNTDRHSIKKNLIGALLFDSGETAEATRLKRTARRRYTRRKNRICYLQEIFSNEMAKVDDSFFHRLEESFLVEEDKKHERHPIFGNIVDEVAYHEKYPTIYHLRKKLVDSTDKADLRLIYLALAHMIKFRGHFLIEGDLNPDNSDVDKLFIQLVQTYNQLFEENPINASGVDAKAILSARLSKSRRLENLIAQLPGEKKNGLFGNLIALSLGLTPNFKSNFDLAEDAKLQLSKDTYDDDLDNLLAQIGDQYADLFLAAKNLSDAILLSDILRVNTEITKAPLSASMIKRYDEHHQDLTLLKALVRQQLPEKYKEIFFDQSKNGYAGYIDGGASQEEFYKFIKPILEKMDGTEELLVKLNREDLLRKQRTFDNGSIPHQIHLGELHAILRRQEDFYPFLKDNREKIEKILTFRIPYYVGPLARGNSRFAWMTRKSEETITPWNFEEVVDKGASAQSFIERMTNFDKNLPNEKVLPKHSLLYEYFTVYNELTKVKYVTEGMRKPAFLSGEQKKAIVDLLFKTNRKVTVKQLKEDYFKKIECFDSVEISGVEDRFNASLGTYHDLLKIIKDKDFLDNEENEDILEDIVLTLTLFEDREMIEERLKTYAHLFDDKVMKQLKRRRYTGWGRLSRKLINGIRDKQSGKTILDFLKSDGFANRNFMQLIHDDSLTFKEDIQKAQVSGQGDSLHEHIANLAGSPAIKKGILQTVKVVDELVKVMGRHKPENIVIEMARENQTTQKGQKNSRERMKRIEEGIKELGSQILKEHPVENTQLQNEKLYLYYLQNGRDMYVDQELDINRLSDYDVDHIVPQSFLKDDSIDNKVLTRSDKARGKSDNVPSEEVVKKMKNYWRQLLNAKLITQRKFDNLTKAERGGLSELDKAGFIKRQLVETRQITKHVAQILDSRMNTKYDENDKLIREVKVITLKSKLVSDFRKDFQFYKVREINNYHHAHDAYLNAVVGTALIKKYPKLESEFVYGDYKVYDVRKMIAKSEQEIGKATAKYFFYSNIMNFFKTEITLANGEIRKRPLIETNGETGEIVWDKGRDFATVRKVLSMPQVNIVKKTEVQTGGFSKESILPKRNSDKLIARKKDWDPKKYGGFDSPTVAYSVLVVAKVEKGKSKKLKSVKELLGITIMERSSFEKNPIDFLEAKGYKEVKKDLIIKLPKYSLFELENGRKRMLASAGELQKGNELALPSKYVNFLYLASHYEKLKGSPEDNEQKQLFVEQHKHYLDEIIEQISEFSKRVILADANLDKVLSAYNKHRDKPIREQAENIIHLFTLTNLGAPAAFKYFDTTIDRKRYTSTKEVLDATLIHQSITGLYETRIDLSQLGGDGGPAPGSSGGGGGLLGRDLLTKLKAQIQFSTEGPQVTWEDRPAMCLVLNLEEEYRLHEKPVPPSIDPSWLQLFPMVWAEKAGMGLANQVPPVVVELKSDASPVAVRQYPMSKEAREGIRPHIQRFLDLGILVPCQSPWNTPLLPVKKPGTNDYRPVQDLREVNKRVQDIHPTVPNPYNLLSSLPPSHTWYSVLDLKDAFFCLKLHPNSQPLFAFEWRDPEKGNTGQLTWTRLPQGFKNSPTLFNEALHRDLASFRALNPQVVMLQYVDDLLVAAPTYRDCKEGTRRLLQELSKLGYRVSAKKAQLCREEVTYLGYLLKGGKRWLTPARKATVMKIPTPTTPRQVREFLGKAGFCRLFIPGFASLAAPLYPLTRPKVPFTWTEAHQEAFGRIKEALLSAPALALPDLTKPFALYVDEKEGVARGVLTQTLGPWRRPVAYLSKKLDPVASGWPTCLKAIAAVALLLKDADKLTLGQNVLVIAPHNLESIVRQPPDRWMTNARMTHYQSLLLNERVSFAPPAILNPATLLPVESDDTPIHICSEILAEETGTRPDLRDQPLPGVPAWYTDGSSFIMDGRRQAGAAIVDNKRTVWASNLPEGTSAQKAELIALTQALRLAEGKSINIYTDSRYAFATAHVHGAIYKQRGWLTSAGKDIKNKEEILALLEAIHLPKRVAIIHCPGHQRGTDPVATGNRKADEAAKQAAQSTRILTETTKNAGKRTADGSEFEKRTADGSEFESPKKKAKVE

SEQ ID NO: 1720 - protein, 2126 aa, synthetic construct
  source 1..2126: note = Description of Artificial Sequence: Synthetic polypeptide
MPAAKRVKLDGGDKKYSIGLDIGTNSVGWAVITDEYKVPSKKFKVLGNTDRHSIKKNLIGALLFDSGETAEATRLKRTARRRYTRRKNRICYLQEIFSNEMAKVDDSFFHRLEESFLVEEDKKHERHPIFGNIVDEVAYHEKYPTIYHLRKKLVDSTDKADLRLIYLALAHMIKFRGHFLIEGDLNPDNSDVDKLFIQLVQTYNQLFEENPINASGVDAKAILSARLSKSRRLENLIAQLPGEKKNGLFGNLIALSLGLTPNFKSNFDLAEDAKLQLSKDTYDDDLDNLLAQIGDQYADLFLAAKNLSDAILLSDILRVNTEITKAPLSASMIKRYDEHHQDLTLLKALVRQQLPEKYKEIFFDQSKNGYAGYIDGGASQEEFYKFIKPILEKMDGTEELLVKLNREDLLRKQRTFDNGSIPHQIHLGELHAILRRQEDFYPFLKDNREKIEKILTFRIPYYVGPLARGNSRFAWMTRKSEETITPWNFEEVVDKGASAQSFIERMTNFDKNLPNEKVLPKHSLLYEYFTVYNELTKVKYVTEGMRKPAFLSGEQKKAIVDLLFKTNRKVTVKQLKEDYFKKIECFDSVEISGVEDRFNASLGTYHDLLKIIKDKDFLDNEENEDILEDIVLTLTLFEDREMIEERLKTYAHLFDDKVMKQLKRRRYTGWGRLSRKLINGIRDKQSGKTILDFLKSDGFANRNFMQLIHDDSLTFKEDIQKAQVSGQGDSLHEHIANLAGSPAIKKGILQTVKVVDELVKVMGRHKPENIVIEMARENQTTQKGQKNSRERMKRIEEGIKELGSQILKEHPVENTQLQNEKLYLYYLQNGRDMYVDQELDINRLSDYDVDHIVPQSFLKDDSIDNKVLTRSDKARGKSDNVPSEEVVKKMKNYWRQLLNAKLITQRKFDNLTKAERGGLSELDKAGFIKRQLVETRQITKHVAQILDSRMNTKYDENDKLIREVKVITLKSKLVSDFRKDFQFYKVREINNYHHAHDAYLNAVVGTALIKKYPKLESEFVYGDYKVYDVRKMIAKSEQEIGKATAKYFFYSNIMNFFKTEITLANGEIRKRPLIETNGETGEIVWDKGRDFATVRKVLSMPQVNIVKKTEVQTGGFSKESILPKRNSDKLIARKKDWDPKKYGGFDSPTVAYSVLVVAKVEKGKSKKLKSVKELLGITIMERSSFEKNPIDFLEAKGYKEVKKDLIIKLPKYSLFELENGRKRMLASAGELQKGNELALPSKYVNFLYLASHYEKLKGSPEDNEQKQLFVEQHKHYLDEIIEQISEFSKRVILADANLDKVLSAYNKHRDKPIREQAENIIHLFTLTNLGAPAAFKYFDTTIDRKRYTSTKEVLDATLIHQSITGLYETRIDLSQLGGDGGGGGGSGGGGSGGLLGRDLLTKLKAQIQFSTEGPQVTWEDRPAMCLVLNLEEEYRLHEKPVPPSIDPSWLQLFPMVWAEKAGMGLANQVPPVVVELKSDASPVAVRQYPMSKEAREGIRPHIQRFLDLGILVPCQSPWNTPLLPVKKPGTNDYRPVQDLREVNKRVQDIHPTVPNPYNLLSSLPPSHTWYSVLDLKDAFFCLKLHPNSQPLFAFEWRDPEKGNTGQLTWTRLPQGFKNSPTLFNEALHRDLASFRALNPQVVMLQYVDDLLVAAPTYRDCKEGTRRLLQELSKLGYRVSAKKAQLCREEVTYLGYLLKGGKRWLTPARKATVMKIPTPTTPRQVREFLGKAGFCRLFIPGFASLAAPLYPLTRPKVPFTWTEAHQEAFGRIKEALLSAPALALPDLTKPFALYVDEKEGVARGVLTQTLGPWRRPVAYLSKKLDPVASGWPTCLKAIAAVALLLKDADKLTLGQNVLVIAPHNLESIVRQPPDRWMTNARMTHYQSLLLNERVSFAPPAILNPATLLPVESDDTPIHICSEILAEETGTRPDLRDQPLPGVPAWYTDGSSFIMDGRRQAGAAIVDNKRTVWASNLPEGTSAQKAELIALTQALRLAEGKSINIYTDSRYAFATAHVHGAIYKQRGWLTSAGKDIKNKEEILALLEAIHLPKRVAIIHCPGHQRGTDPVATGNRKADEAAKQAAQSTRILTETTKNAGKRTADGSEFEKRTADGSEFESPKKKAKVE

SEQ ID NO: 1721 - protein, 2127 aa, synthetic construct
  source 1..2127: note = Description of Artificial Sequence: Synthetic polypeptide
MPAAKRVKLDGGDKKYSIGLDIGTNSVGWAVITDEYKVPSKKFKVLGNTDRHSIKKNLIGALLFDSGETAEATRLKRTARRRYTRRKNRICYLQEIFSNEMAKVDDSFFHRLEESFLVEEDKKHERHPIFGNIVDEVAYHEKYPTIYHLRKKLVDSTDKADLRLIYLALAHMIKFRGHFLIEGDLNPDNSDVDKLFIQLVQTYNQLFEENPINASGVDAKAILSARLSKSRRLENLIAQLPGEKKNGLFGNLIALSLGLTPNFKSNFDLAEDAKLQLSKDTYDDDLDNLLAQIGDQYADLFLAAKNLSDAILLSDILRVNTEITKAPLSASMIKRYDEHHQDLTLLKALVRQQLPEKYKEIFFDQSKNGYAGYIDGGASQEEFYKFIKPILEKMDGTEELLVKLNREDLLRKQRTFDNGSIPHQIHLGELHAILRRQEDFYPFLKDNREKIEKILTFRIPYYVGPLARGNSRFAWMTRKSEETITPWNFEEVVDKGASAQSFIERMTNFDKNLPNEKVLPKHSLLYEYFTVYNELTKVKYVTEGMRKPAFLSGEQKKAIVDLLFKTNRKVTVKQLKEDYFKKIECFDSVEISGVEDRFNASLGTYHDLLKIIKDKDFLDNEENEDILEDIVLTLTLFEDREMIEERLKTYAHLFDDKVMKQLKRRRYTGWGRLSRKLINGIRDKQSGKTILDFLKSDGFANRNFMQLIHDDSLTFKEDIQKAQVSGQGDSLHEHIANLAGSPAIKKGILQTVKVVDELVKVMGRHKPENIVIEMARENQTTQKGQKNSRERMKRIEEGIKELGSQILKEHPVENTQLQNEKLYLYYLQNGRDMYVDQELDINRLSDYDVDHIVPQSFLKDDSIDNKVLTRSDKARGKSDNVPSEEVVKKMKNYWRQLLNAKLITQRKFDNLTKAERGGLSELDKAGFIKRQLVETRQITKHVAQILDSRMNTKYDENDKLIREVKVITLKSKLVSDFRKDFQFYKVREINNYHHAHDAYLNAVVGTALIKKYPKLESEFVYGDYKVYDVRKMIAKSEQEIGKATAKYFFYSNIMNFFKTEITLANGEIRKRPLIETNGETGEIVWDKGRDFATVRKVLSMPQVNIVKKTEVQTGGFSKESILPKRNSDKLIARKKDWDPKKYGGFDSPTVAYSVLVVAKVEKGKSKKLKSVKELLGITIMERSSFEKNPIDFLEAKGYKEVKKDLIIKLPKYSLFELENGRKRMLASAGELQKGNELALPSKYVNFLYLASHYEKLKGSPEDNEQKQLFVEQHKHYLDEIIEQISEFSKRVILADANLDKVLSAYNKHRDKPIREQAENIIHLFTLTNLGAPAAFKYFDTTIDRKRYTSTKEVLDATLIHQSITGLYETRIDLSQLGGDGGGSSPAPEAAAKGGLLGRDLLTKLKAQIQFSTEGPQVTWEDRPAMCLVLNLEEEYRLHEKPVPPSIDPSWLQLFPMVWAEKAGMGLANQVPPVVVELKSDASPVAVRQYPMSKEAREGIRPHIQRFLDLGILVPCQSPWNTPLLPVKKPGTNDYRPVQDLREVNKRVQDIHPTVPNPYNLLSSLPPSHTWYSVLDLKDAFFCLKLHPNSQPLFAFEWRDPEKGNTGQLTWTRLPQGFKNSPTLFNEALHRDLASFRALNPQVVMLQYVDDLLVAAPTYRDCKEGTRRLLQELSKLGYRVSAKKAQLCREEVTYLGYLLKGGKRWLTPARKATVMKIPTPTTPRQVREFLGKAGFCRLFIPGFASLAAPLYPLTRPKVPFTWTEAHQEAFGRIKEALLSAPALALPDLTKPFALYVDEKEGVARGVLTQTLGPWRRPVAYLSKKLDPVASGWPTCLKAIAAVALLLKDADKLTLGQNVLVIAPHNLESIVRQPPDRWMTNARMTHYQSLLLNERVSFAPPAILNPATLLPVESDDTPIHICSEILAEETGTRPDLRDQPLPGVPAWYTDGSSFIMDGRRQAGAAIVDNKRTVWASNLPEGTSAQKAELIALTQALRLAEGKSINIYTDSRYAFATAHVHGAIYKQRGWLTSAGKDIKNKEEILALLEAIHLPKRVAIIHCPGHQRGTDPVATGNRKADEAAKQAAQSTRILTETTKNAGKRTADGSEFEKRTADGSEFESPKKKAKVE

SEQ ID NO: 1722 - protein, 2127 aa, synthetic construct
  source 1..2127: note = Description of Artificial Sequence: Synthetic polypeptide
MPAAKRVKLDGGDKKYSIGLDIGTNSVGWAVITDEYKVPSKKFKVLGNTDRHSIKKNLIGALLFDSGETAEATRLKRTARRRYTRRKNRICYLQEIFSNEMAKVDDSFFHRLEESFLVEEDKKHERHPIFGNIVDEVAYHEKYPTIYHLRKKLVDSTDKADLRLIYLALAHMIKFRGHFLIEGDLNPDNSDVDKLFIQLVQTYNQLFEENPINASGVDAKAILSARLSKSRRLENLIAQLPGEKKNGLFGNLIALSLGLTPNFKSNFDLAEDAKLQLSKDTYDDDLDNLLAQIGDQYADLFLAAKNLSDAILLSDILRVNTEITKAPLSASMIKRYDEHHQDLTLLKALVRQQLPEKYKEIFFDQSKNGYAGYIDGGASQEEFYKFIKPILEKMDGTEELLVKLNREDLLRKQRTFDNGSIPHQIHLGELHAILRRQEDFYPFLKDNREKIEKILTFRIPYYVGPLARGNSRFAWMTRKSEETITPWNFEEVVDKGASAQSFIERMTNFDKNLPNEKVLPKHSLLYEYFTVYNELTKVKYVTEGMRKPAFLSGEQKKAIVDLLFKTNRKVTVKQLKEDYFKKIECFDSVEISGVEDRFNASLGTYHDLLKIIKDKDFLDNEENEDILEDIVLTLTLFEDREMIEERLKTYAHLFDDKVMKQLKRRRYTGWGRLSRKLINGIRDKQSGKTILDFLKSDGFANRNFMQLIHDDSLTFKEDIQKAQVSGQGDSLHEHIANLAGSPAIKKGILQTVKVVDELVKVMGRHKPENIVIEMARENQTTQKGQKNSRERMKRIEEGIKELGSQILKEHPVENTQLQNEKLYLYYLQNGRDMYVDQELDINRLSDYDVDHIVPQSFLKDDSIDNKVLTRSDKARGKSDNVPSEEVVKKMKNYWRQLLNAKLITQRKFDNLTKAERGGLSELDKAGFIKRQLVETRQITKHVAQILDSRMNTKYDENDKLIREVKVITLKSKLVSDFRKDFQFYKVREINNYHHAHDAYLNAVVGTALIKKYPKLESEFVYGDYKVYDVRKMIAKSEQEIGKATAKYFFYSNIMNFFKTEITLANGEIRKRPLIETNGETGEIVWDKGRDFATVRKVLSMPQVNIVKKTEVQTGGFSKESILPKRNSDKLIARKKDWDPKKYGGFDSPTVAYSVLVVAKVEKGKSKKLKSVKELLGITIMERSSFEKNPIDFLEAKGYKEVKKDLIIKLPKYSLFELENGRKRMLASAGELQKGNELALPSKYVNFLYLASHYEKLKGSPEDNEQKQLFVEQHKHYLDEIIEQISEFSKRVILADANLDKVLSAYNKHRDKPIREQAENIIHLFTLTNLGAPAAFKYFDTTIDRKRYTSTKEVLDATLIHQSITGLYETRIDLSQLGGDGGGGSEAAAKGSSGGLLGRDLLTKLKAQIQFSTEGPQVTWEDRPAMCLVLNLEEEYRLHEKPVPPSIDPSWLQLFPMVWAEKAGMGLANQVPPVVVELKSDASPVAVRQYPMSKEAREGIRPHIQRFLDLGILVPCQSPWNTPLLPVKKPGTNDYRPVQDLREVNKRVQDIHPTVPNPYNLLSSLPPSHTWYSVLDLKDAFFCLKLHPNSQPLFAFEWRDPEKGNTGQLTWTRLPQGFKNSPTLFNEALHRDLASFRALNPQVVMLQYVDDLLVAAPTYRDCKEGTRRLLQELSKLGYRVSAKKAQLCREEVTYLGYLLKGGKRWLTPARKATVMKIPTPTTPRQVREFLGKAGFCRLFIPGFASLAAPLYPLTRPKVPFTWTEAHQEAFGRIKEALLSAPALALPDLTKPFALYVDEKEGVARGVLTQTLGPWRRPVAYLSKKLDPVASGWPTCLKAIAAVALLLKDADKLTLGQNVLVIAPHNLESIVRQPPDRWMTNARMTHYQSLLLNERVSFAPPAILNPATLLPVESDDTPIHICSEILAEETGTRPDLRDQPLPGVPAWYTDGSSFIMDGRRQAGAAIVDNKRTVWASNLPEGTSAQKAELIALTQALRLAEGKSINIYTDSRYAFATAHVHGAIYKQRGWLTSAGKDIKNKEEILALLEAIHLPKRVAIIHCPGHQRGTDPVATGNRKADEAAKQAAQSTRILTETTKNAGKRTADGSEFEKRTADGSEFESPKKKAKVE

SEQ ID NO: 1723 - protein, 2127 aa, synthetic construct
  source 1..2127: note = Description of Artificial Sequence: Synthetic polypeptide
MPAAKRVKLDGGDKKYSIGLDIGTNSVGWAVITDEYKVPSKKFKVLGNTDRHSIKKNLIGALLFDSGETAEATRLKRTARRRYTRRKNRICYLQEIFSNEMAKVDDSFFHRLEESFLVEEDKKHERHPIFGNIVDEVAYHEKYPTIYHLRKKLVDSTDKADLRLIYLALAHMIKFRGHFLIEGDLNPDNSDVDKLFIQLVQTYNQLFEENPINASGVDAKAILSARLSKSRRLENLIAQLPGEKKNGLFGNLIALSLGLTPNFKSNFDLAEDAKLQLSKDTYDDDLDNLLAQIGDQYADLFLAAKNLSDAILLSDILRVNTEITKAPLSASMIKRYDEHHQDLTLLKALVRQQLPEKYKEIFFDQSKNGYAGYIDGGASQEEFYKFIKPILEKMDGTEELLVKLNREDLLRKQRTFDNGSIPHQIHLGELHAILRRQEDFYPFLKDNREKIEKILTFRIPYYVGPLARGNSRFAWMTRKSEETITPWNFEEVVDKGASAQSFIERMTNFDKNLPNEKVLPKHSLLYEYFTVYNELTKVKYVTEGMRKPAFLSGEQKKAIVDLLFKTNRKVTVKQLKEDYFKKIECFDSVEISGVEDRFNASLGTYHDLLKIIKDKDFLDNEENEDILEDIVLTLTLFEDREMIEERLKTYAHLFDDKVMKQLKRRRYTGWGRLSRKLINGIRDKQSGKTILDFLKSDGFANRNFMQLIHDDSLTFKEDIQKAQVSGQGDSLHEHIANLAGSPAIKKGILQTVKVVDELVKVMGRHKPENIVIEMARENQTTQKGQKNSRERMKRIEEGIKELGSQILKEHPVENTQLQNEKLYLYYLQNGRDMYVDQELDINRLSDYDVDHIVPQSFLKDDSIDNKVLTRSDKARGKSDNVPSEEVVKKMKNYWRQLLNAKLITQRKFDNLTKAERGGLSELDKAGFIKRQLVETRQITKHVAQILDSRMNTKYDENDKLIREVKVITLKSKLVSDFRKDFQFYKVREINNYHHAHDAYLNAVVGTALIKKYPKLESEFVYGDYKVYDVRKMIAKSEQEIGKATAKYFFYSNIMNFFKTEITLANGEIRKRPLIETNGETGEIVWDKGRDFATVRKVLSMPQVNIVKKTEVQTGGFSKESILPKRNSDKLIARKKDWDPKKYGGFDSPTVAYSVLVVAKVEKGKSKKLKSVKELLGITIMERSSFEKNPIDFLEAKGYKEVKKDLIIKLPKYSLFELENGRKRMLASAGELQKGNELALPSKYVNFLYLASHYEKLKGSPEDNEQKQLFVEQHKHYLDEIIEQISEFSKRVILADANLDKVLSAYNKHRDKPIREQAENIIHLFTLTNLGAPAAFKYFDTTIDRKRYTSTKEVLDATLIHQSITGLYETRIDLSQLGGDGGEAAAKPAPGGSGGLLGRDLLTKLKAQIQFSTEGPQVTWEDRPAMCLVLNLEEEYRLHEKPVPPSIDPSWLQLFPMVWAEKAGMGLANQVPPVVVELKSDASPVAVRQYPMSKEAREGIRPHIQRFLDLGILVPCQSPWNTPLLPVKKPGTNDYRPVQDLREVNKRVQDIHPTVPNPYNLLSSLPPSHTWYSVLDLKDAFFCLKLHPNSQPLFAFEWRDPEKGNTGQLTWTRLPQGFKNSPTLFNEALHRDLASFRALNPQVVMLQYVDDLLVAAPTYRDCKEGTRRLLQELSKLGYRVSAKKAQLCREEVTYLGYLLKGGKRWLTPARKATVMKIPTPTTPRQVREFLGKAGFCRLFIPGFASLAAPLYPLTRPKVPFTWTEAHQEAFGRIKEALLSAPALALPDLTKPFALYVDEKEGVARGVLTQTLGPWRRPVAYLSKKLDPVASGWPTCLKAIAAVALLLKDADKLTLGQNVLVIAPHNLESIVRQPPDRWMTNARMTHYQSLLLNERVSFAPPAILNPATLLPVESDDTPIHICSEILAEETGTRPDLRDQPLPGVPAWYTDGSSFIMDGRRQAGAAIVDNKRTVWASNLPEGTSAQKAELIALTQALRLAEGKSINIYTDSRYAFATAHVHGAIYKQRGWLTSAGKDIKNKEEILALLEAIHLPKRVAIIHCPGHQRGTDPVATGNRKADEAAKQAAQSTRILTETTKNAGKRTADGSEFEKRTADGSEFESPKKKAKVE

SEQ ID NO: 1724 - protein, 2125 aa, synthetic construct
  source 1..2125: note = Description of Artificial Sequence: Synthetic polypeptide
MPAAKRVKLDGGDKKYSIGLDIGTNSVGWAVITDEYKVPSKKFKVLGNTDRHSIKKNLIGALLFDSGETAEATRLKRTARRRYTRRKNRICYLQEIFSNEMAKVDDSFFHRLEESFLVEEDKKHERHPIFGNIVDEVAYHEKYPTIYHLRKKLVDSTDKADLRLIYLALAHMIKFRGHFLIEGDLNPDNSDVDKLFIQLVQTYNQLFEENPINASGVDAKAILSARLSKSRRLENLIAQLPGEKKNGLFGNLIALSLGLTPNFKSNFDLAEDAKLQLSKDTYDDDLDNLLAQIGDQYADLFLAAKNLSDAILLSDILRVNTEITKAPLSASMIKRYDEHHQDLTLLKALVRQQLPEKYKEIFFDQSKNGYAGYIDGGASQEEFYKFIKPILEKMDGTEELLVKLNREDLLRKQRTFDNGSIPHQIHLGELHAILRRQEDFYPFLKDNREKIEKILTFRIPYYVGPLARGNSRFAWMTRKSEETITPWNFEEVVDKGASAQSFIERMTNFDKNLPNEKVLPKHSLLYEYFTVYNELTKVKYVTEGMRKPAFLSGEQKKAIVDLLFKTNRKVTVKQLKEDYFKKIECFDSVEISGVEDRFNASLGTYHDLLKIIKDKDFLDNEENEDILEDIVLTLTLFEDREMIEERLKTYAHLFDDKVMKQLKRRRYTGWGRLSRKLINGIRDKQSGKTILDFLKSDGFANRNFMQLIHDDSLTFKEDIQKAQVSGQGDSLHEHIANLAGSPAIKKGILQTVKVVDELVKVMGRHKPENIVIEMARENQTTQKGQKNSRERMKRIEEGIKELGSQILKEHPVENTQLQNEKLYLYYLQNGRDMYVDQELDINRLSDYDVDHIVPQSFLKDDSIDNKVLTRSDKARGKSDNVPSEEVVKKMKNYWRQLLNAKLITQRKFDNLTKAERGGLSELDKAGFIKRQLVETRQITKHVAQILDSRMNTKYDENDKLIREVKVITLKSKLVSDFRKDFQFYKVREINNYHHAHDAYLNAVVGTALIKKYPKLESEFVYGDYKVYDVRKMIAKSEQEIGKATAKYFFYSNIMNFFKTEITLANGEIRKRPLIETNGETGEIVWDKGRDFATVRKVLSMPQVNIVKKTEVQTGGFSKESILPKRNSDKLIARKKDWDPKKYGGFDSPTVAYSVLVVAKVEKGKSKKLKSVKELLGITIMERSSFEKNPIDFLEAKGYKEVKKDLIIKLPKYSLFELENGRKRMLASAGELQKGNELALPSKYVNFLYLASHYEKLKGSPEDNEQKQLFVEQHKHYLDEIIEQISEFSKRVILADANLDKVLSAYNKHRDKPIREQAENIIHLFTLTNLGAPAAFKYFDTTIDRKRYTSTKEVLDATLIHQSITGLYETRIDLSQLGGDGGGGSGSSGGGGGLLGRDLLTKLKAQIQFSTEGPQVTWEDRPAMCLVLNLEEEYRLHEKPVPPSIDPSWLQLFPMVWAEKAGMGLANQVPPVVVELKSDASPVAVRQYPMSKEAREGIRPHIQRFLDLGILVPCQSPWNTPLLPVKKPGTNDYRPVQDLREVNKRVQDIHPTVPNPYNLLSSLPPSHTWYSVLDLKDAFFCLKLHPNSQPLFAFEWRDPEKGNTGQLTWTRLPQGFKNSPTLFNEALHRDLASFRALNPQVVMLQYVDDLLVAAPTYRDCKEGTRRLLQELSKLGYRVSAKKAQLCREEVTYLGYLLKGGKRWLTPARKATVMKIPTPTTPRQVREFLGKAGFCRLFIPGFASLAAPLYPLTRPKVPFTWTEAHQEAFGRIKEALLSAPALALPDLTKPFALYVDEKEGVARGVLTQTLGPWRRPVAYLSKKLDPVASGWPTCLKAIAAVALLLKDADKLTLGQNVLVIAPHNLESIVRQPPDRWMTNARMTHYQSLLLNERVSFAPPAILNPATLLPVESDDTPIHICSEILAEETGTRPDLRDQPLPGVPAWYTDGSSFIMDGRRQAGAAIVDNKRTVWASNLPEGTSAQKAELIALTQALRLAEGKSINIYTDSRYAFATAHVHGAIYKQRGWLTSAGKDIKNKEEILALLEAIHLPKRVAIIHCPGHQRGTDPVATGNRKADEAAKQAAQSTRILTETTKNAGKRTADGSEFEKRTADGSEFESPKKKAKVE

SEQ ID NO: 1725 - protein, 2127 aa, synthetic construct
  source 1..2127: note = Description of Artificial Sequence: Synthetic polypeptide
MPAAKRVKLDGGDKKYSIGLDIGTNSVGWAVITDEYKVPSKKFKVLGNTDRHSIKKNLIGALLFDSGETAEATRLKRTARRRYTRRKNRICYLQEIFSNEMAKVDDSFFHRLEESFLVEEDKKHERHPIFGNIVDEVAYHEKYPTIYHLRKKLVDSTDKADLRLIYLALAHMIKFRGHFLIEGDLNPDNSDVDKLFIQLVQTYNQLFEENPINASGVDAKAILSARLSKSRRLENLIAQLPGEKKNGLFGNLIALSLGLTPNFKSNFDLAEDAKLQLSKDTYDDDLDNLLAQIGDQYADLFLAAKNLSDAILLSDILRVNTEITKAPLSASMIKRYDEHHQDLTLLKALVRQQLPEKYKEIFFDQSKNGYAGYIDGGASQEEFYKFIKPILEKMDGTEELLVKLNREDLLRKQRTFDNGSIPHQIHLGELHAILRRQEDFYPFLKDNREKIEKILTFRIPYYVGPLARGNSRFAWMTRKSEETITPWNFEEVVDKGASAQSFIERMTNFDKNLPNEKVLPKHSLLYEYFTVYNELTKVKYVTEGMRKPAFLSGEQKKAIVDLLFKTNRKVTVKQLKEDYFKKIECFDSVEISGVEDRFNASLGTYHDLLKIIKDKDFLDNEENEDILEDIVLTLTLFEDREMIEERLKTYAHLFDDKVMKQLKRRRYTGWGRLSRKLINGIRDKQSGKTILDFLKSDGFANRNFMQLIHDDSLTFKEDIQKAQVSGQGDSLHEHIANLAGSPAIKKGILQTVKVVDELVKVMGRHKPENIVIEMARENQTTQKGQKNSRERMKRIEEGIKELGSQILKEHPVENTQLQNEKLYLYYLQNGRDMYVDQELDINRLSDYDVDHIVPQSFLKDDSIDNKVLTRSDKARGKSDNVPSEEVVKKMKNYWRQLLNAKLITQRKFDNLTKAERGGLSELDKAGFIKRQLVETRQITKHVAQILDSRMNTKYDENDKLIREVKVITLKSKLVSDFRKDFQFYKVREINNYHHAHDAYLNAVVGTALIKKYPKLESEFVYGDYKVYDVRKMIAKSEQEIGKATAKYFFYSNIMNFFKTEITLANGEIRKRPLIETNGETGEIVWDKGRDFATVRKVLSMPQVNIVKKTEVQTGGFSKESILPKRNSDKLIARKKDWDPKKYGGFDSPTVAYSVLVVAKVEKGKSKKLKSVKELLGITIMERSSFEKNPIDFLEAKGYKEVKKDLIIKLPKYSLFELENGRKRMLASAGELQKGNELALPSKYVNFLYLASHYEKLKGSPEDNEQKQLFVEQHKHYLDEIIEQISEFSKRVILADANLDKVLSAYNKHRDKPIREQAENIIHLFTLTNLGAPAAFKYFDTTIDRKRYTSTKEVLDATLIHQSITGLYETRIDLSQLGGDGGGSSEAAAKGGSGGLLGRDLLTKLKAQIQFSTEGPQVTWEDRPAMCLVLNLEEEYRLHEKPVPPSIDPSWLQLFPMVWAEKAGMGLANQVPPVVVELKSDASPVAVRQYPMSKEAREGIRPHIQRFLDLGILVPCQSPWNTPLLPVKKPGTNDYRPVQDLREVNKRVQDIHPTVPNPYNLLSSLPPSHTWYSVLDLKDAFFCLKLHPNSQPLFAFEWRDPEKGNTGQLTWTRLPQGFKNSPTLFNEALHRDLASFRALNPQVVMLQYVDDLLVAAPTYRDCKEGTRRLLQELSKLGYRVSAKKAQLCREEVTYLGYLLKGGKRWLTPARKATVMKIPTPTTPRQVREFLGKAGFCRLFIPGFASLAAPLYPLTRPKVPFTWTEAHQEAFGRIKEALLSAPALALPDLTKPFALYVDEKEGVARGVLTQTLGPWRRPVAYLSKKLDPVASGWPTCLKAIAAVALLLKDADKLTLGQNVLVIAPHNLESIVRQPPDRWMTNARMTHYQSLLLNERVSFAPPAILNPATLLPVESDDTPIHICSEILAEETGTRPDLRDQPLPGVPAWYTDGSSFIMDGRRQAGAAIVDNKRTVWASNLPEGTSAQKAELIALTQALRLAEGKSINIYTDSRYAFATAHVHGAIYKQRGWLTSAGKDIKNKEEILALLEAIHLPKRVAIIHCPGHQRGTDPVATGNRKADEAAKQAAQSTRILTETTKNAGKRTADGSEFEKRTADGSEFESPKKKAKVE

SEQ ID NO: 1726 - protein, 2127 aa, synthetic construct
  source 1..2127: note = Description of Artificial Sequence: Synthetic polypeptide
MPAAKRVKLDGGDKKYSIGLDIGTNSVGWAVITDEYKVPSKKFKVLGNTDRHSIKKNLIGALLFDSGETAEATRLKRTARRRYTRRKNRICYLQEIFSNEMAKVDDSFFHRLEESFLVEEDKKHERHPIFGNIVDEVAYHEKYPTIYHLRKKLVDSTDKADLRLIYLALAHMIKFRGHFLIEGDLNPDNSDVDKLFIQLVQTYNQLFEENPINASGVDAKAILSARLSKSRRLENLIAQLPGEKKNGLFGNLIALSLGLTPNFKSNFDLAEDAKLQLSKDTYDDDLDNLLAQIGDQYADLFLAAKNLSDAILLSDILRVNTEITKAPLSASMIKRYDEHHQDLTLLKALVRQQLPEKYKEIFFDQSKNGYAGYIDGGASQEEFYKFIKPILEKMDGTEELLVKLNREDLLRKQRTFDNGSIPHQIHLGELHAILRRQEDFYPFLKDNREKIEKILTFRIPYYVGPLARGNSRFAWMTRKSEETITPWNFEEVVDKGASAQSFIERMTNFDKNLPNEKVLPKHSLLYEYFTVYNELTKVKYVTEGMRKPAFLSGEQKKAIVDLLFKTNRKVTVKQLKEDYFKKIECFDSVEISGVEDRFNASLGTYHDLLKIIKDKDFLDNEENEDILEDIVLTLTLFEDREMIEERLKTYAHLFDDKVMKQLKRRRYTGWGRLSRKLINGIRDKQSGKTILDFLKSDGFANRNFMQLIHDDSLTFKEDIQKAQVSGQGDSLHEHIANLAGSPAIKKGILQTVKVVDELVKVMGRHKPENIVIEMARENQTTQKGQKNSRERMKRIEEGIKELGSQILKEHPVENTQLQNEKLYLYYLQNGRDMYVDQELDINRLSDYDVDHIVPQSFLKDDSIDNKVLTRSDKARGKSDNVPSEEVVKKMKNYWRQLLNAKLITQRKFDNLTKAERGGLSELDKAGFIKRQLVETRQITKHVAQILDSRMNTKYDENDKLIREVKVITLKSKLVSDFRKDFQFYKVREINNYHHAHDAYLNAVVGTALIKKYPKLESEFVYGDYKVYDVRKMIAKSEQEIGKATAKYFFYSNIMNFFKTEITLANGEIRKRPLIETNGETGEIVWDKGRDFATVRKVLSMPQVNIVKKTEVQTGGFSKESILPKRNSDKLIARKKDWDPKKYGGFDSPTVAYSVLVVAKVEKGKSKKLKSVKELLGITIMERSSFEKNPIDFLEAKGYKEVKKDLIIKLPKYSLFELENGRKRMLASAGELQKGNELALPSKYVNFLYLASHYEKLKGSPEDNEQKQLFVEQHKHYLDEIIEQISEFSKRVILADANLDKVLSAYNKHRDKPIREQAENIIHLFTLTNLGAPAAFKYFDTTIDRKRYTSTKEVLDATLIHQSITGLYETRIDLSQLGGDGGGGGGSSEAAAKGGLLGRDLLTKLKAQIQFSTEGPQVTWEDRPAMCLVLNLEEEYRLHEKPVPPSIDPSWLQLFPMVWAEKAGMGLANQVPPVVVELKSDASPVAVRQYPMSKEAREGIRPHIQRFLDLGILVPCQSPWNTPLLPVKKPGTNDYRPVQDLREVNKRVQDIHPTVPNPYNLLSSLPPSHTWYSVLDLKDAFFCLKLHPNSQPLFAFEWRDPEKGNTGQLTWTRLPQGFKNSPTLFNEALHRDLASFRALNPQVVMLQYVDDLLVAAPTYRDCKEGTRRLLQELSKLGYRVSAKKAQLCREEVTYLGYLLKGGKRWLTPARKATVMKIPTPTTPRQVREFLGKAGFCRLFIPGFASLAAPLYPLTRPKVPFTWTEAHQEAFGRIKEALLSAPALALPDLTKPFALYVDEKEGVARGVLTQTLGPWRRPVAYLSKKLDPVASGWPTCLKAIAAVALLLKDADKLTLGQNVLVIAPHNLESIVRQPPDRWMTNARMTHYQSLLLNERVSFAPPAILNPATLLPVESDDTPIHICSEILAEETGTRPDLRDQPLPGVPAWYTDGSSFIMDGRRQAGAAIVDNKRTVWASNLPEGTSAQKAELIALTQALRLAEGKSINIYTDSRYAFATAHVHGAIYKQRGWLTSAGKDIKNKEEILALLEAIHLPKRVAIIHCPGHQRGTDPVATGNRKADEAAKQAAQSTRILTETTKNAGKRTADGSEFEKRTADGSEFESPKKKAKVE

SEQ ID NO: 1727 - protein, 2121 aa, synthetic construct
  source 1..2121: note = Description of Artificial Sequence: Synthetic polypeptide
MPAAKRVKLDGGDKKYSIGLDIGTNSVGWAVITDEYKVPSKKFKVLGNTDRHSIKKNLIGALLFDSGETAEATRLKRTARRRYTRRKNRICYLQEIFSNEMAKVDDSFFHRLEESFLVEEDKKHERHPIFGNIVDEVAYHEKYPTIYHLRKKLVDSTDKADLRLIYLALAHMIKFRGHFLIEGDLNPDNSDVDKLFIQLVQTYNQLFEENPINASGVDAKAILSARLSKSRRLENLIAQLPGEKKNGLFGNLIALSLGLTPNFKSNFDLAEDAKLQLSKDTYDDDLDNLLAQIGDQYADLFLAAKNLSDAILLSDILRVNTEITKAPLSASMIKRYDEHHQDLTLLKALVRQQLPEKYKEIFFDQSKNGYAGYIDGGASQEEFYKFIKPILEKMDGTEELLVKLNREDLLRKQRTFDNGSIPHQIHLGELHAILRRQEDFYPFLKDNREKIEKILTFRIPYYVGPLARGNSRFAWMTRKSEETITPWNFEEVVDKGASAQSFIERMTNFDKNLPNEKVLPKHSLLYEYFTVYNELTKVKYVTEGMRKPAFLSGEQKKAIVDLLFKTNRKVTVKQLKEDYFKKIECFDSVEISGVEDRFNASLGTYHDLLKIIKDKDFLDNEENEDILEDIVLTLTLFEDREMIEERLKTYAHLFDDKVMKQLKRRRYTGWGRLSRKLINGIRDKQSGKTILDFLKSDGFANRNFMQLIHDDSLTFKEDIQKAQVSGQGDSLHEHIANLAGSPAIKKGILQTVKVVDELVKVMGRHKPENIVIEMARENQTTQKGQKNSRERMKRIEEGIKELGSQILKEHPVENTQLQNEKLYLYYLQNGRDMYVDQELDINRLSDYDVDHIVPQSFLKDDSIDNKVLTRSDKARGKSDNVPSEEVVKKMKNYWRQLLNAKLITQRKFDNLTKAERGGLSELDKAGFIKRQLVETRQITKHVAQILDSRMNTKYDENDKLIREVKVITLKSKLVSDFRKDFQFYKVREINNYHHAHDAYLNAVVGTALIKKYPKLESEFVYGDYKVYDVRKMIAKSEQEIGKATAKYFFYSNIMNFFKTEITLANGEIRKRPLIETNGETGEIVWDKGRDFATVRKVLSMPQVNIVKKTEVQTGGFSKESILPKRNSDKLIARKKDWDPKKYGGFDSPTVAYSVLVVAKVEKGKSKKLKSVKELLGITIMERSSFEKNPIDFLEAKGYKEVKKDLIIKLPKYSLFELENGRKRMLASAGELQKGNELALPSKYVNFLYLASHYEKLKGSPEDNEQKQLFVEQHKHYLDEIIEQISEFSKRVILADANLDKVLSAYNKHRDKPIREQAENIIHLFTLTNLGAPAAFKYFDTTIDRKRYTSTKEVLDATLIHQSITGLYETRIDLSQLGGDGGPAPAPGGLLGRDLLTKLKAQIQFSTEGPQVTWEDRPAMCLVLNLEEEYRLHEKPVPPSIDPSWLQLFPMVWAEKAGMGLANQVPPVVVELKSDASPVAVRQYPMSKEAREGIRPHIQRFLDLGILVPCQSPWNTPLLPVKKPGTNDYRPVQDLREVNKRVQDIHPTVPNPYNLLSSLPPSHTWYSVLDLKDAFFCLKLHPNSQPLFAFEWRDPEKGNTGQLTWTRLPQGFKNSPTLFNEALHRDLASFRALNPQVVMLQYVDDLLVAAPTYRDCKEGTRRLLQELSKLGYRVSAKKAQLCREEVTYLGYLLKGGKRWLTPARKATVMKIPTPTTPRQVREFLGKAGFCRLFIPGFASLAAPLYPLTRPKVPFTWTEAHQEAFGRIKEALLSAPALALPDLTKPFALYVDEKEGVARGVLTQTLGPWRRPVAYLSKKLDPVASGWPTCLKAIAAVALLLKDADKLTLGQNVLVIAPHNLESIVRQPPDRWMTNARMTHYQSLLLNERVSFAPPAILNPATLLPVESDDTPIHICSEILAEETGTRPDLRDQPLPGVPAWYTDGSSFIMDGRRQAGAAIVDNKRTVWASNLPEGTSAQKAELIALTQALRLAEGKSINIYTDSRYAFATAHVHGAIYKQRGWLTSAGKDIKNKEEILALLEAIHLPKRVAIIHCPGHQRGTDPVATGNRKADEAAKQAAQSTRILTETTKNAGKRTADGSEFEKRTADGSEFESPKKKAKVE

SEQ ID NO: 1728 - protein, 2122 aa, synthetic construct
  source 1..2122: note = Description of Artificial Sequence: Synthetic polypeptide
MPAAKRVKLDGGDKKYSIGLDIGTNSVGWAVITDEYKVPSKKFKVLGNTDRHSIKKNLIGALLFDSGETAEATRLKRTARRRYTRRKNRICYLQEIFSNEMAKVDDSFFHRLEESFLVEEDKKHERHPIFGNIVDEVAYHEKYPTIYHLRKKLVDSTDKADLRLIYLALAHMIKFRGHFLIEGDLNPDNSDVDKLFIQLVQTYNQLFEENPINASGVDAKAILSARLSKSRRLENLIAQLPGEKKNGLFGNLIALSLGLTPNFKSNFDLAEDAKLQLSKDTYDDDLDNLLAQIGDQYADLFLAAKNLSDAILLSDILRVNTEITKAPLSASMIKRYDEHHQDLTLLKALVRQQLPEKYKEIFFDQSKNGYAGYIDGGASQEEFYKFIKPILEKMDGTEELLVKLNREDLLRKQRTFDNGSIPHQIHLGELHAILRRQEDFYPFLKDNREKIEKILTFRIPYYVGPLARGNSRFAWMTRKSEETITPWNFEEVVDKGASAQSFIERMTNFDKNLPNEKVLPKHSLLYEYFTVYNELTKVKYVTEGMRKPAFLSGEQKKAIVDLLFKTNRKVTVKQLKEDYFKKIECFDSVEISGVEDRFNASLGTYHDLLKIIKDKDFLDNEENEDILEDIVLTLTLFEDREMIEERLKTYAHLFDDKVMKQLKRRRYTGWGRLSRKLINGIRDKQSGKTILDFLKSDGFANRNFMQLIHDDSLTFKEDIQKAQVSGQGDSLHEHIANLAGSPAIKKGILQTVKVVDELVKVMGRHKPENIVIEMARENQTTQKGQKNSRERMKRIEEGIKELGSQILKEHPVENTQLQNEKLYLYYLQNGRDMYVDQELDINRLSDYDVDHIVPQSFLKDDSIDNKVLTRSDKARGKSDNVPSEEVVKKMKNYWRQLLNAKLITQRKFDNLTKAERGGLSELDKAGFIKRQLVETRQITKHVAQILDSRMNTKYDENDKLIREVKVITLKSKLVSDFRKDFQFYKVREINNYHHAHDAYLNAVVGTALIKKYPKLESEFVYGDYKVYDVRKMIAKSEQEIGKATAKYFFYSNIMNFFKTEITLANGEIRKRPLIETNGETGEIVWDKGRDFATVRKVLSMPQVNIVKKTEVQTGGFSKESILPKRNSDKLIARKKDWDPKKYGGFDSPTVAYSVLVVAKVEKGKSKKLKSVKELLGITIMERSSFEKNPIDFLEAKGYKEVKKDLIIKLPKYSLFELENGRKRMLASAGELQKGNELALPSKYVNFLYLASHYEKLKGSPEDNEQKQLFVEQHKHYLDEIIEQISEFSKRVILADANLDKVLSAYNKHRDKPIREQAENIIHLFTLTNLGAPAAFKYFDTTIDRKRYTSTKEVLDATLIHQSITGLYETRIDLSQLGGDGGPAPGGSGGLLGRDLLTKLKAQIQFSTEGPQVTWEDRPAMCLVLNLEEEYRLHEKPVPPSIDPSWLQLFPMVWAEKAGMGLANQVPPVVVELKSDASPVAVRQYPMSKEAREGIRPHIQRFLDLGILVPCQSPWNTPLLPVKKPGTNDYRPVQDLREVNKRVQDIHPTVPNPYNLLSSLPPSHTWYSVLDLKDAFFCLKLHPNSQPLFAFEWRDPEKGNTGQLTWTRLPQGFKNSPTLFNEALHRDLASFRALNPQVVMLQYVDDLLVAAPTYRDCKEGTRRLLQELSKLGYRVSAKKAQLCREEVTYLGYLLKGGKRWLTPARKATVMKIPTPTTPRQVREFLGKAGFCRLFIPGFASLAAPLYPLTRPKVPFTWTEAHQEAFGRIKEALLSAPALALPDLTKPFALYVDEKEGVARGVLTQTLGPWRRPVAYLSKKLDPVASGWPTCLKAIAAVALLLKDADKLTLGQNVLVIAPHNLESIVRQPPDRWMTNARMTHYQSLLLNERVSFAPPAILNPATLLPVESDDTPIHICSEILAEETGTRPDLRDQPLPGVPAWYTDGSSFIMDGRRQAGAAIVDNKRTVWASNLPEGTSAQKAELIALTQALRLAEGKSINIYTDSRYAFATAHVHGAIYKQRGWLTSAGKDIKNKEEILALLEAIHLPKRVAIIHCPGHQRGTDPVATGNRKADEAAKQAAQSTRILTETTKNAGKRTADGSEFEKRTADGSEFESPKKKAKVE

SEQ ID NO: 1729 - protein, 2131 aa, synthetic construct
  source 1..2131: note = Description of Artificial Sequence: Synthetic polypeptide
MPAAKRVKLDGGDKKYSIGLDIGTNSVGWAVITDEYKVPSKKFKVLGNTDRHSIKKNLIGALLFDSGETAEATRLKRTARRRYTRRKNRICYLQEIFSNEMAKVDDSFFHRLEESFLVEEDKKHERHPIFGNIVDEVAYHEKYPTIYHLRKKLVDSTDKADLRLIYLALAHMIKFRGHFLIEGDLNPDNSDVDKLFIQLVQTYNQLFEENPINASGVDAKAILSARLSKSRRLENLIAQLPGEKKNGLFGNLIALSLGLTPNFKSNFDLAEDAKLQLSKDTYDDDLDNLLAQIGDQYADLFLAAKNLSDAILLSDILRVNTEITKAPLSASMIKRYDEHHQDLTLLKALVRQQLPEKYKEIFFDQSKNGYAGYIDGGASQEEFYKFIKPILEKMDGTEELLVKLNREDLLRKQRTFDNGSIPHQIHLGELHAILRRQEDFYPFLKDNREKIEKILTFRIPYYVGPLARGNSRFAWMTRKSEETITPWNFEEVVDKGASAQSFIERMTNFDKNLPNEKVLPKHSLLYEYFTVYNELTKVKYVTEGMRKPAFLSGEQKKAIVDLLFKTNRKVTVKQLKEDYFKKIECFDSVEISGVEDRFNASLGTYHDLLKIIKDKDFLDNEENEDILEDIVLTLTLFEDREMIEERLKTYAHLFDDKVMKQLKRRRYTGWGRLSRKLINGIRDKQSGKTILDFLKSDGFANRNFMQLIHDDSLTFKEDIQKAQVSGQGDSLHEHIANLAGSPAIKKGILQTVKVVDELVKVMGRHKPENIVIEMARENQTTQKGQKNSRERMKRIEEGIKELGSQILKEHPVENTQLQNEKLYLYYLQNGRDMYVDQELDINRLSDYDVDHIVPQSFLKDDSIDNKVLTRSDKARGKSDNVPSEEVVKKMKNYWRQLLNAKLITQRKFDNLTKAERGGLSELDKAGFIKRQLVETRQITKHVAQILDSRMNTKYDENDKLIREVKVITLKSKLVSDFRKDFQFYKVREINNYHHAHDAYLNAVVGTALIKKYPKLESEFVYGDYKVYDVRKMIAKSEQEIGKATAKYFFYSNIMNFFKTEITLANGEIRKRPLIETNGETGEIVWDKGRDFATVRKVLSMPQVNIVKKTEVQTGGFSKESILPKRNSDKLIARKKDWDPKKYGGFDSPTVAYSVLVVAKVEKGKSKKLKSVKELLGITIMERSSFEKNPIDFLEAKGYKEVKKDLIIKLPKYSLFELENGRKRMLASAGELQKGNELALPSKYVNFLYLASHYEKLKGSPEDNEQKQLFVEQHKHYLDEIIEQISEFSKRVILADANLDKVLSAYNKHRDKPIREQAENIIHLFTLTNLGAPAAFKYFDTTIDRKRYTSTKEVLDATLIHQSITGLYETRIDLSQLGGDGGGGGGSGGGGSGGGGSGGLLGRDLLTKLKAQIQFSTEGPQVTWEDRPAMCLVLNLEEEYRLHEKPVPPSIDPSWLQLFPMVWAEKAGMGLANQVPPVVVELKSDASPVAVRQYPMSKEAREGIRPHIQRFLDLGILVPCQSPWNTPLLPVKKPGTNDYRPVQDLREVNKRVQDIHPTVPNPYNLLSSLPPSHTWYSVLDLKDAFFCLKLHPNSQPLFAFEWRDPEKGNTGQLTWTRLPQGFKNSPTLFNEALHRDLASFRALNPQVVMLQYVDDLLVAAPTYRDCKEGTRRLLQELSKLGYRVSAKKAQLCREEVTYLGYLLKGGKRWLTPARKATVMKIPTPTTPRQVREFLGKAGFCRLFIPGFASLAAPLYPLTRPKVPFTWTEAHQEAFGRIKEALLSAPALALPDLTKPFALYVDEKEGVARGVLTQTLGPWRRPVAYLSKKLDPVASGWPTCLKAIAAVALLLKDADKLTLGQNVLVIAPHNLESIVRQPPDRWMTNARMTHYQSLLLNERVSFAPPAILNPATLLPVESDDTPIHICSEILAEETGTRPDLRDQPLPGVPAWYTDGSSFIMDGRRQAGAAIVDNKRTVWASNLPEGTSAQKAELIALTQALRLAEGKSINIYTDSRYAFATAHVHGAIYKQRGWLTSAGKDIKNKEEILALLEAIHLPKRVAIIHCPGHQRGTDPVATGNRKADEAAKQAAQSTRILTETTKNAGKRTADGSEFEKRTADGSEFESPKKKAKVE

SEQ ID NO: 1730 - protein, 2125 aa, synthetic construct
  source 1..2125: note = Description of Artificial Sequence: Synthetic polypeptide
MPAAKRVKLDGGDKKYSIGLDIGTNSVGWAVITDEYKVPSKKFKVLGNTDRHSIKKNLIGALLFDSGETAEATRLKRTARRRYTRRKNRICYLQEIFSNEMAKVDDSFFHRLEESFLVEEDKKHERHPIFGNIVDEVAYHEKYPTIYHLRKKLVDSTDKADLRLIYLALAHMIKFRGHFLIEGDLNPDNSDVDKLFIQLVQTYNQLFEENPINASGVDAKAILSARLSKSRRLENLIAQLPGEKKNGLFGNLIALSLGLTPNFKSNFDLAEDAKLQLSKDTYDDDLDNLLAQIGDQYADLFLAAKNLSDAILLSDILRVNTEITKAPLSASMIKRYDEHHQDLTLLKALVRQQLPEKYKEIFFDQSKNGYAGYIDGGASQEEFYKFIKPILEKMDGTEELLVKLNREDLLRKQRTFDNGSIPHQIHLGELHAILRRQEDFYPFLKDNREKIEKILTFRIPYYVGPLARGNSRFAWMTRKSEETITPWNFEEVVDKGASAQSFIERMTNFDKNLPNEKVLPKHSLLYEYFTVYNELTKVKYVTEGMRKPAFLSGEQKKAIVDLLFKTNRKVTVKQLKEDYFKKIECFDSVEISGVEDRFNASLGTYHDLLKIIKDKDFLDNEENEDILEDIVLTLTLFEDREMIEERLKTYAHLFDDKVMKQLKRRRYTGWGRLSRKLINGIRDKQSGKTILDFLKSDGFANRNFMQLIHDDSLTFKEDIQKAQVSGQGDSLHEHIANLAGSPAIKKGILQTVKVVDELVKVMGRHKPENIVIEMARENQTTQKGQKNSRERMKRIEEGIKELGSQILKEHPVENTQLQNEKLYLYYLQNGRDMYVDQELDINRLSDYDVDHIVPQSFLKDDSIDNKVLTRSDKARGKSDNVPSEEVVKKMKNYWRQLLNAKLITQRKFDNLTKAERGGLSELDKAGFIKRQLVETRQITKHVAQILDSRMNTKYDENDKLIREVKVITLKSKLVSDFRKDFQFYKVREINNYHHAHDAYLNAVVGTALIKKYPKLESEFVYGDYKVYDVRKMIAKSEQEIGKATAKYFFYSNIMNFFKTEITLANGEIRKRPLIETNGETGEIVWDKGRDFATVRKVLSMPQVNIVKKTEVQTGGFSKESILPKRNSDKLIARKKDWDPKKYGGFDSPTVAYSVLVVAKVEKGKSKKLKSVKELLGITIMERSSFEKNPIDFLEAKGYKEVKKDLIIKLPKYSLFELENGRKRMLASAGELQKGNELALPSKYVNFLYLASHYEKLKGSPEDNEQKQLFVEQHKHYLDEIIEQISEFSKRVILADANLDKVLSAYNKHRDKPIREQAENIIHLFTLTNLGAPAAFKYFDTTIDRKRYTSTKEVLDATLIHQSITGLYETRIDLSQLGGDGGGGSPAPGGGGGLLGRDLLTKLKAQIQFSTEGPQVTWEDRPAMCLVLNLEEEYRLHEKPVPPSIDPSWLQLFPMVWAEKAGMGLANQVPPVVVELKSDASPVAVRQYPMSKEAREGIRPHIQRFLDLGILVPCQSPWNTPLLPVKKPGTNDYRPVQDLREVNKRVQDIHPTVPNPYNLLSSLPPSHTWYSVLDLKDAFFCLKLHPNSQPLFAFEWRDPEKGNTGQLTWTRLPQGFKNSPTLFNEALHRDLASFRALNPQVVMLQYVDDLLVAAPTYRDCKEGTRRLLQELSKLGYRVSAKKAQLCREEVTYLGYLLKGGKRWLTPARKATVMKIPTPTTPRQVREFLGKAGFCRLFIPGFASLAAPLYPLTRPKVPFTWTEAHQEAFGRIKEALLSAPALALPDLTKPFALYVDEKEGVARGVLTQTLGPWRRPVAYLSKKLDPVASGWPTCLKAIAAVALLLKDADKLTLGQNVLVIAPHNLESIVRQPPDRWMTNARMTHYQSLLLNERVSFAPPAILNPATLLPVESDDTPIHICSEILAEETGTRPDLRDQPLPGVPAWYTDGSSFIMDGRRQAGAAIVDNKRTVWASNLPEGTSAQKAELIALTQALRLAEGKSINIYTDSRYAFATAHVHGAIYKQRGWLTSAGKDIKNKEEILALLEAIHLPKRVAIIHCPGHQRGTDPVATGNRKADEAAKQAAQSTRILTETTKNAGKRTADGSEFEKRTADGSEFESPKKKAKVE

SEQ ID NO: 1731 - protein, 2122 aa, synthetic construct
  source 1..2122: note = Description of Artificial Sequence: Synthetic polypeptide
MPAAKRVKLDGGDKKYSIGLDIGTNSVGWAVITDEYKVPSKKFKVLGNTDRHSIKKNLIGALLFDSGETAEATRLKRTARRRYTRRKNRICYLQEIFSNEMAKVDDSFFHRLEESFLVEEDKKHERHPIFGNIVDEVAYHEKYPTIYHLRKKLVDSTDKADLRLIYLALAHMIKFRGHFLIEGDLNPDNSDVDKLFIQLVQTYNQLFEENPINASGVDAKAILSARLSKSRRLENLIAQLPGEKKNGLFGNLIALSLGLTPNFKSNFDLAEDAKLQLSKDTYDDDLDNLLAQIGDQYADLFLAAKNLSDAILLSDILRVNTEITKAPLSASMIKRYDEHHQDLTLLKALVRQQLPEKYKEIFFDQSKNGYAGYIDGGASQEEFYKFIKPILEKMDGTEELLVKLNREDLLRKQRTFDNGSIPHQIHLGELHAILRRQEDFYPFLKDNREKIEKILTFRIPYYVGPLARGNSRFAWMTRKSEETITPWNFEEVVDKGASAQSFIERMTNFDKNLPNEKVLPKHSLLYEYFTVYNELTKVKYVTEGMRKPAFLSGEQKKAIVDLLFKTNRKVTVKQLKEDYFKKIECFDSVEISGVEDRFNASLGTYHDLLKIIKDKDFLDNEENEDILEDIVLTLTLFEDREMIEERLKTYAHLFDDKVMKQLKRRRYTGWGRLSRKLINGIRDKQSGKTILDFLKSDGFANRNFMQLIHDDSLTFKEDIQKAQVSGQGDSLHEHIANLAGSPAIKKGILQTVKVVDELVKVMGRHKPENIVIEMARENQTTQKGQKNSRERMKRIEEGIKELGSQILKEHPVENTQLQNEKLYLYYLQNGRDMYVDQELDINRLSDYDVDHIVPQSFLKDDSIDNKVLTRSDKARGKSDNVPSEEVVKKMKNYWRQLLNAKLITQRKFDNLTKAERGGLSELDKAGFIKRQLVETRQITKHVAQILDSRMNTKYDENDKLIREVKVITLKSKLVSDFRKDFQFYKVREINNYHHAHDAYLNAVVGTALIKKYPKLESEFVYGDYKVYDVRKMIAKSEQEIGKATAKYFFYSNIMNFFKTEITLANGEIRKRPLIETNGETGEIVWDKGRDFATVRKVLSMPQVNIVKKTEVQTGGFSKESILPKRNSDKLIARKKDWDPKKYGGFDSPTVAYSVLVVAKVEKGKSKKLKSVKELLGITIMERSSFEKNPIDFLEAKGYKEVKKDLIIKLPKYSLFELENGRKRMLASAGELQKGNELALPSKYVNFLYLASHYEKLKGSPEDNEQKQLFVEQHKHYLDEIIEQISEFSKRVILADANLDKVLSAYNKHRDKPIREQAENIIHLFTLTNLGAPAAFKYFDTTIDRKRYTSTKEVLDATLIHQSITGLYETRIDLSQLGGDGGGSSPAPGGLLGRDLLTKLKAQIQFSTEGPQVTWEDRPAMCLVLNLEEEYRLHEKPVPPSIDPSWLQLFPMVWAEKAGMGLANQVPPVVVELKSDASPVAVRQYPMSKEAREGIRPHIQRFLDLGILVPCQSPWNTPLLPVKKPGTNDYRPVQDLREVNKRVQDIHPTVPNPYNLLSSLPPSHTWYSVLDLKDAFFCLKLHPNSQPLFAFEWRDPEKGNTGQLTWTRLPQGFKNSPTLFNEALHRDLASFRALNPQVVMLQYVDDLLVAAPTYRDCKEGTRRLLQELSKLGYRVSAKKAQLCREEVTYLGYLLKGGKRWLTPARKATVMKIPTPTTPRQVREFLGKAGFCRLFIPGFASLAAPLYPLTRPKVPFTWTEAHQEAFGRIKEALLSAPALALPDLTKPFALYVDEKEGVARGVLTQTLGPWRRPVAYLSKKLDPVASGWPTCLKAIAAVALLLKDADKLTLGQNVLVIAPHNLESIVRQPPDRWMTNARMTHYQSLLLNERVSFAPPAILNPATLLPVESDDTPIHICSEILAEETGTRPDLRDQPLPGVPAWYTDGSSFIMDGRRQAGAAIVDNKRTVWASNLPEGTSAQKAELIALTQALRLAEGKSINIYTDSRYAFATAHVHGAIYKQRGWLTSAGKDIKNKEEILALLEAIHLPKRVAIIHCPGHQRGTDPVATGNRKADEAAKQAAQSTRILTETTKNAGKRTADGSEFEKRTADGSEFESPKKKAKVE

SEQ ID NO: 1732 - protein, 2125 aa, synthetic construct
  source 1..2125: note = Description of Artificial Sequence: Synthetic polypeptide
MPAAKRVKLDGGDKKYSIGLDIGTNSVGWAVITDEYKVPSKKFKVLGNTDRHSIKKNLIGALLFDSGETAEATRLKRTARRRYTRRKNRICYLQEIFSNEMAKVDDSFFHRLEESFLVEEDKKHERHPIFGNIVDEVAYHEKYPTIYHLRKKLVDSTDKADLRLIYLALAHMIKFRGHFLIEGDLNPDNSDVDKLFIQLVQTYNQLFEENPINASGVDAKAILSARLSKSRRLENLIAQLPGEKKNGLFGNLIALSLGLTPNFKSNFDLAEDAKLQLSKDTYDDDLDNLLAQIGDQYADLFLAAKNLSDAILLSDILRVNTEITKAPLSASMIKRYDEHHQDLTLLKALVRQQLPEKYKEIFFDQSKNGYAGYIDGGASQEEFYKFIKPILEKMDGTEELLVKLNREDLLRKQRTFDNGSIPHQIHLGELHAILRRQEDFYPFLKDNREKIEKILTFRIPYYVGPLARGNSRFAWMTRKSEETITPWNFEEVVDKGASAQSFIERMTNFDKNLPNEKVLPKHSLLYEYFTVYNELTKVKYVTEGMRKPAFLSGEQKKAIVDLLFKTNRKVTVKQLKEDYFKKIECFDSVEISGVEDRFNASLGTYHDLLKIIKDKDFLDNEENEDILEDIVLTLTLFEDREMIEERLKTYAHLFDDKVMKQLKRRRYTGWGRLSRKLINGIRDKQSGKTILDFLKSDGFANRNFMQLIHDDSLTFKEDIQKAQVSGQGDSLHEHIANLAGSPAIKKGILQTVKVVDELVKVMGRHKPENIVIEMARENQTTQKGQKNSRERMKRIEEGIKELGSQILKEHPVENTQLQNEKLYLYYLQNGRDMYVDQELDINRLSDYDVDHIVPQSFLKDDSIDNKVLTRSDKARGKSDNVPSEEVVKKMKNYWRQLLNAKLITQRKFDNLTKAERGGLSELDKAGFIKRQLVETRQITKHVAQILDSRMNTKYDENDKLIREVKVITLKSKLVSDFRKDFQFYKVREINNYHHAHDAYLNAVVGTALIKKYPKLESEFVYGDYKVYDVRKMIAKSEQEIGKATAKYFFYSNIMNFFKTEITLANGEIRKRPLIETNGETGEIVWDKGRDFATVRKVLSMPQVNIVKKTEVQTGGFSKESILPKRNSDKLIARKKDWDPKKYGGFDSPTVAYSVLVVAKVEKGKSKKLKSVKELLGITIMERSSFEKNPIDFLEAKGYKEVKKDLIIKLPKYSLFELENGRKRMLASAGELQKGNELALPSKYVNFLYLASHYEKLKGSPEDNEQKQLFVEQHKHYLDEIIEQISEFSKRVILADANLDKVLSAYNKHRDKPIREQAENIIHLFTLTNLGAPAAFKYFDTTIDRKRYTSTKEVLDATLIHQSITGLYETRIDLSQLGGDGGGGSPAPGSSGGLLGRDLLTKLKAQIQFSTEGPQVTWEDRPAMCLVLNLEEEYRLHEKPVPPSIDPSWLQLFPMVWAEKAGMGLANQVPPVVVELKSDASPVAVRQYPMSKEAREGIRPHIQRFLDLGILVPCQSPWNTPLLPVKKPGTNDYRPVQDLREVNKRVQDIHPTVPNPYNLLSSLPPSHTWYSVLDLKDAFFCLKLHPNSQPLFAFEWRDPEKGNTGQLTWTRLPQGFKNSPTLFNEALHRDLASFRALNPQVVMLQYVDDLLVAAPTYRDCKEGTRRLLQELSKLGYRVSAKKAQLCREEVTYLGYLLKGGKRWLTPARKATVMKIPTPTTPRQVREFLGKAGFCRLFIPGFASLAAPLYPLTRPKVPFTWTEAHQEAFGRIKEALLSAPALALPDLTKPFALYVDEKEGVARGVLTQTLGPWRRPVAYLSKKLDPVASGWPTCLKAIAAVALLLKDADKLTLGQNVLVIAPHNLESIVRQPPDRWMTNARMTHYQSLLLNERVSFAPPAILNPATLLPVESDDTPIHICSEILAEETGTRPDLRDQPLPGVPAWYTDGSSFIMDGRRQAGAAIVDNKRTVWASNLPEGTSAQKAELIALTQALRLAEGKSINIYTDSRYAFATAHVHGAIYKQRGWLTSAGKDIKNKEEILALLEAIHLPKRVAIIHCPGHQRGTDPVATGNRKADEAAKQAAQSTRILTETTKNAGKRTADGSEFEKRTADGSEFESPKKKAKVE

SEQ ID NO: 1733 - protein, 2122 aa, synthetic construct
  source 1..2122: note = Description of Artificial Sequence: Synthetic polypeptide
MPAAKRVKLDGGDKKYSIGLDIGTNSVGWAVITDEYKVPSKKFKVLGNTDRHSIKKNLIGALLFDSGETAEATRLKRTARRRYTRRKNRICYLQEIFSNEMAKVDDSFFHRLEESFLVEEDKKHERHPIFGNIVDEVAYHEKYPTIYHLRKKLVDSTDKADLRLIYLALAHMIKFRGHFLIEGDLNPDNSDVDKLFIQLVQTYNQLFEENPINASGVDAKAILSARLSKSRRLENLIAQLPGEKKNGLFGNLIALSLGLTPNFKSNFDLAEDAKLQLSKDTYDDDLDNLLAQIGDQYADLFLAAKNLSDAILLSDILRVNTEITKAPLSASMIKRYDEHHQDLTLLKALVRQQLPEKYKEIFFDQSKNGYAGYIDGGASQEEFYKFIKPILEKMDGTEELLVKLNREDLLRKQRTFDNGSIPHQIHLGELHAILRRQEDFYPFLKDNREKIEKILTFRIPYYVGPLARGNSRFAWMTRKSEETITPWNFEEVVDKGASAQSFIERMTNFDKNLPNEKVLPKHSLLYEYFTVYNELTKVKYVTEGMRKPAFLSGEQKKAIVDLLFKTNRKVTVKQLKEDYFKKIECFDSVEISGVEDRFNASLGTYHDLLKIIKDKDFLDNEENEDILEDIVLTLTLFEDREMIEERLKTYAHLFDDKVMKQLKRRRYTGWGRLSRKLINGIRDKQSGKTILDFLKSDGFANRNFMQLIHDDSLTFKEDIQKAQVSGQGDSLHEHIANLAGSPAIKKGILQTVKVVDELVKVMGRHKPENIVIEMARENQTTQKGQKNSRERMKRIEEGIKELGSQILKEHPVENTQLQNEKLYLYYLQNGRDMYVDQELDINRLSDYDVDHIVPQSFLKDDSIDNKVLTRSDKARGKSDNVPSEEVVKKMKNYWRQLLNAKLITQRKFDNLTKAERGGLSELDKAGFIKRQLVETRQITKHVAQILDSRMNTKYDENDKLIREVKVITLKSKLVSDFRKDFQFYKVREINNYHHAHDAYLNAVVGTALIKKYPKLESEFVYGDYKVYDVRKMIAKSEQEIGKATAKYFFYSNIMNFFKTEITLANGEIRKRPLIETNGETGEIVWDKGRDFATVRKVLSMPQVNIVKKTEVQTGGFSKESILPKRNSDKLIARKKDWDPKKYGGFDSPTVAYSVLVVAKVEKGKSKKLKSVKELLGITIMERSSFEKNPIDFLEAKGYKEVKKDLIIKLPKYSLFELENGRKRMLASAGELQKGNELALPSKYVNFLYLASHYEKLKGSPEDNEQKQLFVEQHKHYLDEIIEQISEFSKRVILADANLDKVLSAYNKHRDKPIREQAENIIHLFTLTNLGAPAAFKYFDTTIDRKRYTSTKEVLDATLIHQSITGLYETRIDLSQLGGDGGGGSGSSGGLLGRDLLTKLKAQIQFSTEGPQVTWEDRPAMCLVLNLEEEYRLHEKPVPPSIDPSWLQLFPMVWAEKAGMGLANQVPPVVVELKSDASPVAVRQYPMSKEAREGIRPHIQRFLDLGILVPCQSPWNTPLLPVKKPGTNDYRPVQDLREVNKRVQDIHPTVPNPYNLLSSLPPSHTWYSVLDLKDAFFCLKLHPNSQPLFAFEWRDPEKGNTGQLTWTRLPQGFKNSPTLFNEALHRDLASFRALNPQVVMLQYVDDLLVAAPTYRDCKEGTRRLLQELSKLGYRVSAKKAQLCREEVTYLGYLLKGGKRWLTPARKATVMKIPTPTTPRQVREFLGKAGFCRLFIPGFASLAAPLYPLTRPKVPFTWTEAHQEAFGRIKEALLSAPALALPDLTKPFALYVDEKEGVARGVLTQTLGPWRRPVAYLSKKLDPVASGWPTCLKAIAAVALLLKDADKLTLGQNVLVIAPHNLESIVRQPPDRWMTNARMTHYQSLLLNERVSFAPPAILNPATLLPVESDDTPIHICSEILAEETGTRPDLRDQPLPGVPAWYTDGSSFIMDGRRQAGAAIVDNKRTVWASNLPEGTSAQKAELIALTQALRLAEGKSINIYTDSRYAFATAHVHGAIYKQRGWLTSAGKDIKNKEEILALLEAIHLPKRVAIIHCPGHQRGTDPVATGNRKADEAAKQAAQSTRILTETTKNAGKRTADGSEFEKRTADGSEFESPKKKAKVE

SEQ ID NO: 1734 - protein, 2125 aa, synthetic construct
  source 1..2125: note = Description of Artificial Sequence: Synthetic polypeptide
MPAAKRVKLDGGDKKYSIGLDIGTNSVGWAVITDEYKVPSKKFKVLGNTDRHSIKKNLIGALLFDSGETAEATRLKRTARRRYTRRKNRICYLQEIFSNEMAKVDDSFFHRLEESFLVEEDKKHERHPIFGNIVDEVAYHEKYPTIYHLRKKLVDSTDKADLRLIYLALAHMIKFRGHFLIEGDLNPDNSDVDKLFIQLVQTYNQLFEENPINASGVDAKAILSARLSKSRRLENLIAQLPGEKKNGLFGNLIALSLGLTPNFKSNFDLAEDAKLQLSKDTYDDDLDNLLAQIGDQYADLFLAAKNLSDAILLSDILRVNTEITKAPLSASMIKRYDEHHQDLTLLKALVRQQLPEKYKEIFFDQSKNGYAGYIDGGASQEEFYKFIKPILEKMDGTEELLVKLNREDLLRKQRTFDNGSIPHQIHLGELHAILRRQEDFYPFLKDNREKIEKILTFRIPYYVGPLARGNSRFAWMTRKSEETITPWNFEEVVDKGASAQSFIERMTNFDKNLPNEKVLPKHSLLYEYFTVYNELTKVKYVTEGMRKPAFLSGEQKKAIVDLLFKTNRKVTVKQLKEDYFKKIECFDSVEISGVEDRFNASLGTYHDLLKIIKDKDFLDNEENEDILEDIVLTLTLFEDREMIEERLKTYAHLFDDKVMKQLKRRRYTGWGRLSRKLINGIRDKQSGKTILDFLKSDGFANRNFMQLIHDDSLTFKEDIQKAQVSGQGDSLHEHIANLAGSPAIKKGILQTVKVVDELVKVMGRHKPENIVIEMARENQTTQKGQKNSRERMKRIEEGIKELGSQILKEHPVENTQLQNEKLYLYYLQNGRDMYVDQELDINRLSDYDVDHIVPQSFLKDDSIDNKVLTRSDKARGKSDNVPSEEVVKKMKNYWRQLLNAKLITQRKFDNLTKAERGGLSELDKAGFIKRQLVETRQITKHVAQILDSRMNTKYDENDKLIREVKVITLKSKLVSDFRKDFQFYKVREINNYHHAHDAYLNAVVGTALIKKYPKLESEFVYGDYKVYDVRKMIAKSEQEIGKATAKYFFYSNIMNFFKTEITLANGEIRKRPLIETNGETGEIVWDKGRDFATVRKVLSMPQVNIVKKTEVQTGGFSKESILPKRNSDKLIARKKDWDPKKYGGFDSPTVAYSVLVVAKVEKGKSKKLKSVKELLGITIMERSSFEKNPIDFLEAKGYKEVKKDLIIKLPKYSLFELENGRKRMLASAGELQKGNELALPSKYVNFLYLASHYEKLKGSPEDNEQKQLFVEQHKHYLDEIIEQISEFSKRVILADANLDKVLSAYNKHRDKPIREQAENIIHLFTLTNLGAPAAFKYFDTTIDRKRYTSTKEVLDATLIHQSITGLYETRIDLSQLGGDGGGGGGSSPAPGGLLGRDLLTKLKAQIQFSTEGPQVTWEDRPAMCLVLNLEEEYRLHEKPVPPSIDPSWLQLFPMVWAEKAGMGLANQVPPVVVELKSDASPVAVRQYPMSKEAREGIRPHIQRFLDLGILVPCQSPWNTPLLPVKKPGTNDYRPVQDLREVNKRVQDIHPTVPNPYNLLSSLPPSHTWYSVLDLKDAFFCLKLHPNSQPLFAFEWRDPEKGNTGQLTWTRLPQGFKNSPTLFNEALHRDLASFRALNPQVVMLQYVDDLLVAAPTYRDCKEGTRRLLQELSKLGYRVSAKKAQLCREEVTYLGYLLKGGKRWLTPARKATVMKIPTPTTPRQVREFLGKAGFCRLFIPGFASLAAPLYPLTRPKVPFTWTEAHQEAFGRIKEALLSAPALALPDLTKPFALYVDEKEGVARGVLTQTLGPWRRPVAYLSKKLDPVASGWPTCLKAIAAVALLLKDADKLTLGQNVLVIAPHNLESIVRQPPDRWMTNARMTHYQSLLLNERVSFAPPAILNPATLLPVESDDTPIHICSEILAEETGTRPDLRDQPLPGVPAWYTDGSSFIMDGRRQAGAAIVDNKRTVWASNLPEGTSAQKAELIALTQALRLAEGKSINIYTDSRYAFATAHVHGAIYKQRGWLTSAGKDIKNKEEILALLEAIHLPKRVAIIHCPGHQRGTDPVATGNRKADEAAKQAAQSTRILTETTKNAGKRTADGSEFEKRTADGSEFESPKKKAKVE

SEQ ID NO: 1735 - protein, 2125 aa, synthetic construct
  source 1..2125: note = Description of Artificial Sequence: Synthetic polypeptide
MPAAKRVKLDGGDKKYSIGLDIGTNSVGWAVITDEYKVPSKKFKVLGNTDRHSIKKNLIGALLFDSGETAEATRLKRTARRRYTRRKNRICYLQEIFSNEMAKVDDSFFHRLEESFLVEEDKKHERHPIFGNIVDEVAYHEKYPTIYHLRKKLVDSTDKADLRLIYLALAHMIKFRGHFLIEGDLNPDNSDVDKLFIQLVQTYNQLFEENPINASGVDAKAILSARLSKSRRLENLIAQLPGEKKNGLFGNLIALSLGLTPNFKSNFDLAEDAKLQLSKDTYDDDLDNLLAQIGDQYADLFLAAKNLSDAILLSDILRVNTEITKAPLSASMIKRYDEHHQDLTLLKALVRQQLPEKYKEIFFDQSKNGYAGYIDGGASQEEFYKFIKPILEKMDGTEELLVKLNREDLLRKQRTFDNGSIPHQIHLGELHAILRRQEDFYPFLKDNREKIEKILTFRIPYYVGPLARGNSRFAWMTRKSEETITPWNFEEVVDKGASAQSFIERMTNFDKNLPNEKVLPKHSLLYEYFTVYNELTKVKYVTEGMRKPAFLSGEQKKAIVDLLFKTNRKVTVKQLKEDYFKKIECFDSVEISGVEDRFNASLGTYHDLLKIIKDKDFLDNEENEDILEDIVLTLTLFEDREMIEERLKTYAHLFDDKVMKQLKRRRYTGWGRLSRKLINGIRDKQSGKTILDFLKSDGFANRNFMQLIHDDSLTFKEDIQKAQVSGQGDSLHEHIANLAGSPAIKKGILQTVKVVDELVKVMGRHKPENIVIEMARENQTTQKGQKNSRERMKRIEEGIKELGSQILKEHPVENTQLQNEKLYLYYLQNGRDMYVDQELDINRLSDYDVDHIVPQSFLKDDSIDNKVLTRSDKARGKSDNVPSEEVVKKMKNYWRQLLNAKLITQRKFDNLTKAERGGLSELDKAGFIKRQLVETRQITKHVAQILDSRMNTKYDENDKLIREVKVITLKSKLVSDFRKDFQFYKVREINNYHHAHDAYLNAVVGTALIKKYPKLESEFVYGDYKVYDVRKMIAKSEQEIGKATAKYFFYSNIMNFFKTEITLANGEIRKRPLIETNGETGEIVWDKGRDFATVRKVLSMPQVNIVKKTEVQTGGFSKESILPKRNSDKLIARKKDWDPKKYGGFDSPTVAYSVLVVAKVEKGKSKKLKSVKELLGITIMERSSFEKNPIDFLEAKGYKEVKKDLIIKLPKYSLFELENGRKRMLASAGELQKGNELALPSKYVNFLYLASHYEKLKGSPEDNEQKQLFVEQHKHYLDEIIEQISEFSKRVILADANLDKVLSAYNKHRDKPIREQAENIIHLFTLTNLGAPAAFKYFDTTIDRKRYTSTKEVLDATLIHQSITGLYETRIDLSQLGGDGGGSSGGSPAPGGLLGRDLLTKLKAQIQFSTEGPQVTWEDRPAMCLVLNLEEEYRLHEKPVPPSIDPSWLQLFPMVWAEKAGMGLANQVPPVVVELKSDASPVAVRQYPMSKEAREGIRPHIQRFLDLGILVPCQSPWNTPLLPVKKPGTNDYRPVQDLREVNKRVQDIHPTVPNPYNLLSSLPPSHTWYSVLDLKDAFFCLKLHPNSQPLFAFEWRDPEKGNTGQLTWTRLPQGFKNSPTLFNEALHRDLASFRALNPQVVMLQYVDDLLVAAPTYRDCKEGTRRLLQELSKLGYRVSAKKAQLCREEVTYLGYLLKGGKRWLTPARKATVMKIPTPTTPRQVREFLGKAGFCRLFIPGFASLAAPLYPLTRPKVPFTWTEAHQEAFGRIKEALLSAPALALPDLTKPFALYVDEKEGVARGVLTQTLGPWRRPVAYLSKKLDPVASGWPTCLKAIAAVALLLKDADKLTLGQNVLVIAPHNLESIVRQPPDRWMTNARMTHYQSLLLNERVSFAPPAILNPATLLPVESDDTPIHICSEILAEETGTRPDLRDQPLPGVPAWYTDGSSFIMDGRRQAGAAIVDNKRTVWASNLPEGTSAQKAELIALTQALRLAEGKSINIYTDSRYAFATAHVHGAIYKQRGWLTSAGKDIKNKEEILALLEAIHLPKRVAIIHCPGHQRGTDPVATGNRKADEAAKQAAQSTRILTETTKNAGKRTADGSEFEKRTADGSEFESPKKKAKVE

SEQ ID NO: 1736 - protein, 2127 aa, synthetic construct
  source 1..2127: note = Description of Artificial Sequence: Synthetic polypeptide
MPAAKRVKLDGGDKKYSIGLDIGTNSVGWAVITDEYKVPSKKFKVLGNTDRHSIKKNLIGALLFDSGETAEATRLKRTARRRYTRRKNRICYLQEIFSNEMAKVDDSFFHRLEESFLVEEDKKHERHPIFGNIVDEVAYHEKYPTIYHLRKKLVDSTDKADLRLIYLALAHMIKFRGHFLIEGDLNPDNSDVDKLFIQLVQTYNQLFEENPINASGVDAKAILSARLSKSRRLENLIAQLPGEKKNGLFGNLIALSLGLTPNFKSNFDLAEDAKLQLSKDTYDDDLDNLLAQIGDQYADLFLAAKNLSDAILLSDILRVNTEITKAPLSASMIKRYDEHHQDLTLLKALVRQQLPEKYKEIFFDQSKNGYAGYIDGGASQEEFYKFIKPILEKMDGTEELLVKLNREDLLRKQRTFDNGSIPHQIHLGELHAILRRQEDFYPFLKDNREKIEKILTFRIPYYVGPLARGNSRFAWMTRKSEETITPWNFEEVVDKGASAQSFIERMTNFDKNLPNEKVLPKHSLLYEYFTVYNELTKVKYVTEGMRKPAFLSGEQKKAIVDLLFKTNRKVTVKQLKEDYFKKIECFDSVEISGVEDRFNASLGTYHDLLKIIKDKDFLDNEENEDILEDIVLTLTLFEDREMIEERLKTYAHLFDDKVMKQLKRRRYTGWGRLSRKLINGIRDKQSGKTILDFLKSDGFANRNFMQLIHDDSLTFKEDIQKAQVSGQGDSLHEHIANLAGSPAIKKGILQTVKVVDELVKVMGRHKPENIVIEMARENQTTQKGQKNSRERMKRIEEGIKELGSQILKEHPVENTQLQNEKLYLYYLQNGRDMYVDQELDINRLSDYDVDHIVPQSFLKDDSIDNKVLTRSDKARGKSDNVPSEEVVKKMKNYWRQLLNAKLITQRKFDNLTKAERGGLSELDKAGFIKRQLVETRQITKHVAQILDSRMNTKYDENDKLIREVKVITLKSKLVSDFRKDFQFYKVREINNYHHAHDAYLNAVVGTALIKKYPKLESEFVYGDYKVYDVRKMIAKSEQEIGKATAKYFFYSNIMNFFKTEITLANGEIRKRPLIETNGETGEIVWDKGRDFATVRKVLSMPQVNIVKKTEVQTGGFSKESILPKRNSDKLIARKKDWDPKKYGGFDSPTVAYSVLVVAKVEKGKSKKLKSVKELLGITIMERSSFEKNPIDFLEAKGYKEVKKDLIIKLPKYSLFELENGRKRMLASAGELQKGNELALPSKYVNFLYLASHYEKLKGSPEDNEQKQLFVEQHKHYLDEIIEQISEFSKRVILADANLDKVLSAYNKHRDKPIREQAENIIHLFTLTNLGAPAAFKYFDTTIDRKRYTSTKEVLDATLIHQSITGLYETRIDLSQLGGDGGEAAAKGGGGGSGGLLGRDLLTKLKAQIQFSTEGPQVTWEDRPAMCLVLNLEEEYRLHEKPVPPSIDPSWLQLFPMVWAEKAGMGLANQVPPVVVELKSDASPVAVRQYPMSKEAREGIRPHIQRFLDLGILVPCQSPWNTPLLPVKKPGTNDYRPVQDLREVNKRVQDIHPTVPNPYNLLSSLPPSHTWYSVLDLKDAFFCLKLHPNSQPLFAFEWRDPEKGNTGQLTWTRLPQGFKNSPTLFNEALHRDLASFRALNPQVVMLQYVDDLLVAAPTYRDCKEGTRRLLQELSKLGYRVSAKKAQLCREEVTYLGYLLKGGKRWLTPARKATVMKIPTPTTPRQVREFLGKAGFCRLFIPGFASLAAPLYPLTRPKVPFTWTEAHQEAFGRIKEALLSAPALALPDLTKPFALYVDEKEGVARGVLTQTLGPWRRPVAYLSKKLDPVASGWPTCLKAIAAVALLLKDADKLTLGQNVLVIAPHNLESIVRQPPDRWMTNARMTHYQSLLLNERVSFAPPAILNPATLLPVESDDTPIHICSEILAEETGTRPDLRDQPLPGVPAWYTDGSSFIMDGRRQAGAAIVDNKRTVWASNLPEGTSAQKAELIALTQALRLAEGKSINIYTDSRYAFATAHVHGAIYKQRGWLTSAGKDIKNKEEILALLEAIHLPKRVAIIHCPGHQRGTDPVATGNRKADEAAKQAAQSTRILTETTKNAGKRTADGSEFEKRTADGSEFESPKKKAKVE

SEQ ID NO: 1737 - protein, 2127 aa, synthetic construct
  source 1..2127: note = Description of Artificial Sequence: Synthetic polypeptide
MPAAKRVKLDGGDKKYSIGLDIGTNSVGWAVITDEYKVPSKKFKVLGNTDRHSIKKNLIGALLFDSGETAEATRLKRTARRRYTRRKNRICYLQEIFSNEMAKVDDSFFHRLEESFLVEEDKKHERHPIFGNIVDEVAYHEKYPTIYHLRKKLVDSTDKADLRLIYLALAHMIKFRGHFLIEGDLNPDNSDVDKLFIQLVQTYNQLFEENPINASGVDAKAILSARLSKSRRLENLIAQLPGEKKNGLFGNLIALSLGLTPNFKSNFDLAEDAKLQLSKDTYDDDLDNLLAQIGDQYADLFLAAKNLSDAILLSDILRVNTEITKAPLSASMIKRYDEHHQDLTLLKALVRQQLPEKYKEIFFDQSKNGYAGYIDGGASQEEFYKFIKPILEKMDGTEELLVKLNREDLLRKQRTFDNGSIPHQIHLGELHAILRRQEDFYPFLKDNREKIEKILTFRIPYYVGPLARGNSRFAWMTRKSEETITPWNFEEVVDKGASAQSFIERMTNFDKNLPNEKVLPKHSLLYEYFTVYNELTKVKYVTEGMRKPAFLSGEQKKAIVDLLFKTNRKVTVKQLKEDYFKKIECFDSVEISGVEDRFNASLGTYHDLLKIIKDKDFLDNEENEDILEDIVLTLTLFEDREMIEERLKTYAHLFDDKVMKQLKRRRYTGWGRLSRKLINGIRDKQSGKTILDFLKSDGFANRNFMQLIHDDSLTFKEDIQKAQVSGQGDSLHEHIANLAGSPAIKKGILQTVKVVDELVKVMGRHKPENIVIEMARENQTTQKGQKNSRERMKRIEEGIKELGSQILKEHPVENTQLQNEKLYLYYLQNGRDMYVDQELDINRLSDYDVDHIVPQSFLKDDSIDNKVLTRSDKARGKSDNVPSEEVVKKMKNYWRQLLNAKLITQRKFDNLTKAERGGLSELDKAGFIKRQLVETRQITKHVAQILDSRMNTKYDENDKLIREVKVITLKSKLVSDFRKDFQFYKVREINNYHHAHDAYLNAVVGTALIKKYPKLESEFVYGDYKVYDVRKMIAKSEQEIGKATAKYFFYSNIMNFFKTEITLANGEIRKRPLIETNGETGEIVWDKGRDFATVRKVLSMPQVNIVKKTEVQTGGFSKESILPKRNSDKLIARKKDWDPKKYGGFDSPTVAYSVLVVAKVEKGKSKKLKSVKELLGITIMERSSFEKNPIDFLEAKGYKEVKKDLIIKLPKYSLFELENGRKRMLASAGELQKGNELALPSKYVNFLYLASHYEKLKGSPEDNEQKQLFVEQHKHYLDEIIEQISEFSKRVILADANLDKVLSAYNKHRDKPIREQAENIIHLFTLTNLGAPAAFKYFDTTIDRKRYTSTKEVLDATLIHQSITGLYETRIDLSQLGGDGGGSSEAAAKGGGGGLLGRDLLTKLKAQIQFSTEGPQVTWEDRPAMCLVLNLEEEYRLHEKPVPPSIDPSWLQLFPMVWAEKAGMGLANQVPPVVVELKSDASPVAVRQYPMSKEAREGIRPHIQRFLDLGILVPCQSPWNTPLLPVKKPGTNDYRPVQDLREVNKRVQDIHPTVPNPYNLLSSLPPSHTWYSVLDLKDAFFCLKLHPNSQPLFAFEWRDPEKGNTGQLTWTRLPQGFKNSPTLFNEALHRDLASFRALNPQVVMLQYVDDLLVAAPTYRDCKEGTRRLLQELSKLGYRVSAKKAQLCREEVTYLGYLLKGGKRWLTPARKATVMKIPTPTTPRQVREFLGKAGFCRLFIPGFASLAAPLYPLTRPKVPFTWTEAHQEAFGRIKEALLSAPALALPDLTKPFALYVDEKEGVARGVLTQTLGPWRRPVAYLSKKLDPVASGWPTCLKAIAAVALLLKDADKLTLGQNVLVIAPHNLESIVRQPPDRWMTNARMTHYQSLLLNERVSFAPPAILNPATLLPVESDDTPIHICSEILAEETGTRPDLRDQPLPGVPAWYTDGSSFIMDGRRQAGAAIVDNKRTVWASNLPEGTSAQKAELIALTQALRLAEGKSINIYTDSRYAFATAHVHGAIYKQRGWLTSAGKDIKNKEEILALLEAIHLPKRVAIIHCPGHQRGTDPVATGNRKADEAAKQAAQSTRILTETTKNAGKRTADGSEFEKRTADGSEFESPKKKAKVE

SEQ ID NO: 1738 - protein, 2125 aa, synthetic construct
  source 1..2125: note = Description of Artificial Sequence: Synthetic polypeptide
MPAAKRVKLDGGDKKYSIGLDIGTNSVGWAVITDEYKVPSKKFKVLGNTDRHSIKKNLIGALLFDSGETAEATRLKRTARRRYTRRKNRICYLQEIFSNEMAKVDDSFFHRLEESFLVEEDKKHERHPIFGNIVDEVAYHEKYPTIYHLRKKLVDSTDKADLRLIYLALAHMIKFRGHFLIEGDLNPDNSDVDKLFIQLVQTYNQLFEENPINASGVDAKAILSARLSKSRRLENLIAQLPGEKKNGLFGNLIALSLGLTPNFKSNFDLAEDAKLQLSKDTYDDDLDNLLAQIGDQYADLFLAAKNLSDAILLSDILRVNTEITKAPLSASMIKRYDEHHQDLTLLKALVRQQLPEKYKEIFFDQSKNGYAGYIDGGASQEEFYKFIKPILEKMDGTEELLVKLNREDLLRKQRTFDNGSIPHQIHLGELHAILRRQEDFYPFLKDNREKIEKILTFRIPYYVGPLARGNSRFAWMTRKSEETITPWNFEEVVDKGASAQSFIERMTNFDKNLPNEKVLPKHSLLYEYFTVYNELTKVKYVTEGMRKPAFLSGEQKKAIVDLLFKTNRKVTVKQLKEDYFKKIECFDSVEISGVEDRFNASLGTYHDLLKIIKDKDFLDNEENEDILEDIVLTLTLFEDREMIEERLKTYAHLFDDKVMKQLKRRRYTGWGRLSRKLINGIRDKQSGKTILDFLKSDGFANRNFMQLIHDDSLTFKEDIQKAQVSGQGDSLHEHIANLAGSPAIKKGILQTVKVVDELVKVMGRHKPENIVIEMARENQTTQKGQKNSRERMKRIEEGIKELGSQILKEHPVENTQLQNEKLYLYYLQNGRDMYVDQELDINRLSDYDVDHIVPQSFLKDDSIDNKVLTRSDKARGKSDNVPSEEVVKKMKNYWRQLLNAKLITQRKFDNLTKAERGGLSELDKAGFIKRQLVETRQITKHVAQILDSRMNTKYDENDKLIREVKVITLKSKLVSDFRKDFQFYKVREINNYHHAHDAYLNAVVGTALIKKYPKLESEFVYGDYKVYDVRKMIAKSEQEIGKATAKYFFYSNIMNFFKTEITLANGEIRKRPLIETNGETGEIVWDKGRDFATVRKVLSMPQVNIVKKTEVQTGGFSKESILPKRNSDKLIARKKDWDPKKYGGFDSPTVAYSVLVVAKVEKGKSKKLKSVKELLGITIMERSSFEKNPIDFLEAKGYKEVKKDLIIKLPKYSLFELENGRKRMLASAGELQKGNELALPSKYVNFLYLASHYEKLKGSPEDNEQKQLFVEQHKHYLDEIIEQISEFSKRVILADANLDKVLSAYNKHRDKPIREQAENIIHLFTLTNLGAPAAFKYFDTTIDRKRYTSTKEVLDATLIHQSITGLYETRIDLSQLGGDGGGSSPAPGGSGGLLGRDLLTKLKAQIQFSTEGPQVTWEDRPAMCLVLNLEEEYRLHEKPVPPSIDPSWLQLFPMVWAEKAGMGLANQVPPVVVELKSDASPVAVRQYPMSKEAREGIRPHIQRFLDLGILVPCQSPWNTPLLPVKKPGTNDYRPVQDLREVNKRVQDIHPTVPNPYNLLSSLPPSHTWYSVLDLKDAFFCLKLHPNSQPLFAFEWRDPEKGNTGQLTWTRLPQGFKNSPTLFNEALHRDLASFRALNPQVVMLQYVDDLLVAAPTYRDCKEGTRRLLQELSKLGYRVSAKKAQLCREEVTYLGYLLKGGKRWLTPARKATVMKIPTPTTPRQVREFLGKAGFCRLFIPGFASLAAPLYPLTRPKVPFTWTEAHQEAFGRIKEALLSAPALALPDLTKPFALYVDEKEGVARGVLTQTLGPWRRPVAYLSKKLDPVASGWPTCLKAIAAVALLLKDADKLTLGQNVLVIAPHNLESIVRQPPDRWMTNARMTHYQSLLLNERVSFAPPAILNPATLLPVESDDTPIHICSEILAEETGTRPDLRDQPLPGVPAWYTDGSSFIMDGRRQAGAAIVDNKRTVWASNLPEGTSAQKAELIALTQALRLAEGKSINIYTDSRYAFATAHVHGAIYKQRGWLTSAGKDIKNKEEILALLEAIHLPKRVAIIHCPGHQRGTDPVATGNRKADEAAKQAAQSTRILTETTKNAGKRTADGSEFEKRTADGSEFESPKKKAKVE

SEQ ID NO: 1739 - protein, 2131 aa, synthetic construct
  source 1..2131: note = Description of Artificial Sequence: Synthetic polypeptide
MPAAKRVKLDGGDKKYSIGLDIGTNSVGWAVITDEYKVPSKKFKVLGNTDRHSIKKNLIGALLFDSGETAEATRLKRTARRRYTRRKNRICYLQEIFSNEMAKVDDSFFHRLEESFLVEEDKKHERHPIFGNIVDEVAYHEKYPTIYHLRKKLVDSTDKADLRLIYLALAHMIKFRGHFLIEGDLNPDNSDVDKLFIQLVQTYNQLFEENPINASGVDAKAILSARLSKSRRLENLIAQLPGEKKNGLFGNLIALSLGLTPNFKSNFDLAEDAKLQLSKDTYDDDLDNLLAQIGDQYADLFLAAKNLSDAILLSDILRVNTEITKAPLSASMIKRYDEHHQDLTLLKALVRQQLPEKYKEIFFDQSKNGYAGYIDGGASQEEFYKFIKPILEKMDGTEELLVKLNREDLLRKQRTFDNGSIPHQIHLGELHAILRRQEDFYPFLKDNREKIEKILTFRIPYYVGPLARGNSRFAWMTRKSEETITPWNFEEVVDKGASAQSFIERMTNFDKNLPNEKVLPKHSLLYEYFTVYNELTKVKYVTEGMRKPAFLSGEQKKAIVDLLFKTNRKVTVKQLKEDYFKKIECFDSVEISGVEDRFNASLGTYHDLLKIIKDKDFLDNEENEDILEDIVLTLTLFEDREMIEERLKTYAHLFDDKVMKQLKRRRYTGWGRLSRKLINGIRDKQSGKTILDFLKSDGFANRNFMQLIHDDSLTFKEDIQKAQVSGQGDSLHEHIANLAGSPAIKKGILQTVKVVDELVKVMGRHKPENIVIEMARENQTTQKGQKNSRERMKRIEEGIKELGSQILKEHPVENTQLQNEKLYLYYLQNGRDMYVDQELDINRLSDYDVDHIVPQSFLKDDSIDNKVLTRSDKARGKSDNVPSEEVVKKMKNYWRQLLNAKLITQRKFDNLTKAERGGLSELDKAGFIKRQLVETRQITKHVAQILDSRMNTKYDENDKLIREVKVITLKSKLVSDFRKDFQFYKVREINNYHHAHDAYLNAVVGTALIKKYPKLESEFVYGDYKVYDVRKMIAKSEQEIGKATAKYFFYSNIMNFFKTEITLANGEIRKRPLIETNGETGEIVWDKGRDFATVRKVLSMPQVNIVKKTEVQTGGFSKESILPKRNSDKLIARKKDWDPKKYGGFDSPTVAYSVLVVAKVEKGKSKKLKSVKELLGITIMERSSFEKNPIDFLEAKGYKEVKKDLIIKLPKYSLFELENGRKRMLASAGELQKGNELALPSKYVNFLYLASHYEKLKGSPEDNEQKQLFVEQHKHYLDEIIEQISEFSKRVILADANLDKVLSAYNKHRDKPIREQAENIIHLFTLTNLGAPAAFKYFDTTIDRKRYTSTKEVLDATLIHQSITGLYETRIDLSQLGGDGGGGGGSEAAAKGGGGSGGLLGRDLLTKLKAQIQFSTEGPQVTWEDRPAMCLVLNLEEEYRLHEKPVPPSIDPSWLQLFPMVWAEKAGMGLANQVPPVVVELKSDASPVAVRQYPMSKEAREGIRPHIQRFLDLGILVPCQSPWNTPLLPVKKPGTNDYRPVQDLREVNKRVQDIHPTVPNPYNLLSSLPPSHTWYSVLDLKDAFFCLKLHPNSQPLFAFEWRDPEKGNTGQLTWTRLPQGFKNSPTLFNEALHRDLASFRALNPQVVMLQYVDDLLVAAPTYRDCKEGTRRLLQELSKLGYRVSAKKAQLCREEVTYLGYLLKGGKRWLTPARKATVMKIPTPTTPRQVREFLGKAGFCRLFIPGFASLAAPLYPLTRPKVPFTWTEAHQEAFGRIKEALLSAPALALPDLTKPFALYVDEKEGVARGVLTQTLGPWRRPVAYLSKKLDPVASGWPTCLKAIAAVALLLKDADKLTLGQNVLVIAPHNLESIVRQPPDRWMTNARMTHYQSLLLNERVSFAPPAILNPATLLPVESDDTPIHICSEILAEETGTRPDLRDQPLPGVPAWYTDGSSFIMDGRRQAGAAIVDNKRTVWASNLPEGTSAQKAELIALTQALRLAEGKSINIYTDSRYAFATAHVHGAIYKQRGWLTSAGKDIKNKEEILALLEAIHLPKRVAIIHCPGHQRGTDPVATGNRKADEAAKQAAQSTRILTETTKNAGKRTADGSEFEKRTADGSEFESPKKKAKVE

SEQ ID NO: 1740 - protein, 2125 aa, synthetic construct
  source 1..2125: note = Description of Artificial Sequence: Synthetic polypeptide
MPAAKRVKLDGGDKKYSIGLDIGTNSVGWAVITDEYKVPSKKFKVLGNTDRHSIKKNLIGALLFDSGETAEATRLKRTARRRYTRRKNRICYLQEIFSNEMAKVDDSFFHRLEESFLVEEDKKHERHPIFGNIVDEVAYHEKYPTIYHLRKKLVDSTDKADLRLIYLALAHMIKFRGHFLIEGDLNPDNSDVDKLFIQLVQTYNQLFEENPINASGVDAKAILSARLSKSRRLENLIAQLPGEKKNGLFGNLIALSLGLTPNFKSNFDLAEDAKLQLSKDTYDDDLDNLLAQIGDQYADLFLAAKNLSDAILLSDILRVNTEITKAPLSASMIKRYDEHHQDLTLLKALVRQQLPEKYKEIFFDQSKNGYAGYIDGGASQEEFYKFIKPILEKMDGTEELLVKLNREDLLRKQRTFDNGSIPHQIHLGELHAILRRQEDFYPFLKDNREKIEKILTFRIPYYVGPLARGNSRFAWMTRKSEETITPWNFEEVVDKGASAQSFIERMTNFDKNLPNEKVLPKHSLLYEYFTVYNELTKVKYVTEGMRKPAFLSGEQKKAIVDLLFKTNRKVTVKQLKEDYFKKIECFDSVEISGVEDRFNASLGTYHDLLKIIKDKDFLDNEENEDILEDIVLTLTLFEDREMIEERLKTYAHLFDDKVMKQLKRRRYTGWGRLSRKLINGIRDKQSGKTILDFLKSDGFANRNFMQLIHDDSLTFKEDIQKAQVSGQGDSLHEHIANLAGSPAIKKGILQTVKVVDELVKVMGRHKPENIVIEMARENQTTQKGQKNSRERMKRIEEGIKELGSQILKEHPVENTQLQNEKLYLYYLQNGRDMYVDQELDINRLSDYDVDHIVPQSFLKDDSIDNKVLTRSDKARGKSDNVPSEEVVKKMKNYWRQLLNAKLITQRKFDNLTKAERGGLSELDKAGFIKRQLVETRQITKHVAQILDSRMNTKYDENDKLIREVKVITLKSKLVSDFRKDFQFYKVREINNYHHAHDAYLNAVVGTALIKKYPKLESEFVYGDYKVYDVRKMIAKSEQEIGKATAKYFFYSNIMNFFKTEITLANGEIRKRPLIETNGETGEIVWDKGRDFATVRKVLSMPQVNIVKKTEVQTGGFSKESILPKRNSDKLIARKKDWDPKKYGGFDSPTVAYSVLVVAKVEKGKSKKLKSVKELLGITIMERSSFEKNPIDFLEAKGYKEVKKDLIIKLPKYSLFELENGRKRMLASAGELQKGNELALPSKYVNFLYLASHYEKLKGSPEDNEQKQLFVEQHKHYLDEIIEQISEFSKRVILADANLDKVLSAYNKHRDKPIREQAENIIHLFTLTNLGAPAAFKYFDTTIDRKRYTSTKEVLDATLIHQSITGLYETRIDLSQLGGDGGPAPGGSGGGGGLLGRDLLTKLKAQIQFSTEGPQVTWEDRPAMCLVLNLEEEYRLHEKPVPPSIDPSWLQLFPMVWAEKAGMGLANQVPPVVVELKSDASPVAVRQYPMSKEAREGIRPHIQRFLDLGILVPCQSPWNTPLLPVKKPGTNDYRPVQDLREVNKRVQDIHPTVPNPYNLLSSLPPSHTWYSVLDLKDAFFCLKLHPNSQPLFAFEWRDPEKGNTGQLTWTRLPQGFKNSPTLFNEALHRDLASFRALNPQVVMLQYVDDLLVAAPTYRDCKEGTRRLLQELSKLGYRVSAKKAQLCREEVTYLGYLLKGGKRWLTPARKATVMKIPTPTTPRQVREFLGKAGFCRLFIPGFASLAAPLYPLTRPKVPFTWTEAHQEAFGRIKEALLSAPALALPDLTKPFALYVDEKEGVARGVLTQTLGPWRRPVAYLSKKLDPVASGWPTCLKAIAAVALLLKDADKLTLGQNVLVIAPHNLESIVRQPPDRWMTNARMTHYQSLLLNERVSFAPPAILNPATLLPVESDDTPIHICSEILAEETGTRPDLRDQPLPGVPAWYTDGSSFIMDGRRQAGAAIVDNKRTVWASNLPEGTSAQKAELIALTQALRLAEGKSINIYTDSRYAFATAHVHGAIYKQRGWLTSAGKDIKNKEEILALLEAIHLPKRVAIIHCPGHQRGTDPVATGNRKADEAAKQAAQSTRILTETTKNAGKRTADGSEFEKRTADGSEFESPKKKAKVE

SEQ ID NO: 1741 - protein, 2127 aa, synthetic construct
  source 1..2127: note = Description of Artificial Sequence: Synthetic polypeptide
MPAAKRVKLDGGDKKYSIGLDIGTNSVGWAVITDEYKVPSKKFKVLGNTDRHSIKKNLIGALLFDSGETAEATRLKRTARRRYTRRKNRICYLQEIFSNEMAKVDDSFFHRLEESFLVEEDKKHERHPIFGNIVDEVAYHEKYPTIYHLRKKLVDSTDKADLRLIYLALAHMIKFRGHFLIEGDLNPDNSDVDKLFIQLVQTYNQLFEENPINASGVDAKAILSARLSKSRRLENLIAQLPGEKKNGLFGNLIALSLGLTPNFKSNFDLAEDAKLQLSKDTYDDDLDNLLAQIGDQYADLFLAAKNLSDAILLSDILRVNTEITKAPLSASMIKRYDEHHQDLTLLKALVRQQLPEKYKEIFFDQSKNGYAGYIDGGASQEEFYKFIKPILEKMDGTEELLVKLNREDLLRKQRTFDNGSIPHQIHLGELHAILRRQEDFYPFLKDNREKIEKILTFRIPYYVGPLARGNSRFAWMTRKSEETITPWNFEEVVDKGASAQSFIERMTNFDKNLPNEKVLPKHSLLYEYFTVYNELTKVKYVTEGMRKPAFLSGEQKKAIVDLLFKTNRKVTVKQLKEDYFKKIECFDSVEISGVEDRFNASLGTYHDLLKIIKDKDFLDNEENEDILEDIVLTLTLFEDREMIEERLKTYAHLFDDKVMKQLKRRRYTGWGRLSRKLINGIRDKQSGKTILDFLKSDGFANRNFMQLIHDDSLTFKEDIQKAQVSGQGDSLHEHIANLAGSPAIKKGILQTVKVVDELVKVMGRHKPENIVIEMARENQTTQKGQKNSRERMKRIEEGIKELGSQILKEHPVENTQLQNEKLYLYYLQNGRDMYVDQELDINRLSDYDVDHIVPQSFLKDDSIDNKVLTRSDKARGKSDNVPSEEVVKKMKNYWRQLLNAKLITQRKFDNLTKAERGGLSELDKAGFIKRQLVETRQITKHVAQILDSRMNTKYDENDKLIREVKVITLKSKLVSDFRKDFQFYKVREINNYHHAHDAYLNAVVGTALIKKYPKLESEFVYGDYKVYDVRKMIAKSEQEIGKATAKYFFYSNIMNFFKTEITLANGEIRKRPLIETNGETGEIVWDKGRDFATVRKVLSMPQVNIVKKTEVQTGGFSKESILPKRNSDKLIARKKDWDPKKYGGFDSPTVAYSVLVVAKVEKGKSKKLKSVKELLGITIMERSSFEKNPIDFLEAKGYKEVKKDLIIKLPKYSLFELENGRKRMLASAGELQKGNELALPSKYVNFLYLASHYEKLKGSPEDNEQKQLFVEQHKHYLDEIIEQISEFSKRVILADANLDKVLSAYNKHRDKPIREQAENIIHLFTLTNLGAPAAFKYFDTTIDRKRYTSTKEVLDATLIHQSITGLYETRIDLSQLGGDGGGGSGGGEAAAKGGLLGRDLLTKLKAQIQFSTEGPQVTWEDRPAMCLVLNLEEEYRLHEKPVPPSIDPSWLQLFPMVWAEKAGMGLANQVPPVVVELKSDASPVAVRQYPMSKEAREGIRPHIQRFLDLGILVPCQSPWNTPLLPVKKPGTNDYRPVQDLREVNKRVQDIHPTVPNPYNLLSSLPPSHTWYSVLDLKDAFFCLKLHPNSQPLFAFEWRDPEKGNTGQLTWTRLPQGFKNSPTLFNEALHRDLASFRALNPQVVMLQYVDDLLVAAPTYRDCKEGTRRLLQELSKLGYRVSAKKAQLCREEVTYLGYLLKGGKRWLTPARKATVMKIPTPTTPRQVREFLGKAGFCRLFIPGFASLAAPLYPLTRPKVPFTWTEAHQEAFGRIKEALLSAPALALPDLTKPFALYVDEKEGVARGVLTQTLGPWRRPVAYLSKKLDPVASGWPTCLKAIAAVALLLKDADKLTLGQNVLVIAPHNLESIVRQPPDRWMTNARMTHYQSLLLNERVSFAPPAILNPATLLPVESDDTPIHICSEILAEETGTRPDLRDQPLPGVPAWYTDGSSFIMDGRRQAGAAIVDNKRTVWASNLPEGTSAQKAELIALTQALRLAEGKSINIYTDSRYAFATAHVHGAIYKQRGWLTSAGKDIKNKEEILALLEAIHLPKRVAIIHCPGHQRGTDPVATGNRKADEAAKQAAQSTRILTETTKNAGKRTADGSEFEKRTADGSEFESPKKKAKVE

SEQ ID NO: 1742 - protein, 2122 aa, synthetic construct
  source 1..2122: note = Description of Artificial Sequence: Synthetic polypeptide
MPAAKRVKLDGGDKKYSIGLDIGTNSVGWAVITDEYKVPSKKFKVLGNTDRHSIKKNLIGALLFDSGETAEATRLKRTARRRYTRRKNRICYLQEIFSNEMAKVDDSFFHRLEESFLVEEDKKHERHPIFGNIVDEVAYHEKYPTIYHLRKKLVDSTDKADLRLIYLALAHMIKFRGHFLIEGDLNPDNSDVDKLFIQLVQTYNQLFEENPINASGVDAKAILSARLSKSRRLENLIAQLPGEKKNGLFGNLIALSLGLTPNFKSNFDLAEDAKLQLSKDTYDDDLDNLLAQIGDQYADLFLAAKNLSDAILLSDILRVNTEITKAPLSASMIKRYDEHHQDLTLLKALVRQQLPEKYKEIFFDQSKNGYAGYIDGGASQEEFYKFIKPILEKMDGTEELLVKLNREDLLRKQRTFDNGSIPHQIHLGELHAILRRQEDFYPFLKDNREKIEKILTFRIPYYVGPLARGNSRFAWMTRKSEETITPWNFEEVVDKGASAQSFIERMTNFDKNLPNEKVLPKHSLLYEYFTVYNELTKVKYVTEGMRKPAFLSGEQKKAIVDLLFKTNRKVTVKQLKEDYFKKIECFDSVEISGVEDRFNASLGTYHDLLKIIKDKDFLDNEENEDILEDIVLTLTLFEDREMIEERLKTYAHLFDDKVMKQLKRRRYTGWGRLSRKLINGIRDKQSGKTILDFLKSDGFANRNFMQLIHDDSLTFKEDIQKAQVSGQGDSLHEHIANLAGSPAIKKGILQTVKVVDELVKVMGRHKPENIVIEMARENQTTQKGQKNSRERMKRIEEGIKELGSQILKEHPVENTQLQNEKLYLYYLQNGRDMYVDQELDINRLSDYDVDHIVPQSFLKDDSIDNKVLTRSDKARGKSDNVPSEEVVKKMKNYWRQLLNAKLITQRKFDNLTKAERGGLSELDKAGFIKRQLVETRQITKHVAQILDSRMNTKYDENDKLIREVKVITLKSKLVSDFRKDFQFYKVREINNYHHAHDAYLNAVVGTALIKKYPKLESEFVYGDYKVYDVRKMIAKSEQEIGKATAKYFFYSNIMNFFKTEITLANGEIRKRPLIETNGETGEIVWDKGRDFATVRKVLSMPQVNIVKKTEVQTGGFSKESILPKRNSDKLIARKKDWDPKKYGGFDSPTVAYSVLVVAKVEKGKSKKLKSVKELLGITIMERSSFEKNPIDFLEAKGYKEVKKDLIIKLPKYSLFELENGRKRMLASAGELQKGNELALPSKYVNFLYLASHYEKLKGSPEDNEQKQLFVEQHKHYLDEIIEQISEFSKRVILADANLDKVLSAYNKHRDKPIREQAENIIHLFTLTNLGAPAAFKYFDTTIDRKRYTSTKEVLDATLIHQSITGLYETRIDLSQLGGDGGGSSGGSGGLLGRDLLTKLKAQIQFSTEGPQVTWEDRPAMCLVLNLEEEYRLHEKPVPPSIDPSWLQLFPMVWAEKAGMGLANQVPPVVVELKSDASPVAVRQYPMSKEAREGIRPHIQRFLDLGILVPCQSPWNTPLLPVKKPGTNDYRPVQDLREVNKRVQDIHPTVPNPYNLLSSLPPSHTWYSVLDLKDAFFCLKLHPNSQPLFAFEWRDPEKGNTGQLTWTRLPQGFKNSPTLFNEALHRDLASFRALNPQVVMLQYVDDLLVAAPTYRDCKEGTRRLLQELSKLGYRVSAKKAQLCREEVTYLGYLLKGGKRWLTPARKATVMKIPTPTTPRQVREFLGKAGFCRLFIPGFASLAAPLYPLTRPKVPFTWTEAHQEAFGRIKEALLSAPALALPDLTKPFALYVDEKEGVARGVLTQTLGPWRRPVAYLSKKLDPVASGWPTCLKAIAAVALLLKDADKLTLGQNVLVIAPHNLESIVRQPPDRWMTNARMTHYQSLLLNERVSFAPPAILNPATLLPVESDDTPIHICSEILAEETGTRPDLRDQPLPGVPAWYTDGSSFIMDGRRQAGAAIVDNKRTVWASNLPEGTSAQKAELIALTQALRLAEGKSINIYTDSRYAFATAHVHGAIYKQRGWLTSAGKDIKNKEEILALLEAIHLPKRVAIIHCPGHQRGTDPVATGNRKADEAAKQAAQSTRILTETTKNAGKRTADGSEFEKRTADGSEFESPKKKAKVE

SEQ ID NO: 1743 - protein, 2124 aa, synthetic construct
  source 1..2124: note = Description of Artificial Sequence: Synthetic polypeptide
MPAAKRVKLDGGDKKYSIGLDIGTNSVGWAVITDEYKVPSKKFKVLGNTDRHSIKKNLIGALLFDSGETAEATRLKRTARRRYTRRKNRICYLQEIFSNEMAKVDDSFFHRLEESFLVEEDKKHERHPIFGNIVDEVAYHEKYPTIYHLRKKLVDSTDKADLRLIYLALAHMIKFRGHFLIEGDLNPDNSDVDKLFIQLVQTYNQLFEENPINASGVDAKAILSARLSKSRRLENLIAQLPGEKKNGLFGNLIALSLGLTPNFKSNFDLAEDAKLQLSKDTYDDDLDNLLAQIGDQYADLFLAAKNLSDAILLSDILRVNTEITKAPLSASMIKRYDEHHQDLTLLKALVRQQLPEKYKEIFFDQSKNGYAGYIDGGASQEEFYKFIKPILEKMDGTEELLVKLNREDLLRKQRTFDNGSIPHQIHLGELHAILRRQEDFYPFLKDNREKIEKILTFRIPYYVGPLARGNSRFAWMTRKSEETITPWNFEEVVDKGASAQSFIERMTNFDKNLPNEKVLPKHSLLYEYFTVYNELTKVKYVTEGMRKPAFLSGEQKKAIVDLLFKTNRKVTVKQLKEDYFKKIECFDSVEISGVEDRFNASLGTYHDLLKIIKDKDFLDNEENEDILEDIVLTLTLFEDREMIEERLKTYAHLFDDKVMKQLKRRRYTGWGRLSRKLINGIRDKQSGKTILDFLKSDGFANRNFMQLIHDDSLTFKEDIQKAQVSGQGDSLHEHIANLAGSPAIKKGILQTVKVVDELVKVMGRHKPENIVIEMARENQTTQKGQKNSRERMKRIEEGIKELGSQILKEHPVENTQLQNEKLYLYYLQNGRDMYVDQELDINRLSDYDVDHIVPQSFLKDDSIDNKVLTRSDKARGKSDNVPSEEVVKKMKNYWRQLLNAKLITQRKFDNLTKAERGGLSELDKAGFIKRQLVETRQITKHVAQILDSRMNTKYDENDKLIREVKVITLKSKLVSDFRKDFQFYKVREINNYHHAHDAYLNAVVGTALIKKYPKLESEFVYGDYKVYDVRKMIAKSEQEIGKATAKYFFYSNIMNFFKTEITLANGEIRKRPLIETNGETGEIVWDKGRDFATVRKVLSMPQVNIVKKTEVQTGGFSKESILPKRNSDKLIARKKDWDPKKYGGFDSPTVAYSVLVVAKVEKGKSKKLKSVKELLGITIMERSSFEKNPIDFLEAKGYKEVKKDLIIKLPKYSLFELENGRKRMLASAGELQKGNELALPSKYVNFLYLASHYEKLKGSPEDNEQKQLFVEQHKHYLDEIIEQISEFSKRVILADANLDKVLSAYNKHRDKPIREQAENIIHLFTLTNLGAPAAFKYFDTTIDRKRYTSTKEVLDATLIHQSITGLYETRIDLSQLGGDGGGGSEAAAKGGLLGRDLLTKLKAQIQFSTEGPQVTWEDRPAMCLVLNLEEEYRLHEKPVPPSIDPSWLQLFPMVWAEKAGMGLANQVPPVVVELKSDASPVAVRQYPMSKEAREGIRPHIQRFLDLGILVPCQSPWNTPLLPVKKPGTNDYRPVQDLREVNKRVQDIHPTVPNPYNLLSSLPPSHTWYSVLDLKDAFFCLKLHPNSQPLFAFEWRDPEKGNTGQLTWTRLPQGFKNSPTLFNEALHRDLASFRALNPQVVMLQYVDDLLVAAPTYRDCKEGTRRLLQELSKLGYRVSAKKAQLCREEVTYLGYLLKGGKRWLTPARKATVMKIPTPTTPRQVREFLGKAGFCRLFIPGFASLAAPLYPLTRPKVPFTWTEAHQEAFGRIKEALLSAPALALPDLTKPFALYVDEKEGVARGVLTQTLGPWRRPVAYLSKKLDPVASGWPTCLKAIAAVALLLKDADKLTLGQNVLVIAPHNLESIVRQPPDRWMTNARMTHYQSLLLNERVSFAPPAILNPATLLPVESDDTPIHICSEILAEETGTRPDLRDQPLPGVPAWYTDGSSFIMDGRRQAGAAIVDNKRTVWASNLPEGTSAQKAELIALTQALRLAEGKSINIYTDSRYAFATAHVHGAIYKQRGWLTSAGKDIKNKEEILALLEAIHLPKRVAIIHCPGHQRGTDPVATGNRKADEAAKQAAQSTRILTETTKNAGKRTADGSEFEKRTADGSEFESPKKKAKVE

SEQ ID NO: 1744 - protein, 2141 aa, synthetic construct
  source 1..2141: note = Description of Artificial Sequence: Synthetic polypeptide
MPAAKRVKLDGGDKKYSIGLDIGTNSVGWAVITDEYKVPSKKFKVLGNTDRHSIKKNLIGALLFDSGETAEATRLKRTARRRYTRRKNRICYLQEIFSNEMAKVDDSFFHRLEESFLVEEDKKHERHPIFGNIVDEVAYHEKYPTIYHLRKKLVDSTDKADLRLIYLALAHMIKFRGHFLIEGDLNPDNSDVDKLFIQLVQTYNQLFEENPINASGVDAKAILSARLSKSRRLENLIAQLPGEKKNGLFGNLIALSLGLTPNFKSNFDLAEDAKLQLSKDTYDDDLDNLLAQIGDQYADLFLAAKNLSDAILLSDILRVNTEITKAPLSASMIKRYDEHHQDLTLLKALVRQQLPEKYKEIFFDQSKNGYAGYIDGGASQEEFYKFIKPILEKMDGTEELLVKLNREDLLRKQRTFDNGSIPHQIHLGELHAILRRQEDFYPFLKDNREKIEKILTFRIPYYVGPLARGNSRFAWMTRKSEETITPWNFEEVVDKGASAQSFIERMTNFDKNLPNEKVLPKHSLLYEYFTVYNELTKVKYVTEGMRKPAFLSGEQKKAIVDLLFKTNRKVTVKQLKEDYFKKIECFDSVEISGVEDRFNASLGTYHDLLKIIKDKDFLDNEENEDILEDIVLTLTLFEDREMIEERLKTYAHLFDDKVMKQLKRRRYTGWGRLSRKLINGIRDKQSGKTILDFLKSDGFANRNFMQLIHDDSLTFKEDIQKAQVSGQGDSLHEHIANLAGSPAIKKGILQTVKVVDELVKVMGRHKPENIVIEMARENQTTQKGQKNSRERMKRIEEGIKELGSQILKEHPVENTQLQNEKLYLYYLQNGRDMYVDQELDINRLSDYDVDHIVPQSFLKDDSIDNKVLTRSDKARGKSDNVPSEEVVKKMKNYWRQLLNAKLITQRKFDNLTKAERGGLSELDKAGFIKRQLVETRQITKHVAQILDSRMNTKYDENDKLIREVKVITLKSKLVSDFRKDFQFYKVREINNYHHAHDAYLNAVVGTALIKKYPKLESEFVYGDYKVYDVRKMIAKSEQEIGKATAKYFFYSNIMNFFKTEITLANGEIRKRPLIETNGETGEIVWDKGRDFATVRKVLSMPQVNIVKKTEVQTGGFSKESILPKRNSDKLIARKKDWDPKKYGGFDSPTVAYSVLVVAKVEKGKSKKLKSVKELLGITIMERSSFEKNPIDFLEAKGYKEVKKDLIIKLPKYSLFELENGRKRMLASAGELQKGNELALPSKYVNFLYLASHYEKLKGSPEDNEQKQLFVEQHKHYLDEIIEQISEFSKRVILADANLDKVLSAYNKHRDKPIREQAENIIHLFTLTNLGAPAAFKYFDTTIDRKRYTSTKEVLDATLIHQSITGLYETRIDLSQLGGDGGEAAAKEAAAKEAAAKEAAAKEAAAKGGLLGRDLLTKLKAQIQFSTEGPQVTWEDRPAMCLVLNLEEEYRLHEKPVPPSIDPSWLQLFPMVWAEKAGMGLANQVPPVVVELKSDASPVAVRQYPMSKEAREGIRPHIQRFLDLGILVPCQSPWNTPLLPVKKPGTNDYRPVQDLREVNKRVQDIHPTVPNPYNLLSSLPPSHTWYSVLDLKDAFFCLKLHPNSQPLFAFEWRDPEKGNTGQLTWTRLPQGFKNSPTLFNEALHRDLASFRALNPQVVMLQYVDDLLVAAPTYRDCKEGTRRLLQELSKLGYRVSAKKAQLCREEVTYLGYLLKGGKRWLTPARKATVMKIPTPTTPRQVREFLGKAGFCRLFIPGFASLAAPLYPLTRPKVPFTWTEAHQEAFGRIKEALLSAPALALPDLTKPFALYVDEKEGVARGVLTQTLGPWRRPVAYLSKKLDPVASGWPTCLKAIAAVALLLKDADKLTLGQNVLVIAPHNLESIVRQPPDRWMTNARMTHYQSLLLNERVSFAPPAILNPATLLPVESDDTPIHICSEILAEETGTRPDLRDQPLPGVPAWYTDGSSFIMDGRRQAGAAIVDNKRTVWASNLPEGTSAQKAELIALTQALRLAEGKSINIYTDSRYAFATAHVHGAIYKQRGWLTSAGKDIKNKEEILALLEAIHLPKRVAIIHCPGHQRGTDPVATGNRKADEAAKQAAQSTRILTETTKNAGKRTADGSEFEKRTADGSEFESPKKKAKVE

SEQ ID NO: 1745 - protein, 2125 aa, synthetic construct
  source 1..2125: note = Description of Artificial Sequence: Synthetic polypeptide
MPAAKRVKLDGGDKKYSIGLDIGTNSVGWAVITDEYKVPSKKFKVLGNTDRHSIKKNLIGALLFDSGETAEATRLKRTARRRYTRRKNRICYLQEIFSNEMAKVDDSFFHRLEESFLVEEDKKHERHPIFGNIVDEVAYHEKYPTIYHLRKKLVDSTDKADLRLIYLALAHMIKFRGHFLIEGDLNPDNSDVDKLFIQLVQTYNQLFEENPINASGVDAKAILSARLSKSRRLENLIAQLPGEKKNGLFGNLIALSLGLTPNFKSNFDLAEDAKLQLSKDTYDDDLDNLLAQIGDQYADLFLAAKNLSDAILLSDILRVNTEITKAPLSASMIKRYDEHHQDLTLLKALVRQQLPEKYKEIFFDQSKNGYAGYIDGGASQEEFYKFIKPILEKMDGTEELLVKLNREDLLRKQRTFDNGSIPHQIHLGELHAILRRQEDFYPFLKDNREKIEKILTFRIPYYVGPLARGNSRFAWMTRKSEETITPWNFEEVVDKGASAQSFIERMTNFDKNLPNEKVLPKHSLLYEYFTVYNELTKVKYVTEGMRKPAFLSGEQKKAIVDLLFKTNRKVTVKQLKEDYFKKIECFDSVEISGVEDRFNASLGTYHDLLKIIKDKDFLDNEENEDILEDIVLTLTLFEDREMIEERLKTYAHLFDDKVMKQLKRRRYTGWGRLSRKLINGIRDKQSGKTILDFLKSDGFANRNFMQLIHDDSLTFKEDIQKAQVSGQGDSLHEHIANLAGSPAIKKGILQTVKVVDELVKVMGRHKPENIVIEMARENQTTQKGQKNSRERMKRIEEGIKELGSQILKEHPVENTQLQNEKLYLYYLQNGRDMYVDQELDINRLSDYDVDHIVPQSFLKDDSIDNKVLTRSDKARGKSDNVPSEEVVKKMKNYWRQLLNAKLITQRKFDNLTKAERGGLSELDKAGFIKRQLVETRQITKHVAQILDSRMNTKYDENDKLIREVKVITLKSKLVSDFRKDFQFYKVREINNYHHAHDAYLNAVVGTALIKKYPKLESEFVYGDYKVYDVRKMIAKSEQEIGKATAKYFFYSNIMNFFKTEITLANGEIRKRPLIETNGETGEIVWDKGRDFATVRKVLSMPQVNIVKKTEVQTGGFSKESILPKRNSDKLIARKKDWDPKKYGGFDSPTVAYSVLVVAKVEKGKSKKLKSVKELLGITIMERSSFEKNPIDFLEAKGYKEVKKDLIIKLPKYSLFELENGRKRMLASAGELQKGNELALPSKYVNFLYLASHYEKLKGSPEDNEQKQLFVEQHKHYLDEIIEQISEFSKRVILADANLDKVLSAYNKHRDKPIREQAENIIHLFTLTNLGAPAAFKYFDTTIDRKRYTSTKEVLDATLIHQSITGLYETRIDLSQLGGDGGGGGGGSPAPGGLLGRDLLTKLKAQIQFSTEGPQVTWEDRPAMCLVLNLEEEYRLHEKPVPPSIDPSWLQLFPMVWAEKAGMGLANQVPPVVVELKSDASPVAVRQYPMSKEAREGIRPHIQRFLDLGILVPCQSPWNTPLLPVKKPGTNDYRPVQDLREVNKRVQDIHPTVPNPYNLLSSLPPSHTWYSVLDLKDAFFCLKLHPNSQPLFAFEWRDPEKGNTGQLTWTRLPQGFKNSPTLFNEALHRDLASFRALNPQVVMLQYVDDLLVAAPTYRDCKEGTRRLLQELSKLGYRVSAKKAQLCREEVTYLGYLLKGGKRWLTPARKATVMKIPTPTTPRQVREFLGKAGFCRLFIPGFASLAAPLYPLTRPKVPFTWTEAHQEAFGRIKEALLSAPALALPDLTKPFALYVDEKEGVARGVLTQTLGPWRRPVAYLSKKLDPVASGWPTCLKAIAAVALLLKDADKLTLGQNVLVIAPHNLESIVRQPPDRWMTNARMTHYQSLLLNERVSFAPPAILNPATLLPVESDDTPIHICSEILAEETGTRPDLRDQPLPGVPAWYTDGSSFIMDGRRQAGAAIVDNKRTVWASNLPEGTSAQKAELIALTQALRLAEGKSINIYTDSRYAFATAHVHGAIYKQRGWLTSAGKDIKNKEEILALLEAIHLPKRVAIIHCPGHQRGTDPVATGNRKADEAAKQAAQSTRILTETTKNAGKRTADGSEFEKRTADGSEFESPKKKAKVE

SEQ ID NO: 1746 - protein, 2124 aa, synthetic construct
  source 1..2124: note = Description of Artificial Sequence: Synthetic polypeptide
MPAAKRVKLDGGDKKYSIGLDIGTNSVGWAVITDEYKVPSKKFKVLGNTDRHSIKKNLIGALLFDSGETAEATRLKRTARRRYTRRKNRICYLQEIFSNEMAKVDDSFFHRLEESFLVEEDKKHERHPIFGNIVDEVAYHEKYPTIYHLRKKLVDSTDKADLRLIYLALAHMIKFRGHFLIEGDLNPDNSDVDKLFIQLVQTYNQLFEENPINASGVDAKAILSARLSKSRRLENLIAQLPGEKKNGLFGNLIALSLGLTPNFKSNFDLAEDAKLQLSKDTYDDDLDNLLAQIGDQYADLFLAAKNLSDAILLSDILRVNTEITKAPLSASMIKRYDEHHQDLTLLKALVRQQLPEKYKEIFFDQSKNGYAGYIDGGASQEEFYKFIKPILEKMDGTEELLVKLNREDLLRKQRTFDNGSIPHQIHLGELHAILRRQEDFYPFLKDNREKIEKILTFRIPYYVGPLARGNSRFAWMTRKSEETITPWNFEEVVDKGASAQSFIERMTNFDKNLPNEKVLPKHSLLYEYFTVYNELTKVKYVTEGMRKPAFLSGEQKKAIVDLLFKTNRKVTVKQLKEDYFKKIECFDSVEISGVEDRFNASLGTYHDLLKIIKDKDFLDNEENEDILEDIVLTLTLFEDREMIEERLKTYAHLFDDKVMKQLKRRRYTGWGRLSRKLINGIRDKQSGKTILDFLKSDGFANRNFMQLIHDDSLTFKEDIQKAQVSGQGDSLHEHIANLAGSPAIKKGILQTVKVVDELVKVMGRHKPENIVIEMARENQTTQKGQKNSRERMKRIEEGIKELGSQILKEHPVENTQLQNEKLYLYYLQNGRDMYVDQELDINRLSDYDVDHIVPQSFLKDDSIDNKVLTRSDKARGKSDNVPSEEVVKKMKNYWRQLLNAKLITQRKFDNLTKAERGGLSELDKAGFIKRQLVETRQITKHVAQILDSRMNTKYDENDKLIREVKVITLKSKLVSDFRKDFQFYKVREINNYHHAHDAYLNAVVGTALIKKYPKLESEFVYGDYKVYDVRKMIAKSEQEIGKATAKYFFYSNIMNFFKTEITLANGEIRKRPLIETNGETGEIVWDKGRDFATVRKVLSMPQVNIVKKTEVQTGGFSKESILPKRNSDKLIARKKDWDPKKYGGFDSPTVAYSVLVVAKVEKGKSKKLKSVKELLGITIMERSSFEKNPIDFLEAKGYKEVKKDLIIKLPKYSLFELENGRKRMLASAGELQKGNELALPSKYVNFLYLASHYEKLKGSPEDNEQKQLFVEQHKHYLDEIIEQISEFSKRVILADANLDKVLSAYNKHRDKPIREQAENIIHLFTLTNLGAPAAFKYFDTTIDRKRYTSTKEVLDATLIHQSITGLYETRIDLSQLGGDGGEAAAKGGGGGLLGRDLLTKLKAQIQFSTEGPQVTWEDRPAMCLVLNLEEEYRLHEKPVPPSIDPSWLQLFPMVWAEKAGMGLANQVPPVVVELKSDASPVAVRQYPMSKEAREGIRPHIQRFLDLGILVPCQSPWNTPLLPVKKPGTNDYRPVQDLREVNKRVQDIHPTVPNPYNLLSSLPPSHTWYSVLDLKDAFFCLKLHPNSQPLFAFEWRDPEKGNTGQLTWTRLPQGFKNSPTLFNEALHRDLASFRALNPQVVMLQYVDDLLVAAPTYRDCKEGTRRLLQELSKLGYRVSAKKAQLCREEVTYLGYLLKGGKRWLTPARKATVMKIPTPTTPRQVREFLGKAGFCRLFIPGFASLAAPLYPLTRPKVPFTWTEAHQEAFGRIKEALLSAPALALPDLTKPFALYVDEKEGVARGVLTQTLGPWRRPVAYLSKKLDPVASGWPTCLKAIAAVALLLKDADKLTLGQNVLVIAPHNLESIVRQPPDRWMTNARMTHYQSLLLNERVSFAPPAILNPATLLPVESDDTPIHICSEILAEETGTRPDLRDQPLPGVPAWYTDGSSFIMDGRRQAGAAIVDNKRTVWASNLPEGTSAQKAELIALTQALRLAEGKSINIYTDSRYAFATAHVHGAIYKQRGWLTSAGKDIKNKEEILALLEAIHLPKRVAIIHCPGHQRGTDPVATGNRKADEAAKQAAQSTRILTETTKNAGKRTADGSEFEKRTADGSEFESPKKKAKVE

SEQ ID NO: 1747 - protein, 2122 aa, synthetic construct
  source 1..2122: note = Description of Artificial Sequence: Synthetic polypeptide
MPAAKRVKLDGGDKKYSIGLDIGTNSVGWAVITDEYKVPSKKFKVLGNTDRHSIKKNLIGALLFDSGETAEATRLKRTARRRYTRRKNRICYLQEIFSNEMAKVDDSFFHRLEESFLVEEDKKHERHPIFGNIVDEVAYHEKYPTIYHLRKKLVDSTDKADLRLIYLALAHMIKFRGHFLIEGDLNPDNSDVDKLFIQLVQTYNQLFEENPINASGVDAKAILSARLSKSRRLENLIAQLPGEKKNGLFGNLIALSLGLTPNFKSNFDLAEDAKLQLSKDTYDDDLDNLLAQIGDQYADLFLAAKNLSDAILLSDILRVNTEITKAPLSASMIKRYDEHHQDLTLLKALVRQQLPEKYKEIFFDQSKNGYAGYIDGGASQEEFYKFIKPILEKMDGTEELLVKLNREDLLRKQRTFDNGSIPHQIHLGELHAILRRQEDFYPFLKDNREKIEKILTFRIPYYVGPLARGNSRFAWMTRKSEETITPWNFEEVVDKGASAQSFIERMTNFDKNLPNEKVLPKHSLLYEYFTVYNELTKVKYVTEGMRKPAFLSGEQKKAIVDLLFKTNRKVTVKQLKEDYFKKIECFDSVEISGVEDRFNASLGTYHDLLKIIKDKDFLDNEENEDILEDIVLTLTLFEDREMIEERLKTYAHLFDDKVMKQLKRRRYTGWGRLSRKLINGIRDKQSGKTILDFLKSDGFANRNFMQLIHDDSLTFKEDIQKAQVSGQGDSLHEHIANLAGSPAIKKGILQTVKVVDELVKVMGRHKPENIVIEMARENQTTQKGQKNSRERMKRIEEGIKELGSQILKEHPVENTQLQNEKLYLYYLQNGRDMYVDQELDINRLSDYDVDHIVPQSFLKDDSIDNKVLTRSDKARGKSDNVPSEEVVKKMKNYWRQLLNAKLITQRKFDNLTKAERGGLSELDKAGFIKRQLVETRQITKHVAQILDSRMNTKYDENDKLIREVKVITLKSKLVSDFRKDFQFYKVREINNYHHAHDAYLNAVVGTALIKKYPKLESEFVYGDYKVYDVRKMIAKSEQEIGKATAKYFFYSNIMNFFKTEITLANGEIRKRPLIETNGETGEIVWDKGRDFATVRKVLSMPQVNIVKKTEVQTGGFSKESILPKRNSDKLIARKKDWDPKKYGGFDSPTVAYSVLVVAKVEKGKSKKLKSVKELLGITIMERSSFEKNPIDFLEAKGYKEVKKDLIIKLPKYSLFELENGRKRMLASAGELQKGNELALPSKYVNFLYLASHYEKLKGSPEDNEQKQLFVEQHKHYLDEIIEQISEFSKRVILADANLDKVLSAYNKHRDKPIREQAENIIHLFTLTNLGAPAAFKYFDTTIDRKRYTSTKEVLDATLIHQSITGLYETRIDLSQLGGDGGGSSGSSGGLLGRDLLTKLKAQIQFSTEGPQVTWEDRPAMCLVLNLEEEYRLHEKPVPPSIDPSWLQLFPMVWAEKAGMGLANQVPPVVVELKSDASPVAVRQYPMSKEAREGIRPHIQRFLDLGILVPCQSPWNTPLLPVKKPGTNDYRPVQDLREVNKRVQDIHPTVPNPYNLLSSLPPSHTWYSVLDLKDAFFCLKLHPNSQPLFAFEWRDPEKGNTGQLTWTRLPQGFKNSPTLFNEALHRDLASFRALNPQVVMLQYVDDLLVAAPTYRDCKEGTRRLLQELSKLGYRVSAKKAQLCREEVTYLGYLLKGGKRWLTPARKATVMKIPTPTTPRQVREFLGKAGFCRLFIPGFASLAAPLYPLTRPKVPFTWTEAHQEAFGRIKEALLSAPALALPDLTKPFALYVDEKEGVARGVLTQTLGPWRRPVAYLSKKLDPVASGWPTCLKAIAAVALLLKDADKLTLGQNVLVIAPHNLESIVRQPPDRWMTNARMTHYQSLLLNERVSFAPPAILNPATLLPVESDDTPIHICSEILAEETGTRPDLRDQPLPGVPAWYTDGSSFIMDGRRQAGAAIVDNKRTVWASNLPEGTSAQKAELIALTQALRLAEGKSINIYTDSRYAFATAHVHGAIYKQRGWLTSAGKDIKNKEEILALLEAIHLPKRVAIIHCPGHQRGTDPVATGNRKADEAAKQAAQSTRILTETTKNAGKRTADGSEFEKRTADGSEFESPKKKAKVE

SEQ ID NO: 1748 - protein, 2122 aa, synthetic construct
  source 1..2122: note = Description of Artificial Sequence: Synthetic polypeptide
MPAAKRVKLDGGDKKYSIGLDIGTNSVGWAVITDEYKVPSKKFKVLGNTDRHSIKKNLIGALLFDSGETAEATRLKRTARRRYTRRKNRICYLQEIFSNEMAKVDDSFFHRLEESFLVEEDKKHERHPIFGNIVDEVAYHEKYPTIYHLRKKLVDSTDKADLRLIYLALAHMIKFRGHFLIEGDLNPDNSDVDKLFIQLVQTYNQLFEENPINASGVDAKAILSARLSKSRRLENLIAQLPGEKKNGLFGNLIALSLGLTPNFKSNFDLAEDAKLQLSKDTYDDDLDNLLAQIGDQYADLFLAAKNLSDAILLSDILRVNTEITKAPLSASMIKRYDEHHQDLTLLKALVRQQLPEKYKEIFFDQSKNGYAGYIDGGASQEEFYKFIKPILEKMDGTEELLVKLNREDLLRKQRTFDNGSIPHQIHLGELHAILRRQEDFYPFLKDNREKIEKILTFRIPYYVGPLARGNSRFAWMTRKSEETITPWNFEEVVDKGASAQSFIERMTNFDKNLPNEKVLPKHSLLYEYFTVYNELTKVKYVTEGMRKPAFLSGEQKKAIVDLLFKTNRKVTVKQLKEDYFKKIECFDSVEISGVEDRFNASLGTYHDLLKIIKDKDFLDNEENEDILEDIVLTLTLFEDREMIEERLKTYAHLFDDKVMKQLKRRRYTGWGRLSRKLINGIRDKQSGKTILDFLKSDGFANRNFMQLIHDDSLTFKEDIQKAQVSGQGDSLHEHIANLAGSPAIKKGILQTVKVVDELVKVMGRHKPENIVIEMARENQTTQKGQKNSRERMKRIEEGIKELGSQILKEHPVENTQLQNEKLYLYYLQNGRDMYVDQELDINRLSDYDVDHIVPQSFLKDDSIDNKVLTRSDKARGKSDNVPSEEVVKKMKNYWRQLLNAKLITQRKFDNLTKAERGGLSELDKAGFIKRQLVETRQITKHVAQILDSRMNTKYDENDKLIREVKVITLKSKLVSDFRKDFQFYKVREINNYHHAHDAYLNAVVGTALIKKYPKLESEFVYGDYKVYDVRKMIAKSEQEIGKATAKYFFYSNIMNFFKTEITLANGEIRKRPLIETNGETGEIVWDKGRDFATVRKVLSMPQVNIVKKTEVQTGGFSKESILPKRNSDKLIARKKDWDPKKYGGFDSPTVAYSVLVVAKVEKGKSKKLKSVKELLGITIMERSSFEKNPIDFLEAKGYKEVKKDLIIKLPKYSLFELENGRKRMLASAGELQKGNELALPSKYVNFLYLASHYEKLKGSPEDNEQKQLFVEQHKHYLDEIIEQISEFSKRVILADANLDKVLSAYNKHRDKPIREQAENIIHLFTLTNLGAPAAFKYFDTTIDRKRYTSTKEVLDATLIHQSITGLYETRIDLSQLGGDGGGGGGGSGGLLGRDLLTKLKAQIQFSTEGPQVTWEDRPAMCLVLNLEEEYRLHEKPVPPSIDPSWLQLFPMVWAEKAGMGLANQVPPVVVELKSDASPVAVRQYPMSKEAREGIRPHIQRFLDLGILVPCQSPWNTPLLPVKKPGTNDYRPVQDLREVNKRVQDIHPTVPNPYNLLSSLPPSHTWYSVLDLKDAFFCLKLHPNSQPLFAFEWRDPEKGNTGQLTWTRLPQGFKNSPTLFNEALHRDLASFRALNPQVVMLQYVDDLLVAAPTYRDCKEGTRRLLQELSKLGYRVSAKKAQLCREEVTYLGYLLKGGKRWLTPARKATVMKIPTPTTPRQVREFLGKAGFCRLFIPGFASLAAPLYPLTRPKVPFTWTEAHQEAFGRIKEALLSAPALALPDLTKPFALYVDEKEGVARGVLTQTLGPWRRPVAYLSKKLDPVASGWPTCLKAIAAVALLLKDADKLTLGQNVLVIAPHNLESIVRQPPDRWMTNARMTHYQSLLLNERVSFAPPAILNPATLLPVESDDTPIHICSEILAEETGTRPDLRDQPLPGVPAWYTDGSSFIMDGRRQAGAAIVDNKRTVWASNLPEGTSAQKAELIALTQALRLAEGKSINIYTDSRYAFATAHVHGAIYKQRGWLTSAGKDIKNKEEILALLEAIHLPKRVAIIHCPGHQRGTDPVATGNRKADEAAKQAAQSTRILTETTKNAGKRTADGSEFEKRTADGSEFESPKKKAKVE

SEQ ID NO: 1749 - protein, 2125 aa, synthetic construct
  source 1..2125: note = Description of Artificial Sequence: Synthetic polypeptide
MPAAKRVKLDGGDKKYSIGLDIGTNSVGWAVITDEYKVPSKKFKVLGNTDRHSIKKNLIGALLFDSGETAEATRLKRTARRRYTRRKNRICYLQEIFSNEMAKVDDSFFHRLEESFLVEEDKKHERHPIFGNIVDEVAYHEKYPTIYHLRKKLVDSTDKADLRLIYLALAHMIKFRGHFLIEGDLNPDNSDVDKLFIQLVQTYNQLFEENPINASGVDAKAILSARLSKSRRLENLIAQLPGEKKNGLFGNLIALSLGLTPNFKSNFDLAEDAKLQLSKDTYDDDLDNLLAQIGDQYADLFLAAKNLSDAILLSDILRVNTEITKAPLSASMIKRYDEHHQDLTLLKALVRQQLPEKYKEIFFDQSKNGYAGYIDGGASQEEFYKFIKPILEKMDGTEELLVKLNREDLLRKQRTFDNGSIPHQIHLGELHAILRRQEDFYPFLKDNREKIEKILTFRIPYYVGPLARGNSRFAWMTRKSEETITPWNFEEVVDKGASAQSFIERMTNFDKNLPNEKVLPKHSLLYEYFTVYNELTKVKYVTEGMRKPAFLSGEQKKAIVDLLFKTNRKVTVKQLKEDYFKKIECFDSVEISGVEDRFNASLGTYHDLLKIIKDKDFLDNEENEDILEDIVLTLTLFEDREMIEERLKTYAHLFDDKVMKQLKRRRYTGWGRLSRKLINGIRDKQSGKTILDFLKSDGFANRNFMQLIHDDSLTFKEDIQKAQVSGQGDSLHEHIANLAGSPAIKKGILQTVKVVDELVKVMGRHKPENIVIEMARENQTTQKGQKNSRERMKRIEEGIKELGSQILKEHPVENTQLQNEKLYLYYLQNGRDMYVDQELDINRLSDYDVDHIVPQSFLKDDSIDNKVLTRSDKARGKSDNVPSEEVVKKMKNYWRQLLNAKLITQRKFDNLTKAERGGLSELDKAGFIKRQLVETRQITKHVAQILDSRMNTKYDENDKLIREVKVITLKSKLVSDFRKDFQFYKVREINNYHHAHDAYLNAVVGTALIKKYPKLESEFVYGDYKVYDVRKMIAKSEQEIGKATAKYFFYSNIMNFFKTEITLANGEIRKRPLIETNGETGEIVWDKGRDFATVRKVLSMPQVNIVKKTEVQTGGFSKESILPKRNSDKLIARKKDWDPKKYGGFDSPTVAYSVLVVAKVEKGKSKKLKSVKELLGITIMERSSFEKNPIDFLEAKGYKEVKKDLIIKLPKYSLFELENGRKRMLASAGELQKGNELALPSKYVNFLYLASHYEKLKGSPEDNEQKQLFVEQHKHYLDEIIEQISEFSKRVILADANLDKVLSAYNKHRDKPIREQAENIIHLFTLTNLGAPAAFKYFDTTIDRKRYTSTKEVLDATLIHQSITGLYETRIDLSQLGGDGGPAPGSSGGSGGLLGRDLLTKLKAQIQFSTEGPQVTWEDRPAMCLVLNLEEEYRLHEKPVPPSIDPSWLQLFPMVWAEKAGMGLANQVPPVVVELKSDASPVAVRQYPMSKEAREGIRPHIQRFLDLGILVPCQSPWNTPLLPVKKPGTNDYRPVQDLREVNKRVQDIHPTVPNPYNLLSSLPPSHTWYSVLDLKDAFFCLKLHPNSQPLFAFEWRDPEKGNTGQLTWTRLPQGFKNSPTLFNEALHRDLASFRALNPQVVMLQYVDDLLVAAPTYRDCKEGTRRLLQELSKLGYRVSAKKAQLCREEVTYLGYLLKGGKRWLTPARKATVMKIPTPTTPRQVREFLGKAGFCRLFIPGFASLAAPLYPLTRPKVPFTWTEAHQEAFGRIKEALLSAPALALPDLTKPFALYVDEKEGVARGVLTQTLGPWRRPVAYLSKKLDPVASGWPTCLKAIAAVALLLKDADKLTLGQNVLVIAPHNLESIVRQPPDRWMTNARMTHYQSLLLNERVSFAPPAILNPATLLPVESDDTPIHICSEILAEETGTRPDLRDQPLPGVPAWYTDGSSFIMDGRRQAGAAIVDNKRTVWASNLPEGTSAQKAELIALTQALRLAEGKSINIYTDSRYAFATAHVHGAIYKQRGWLTSAGKDIKNKEEILALLEAIHLPKRVAIIHCPGHQRGTDPVATGNRKADEAAKQAAQSTRILTETTKNAGKRTADGSEFEKRTADGSEFESPKKKAKVE

SEQ ID NO: 1750 - protein, 2122 aa, synthetic construct
  source 1..2122: note = Description of Artificial Sequence: Synthetic polypeptide
MPAAKRVKLDGGDKKYSIGLDIGTNSVGWAVITDEYKVPSKKFKVLGNTDRHSIKKNLIGALLFDSGETAEATRLKRTARRRYTRRKNRICYLQEIFSNEMAKVDDSFFHRLEESFLVEEDKKHERHPIFGNIVDEVAYHEKYPTIYHLRKKLVDSTDKADLRLIYLALAHMIKFRGHFLIEGDLNPDNSDVDKLFIQLVQTYNQLFEENPINASGVDAKAILSARLSKSRRLENLIAQLPGEKKNGLFGNLIALSLGLTPNFKSNFDLAEDAKLQLSKDTYDDDLDNLLAQIGDQYADLFLAAKNLSDAILLSDILRVNTEITKAPLSASMIKRYDEHHQDLTLLKALVRQQLPEKYKEIFFDQSKNGYAGYIDGGASQEEFYKFIKPILEKMDGTEELLVKLNREDLLRKQRTFDNGSIPHQIHLGELHAILRRQEDFYPFLKDNREKIEKILTFRIPYYVGPLARGNSRFAWMTRKSEETITPWNFEEVVDKGASAQSFIERMTNFDKNLPNEKVLPKHSLLYEYFTVYNELTKVKYVTEGMRKPAFLSGEQKKAIVDLLFKTNRKVTVKQLKEDYFKKIECFDSVEISGVEDRFNASLGTYHDLLKIIKDKDFLDNEENEDILEDIVLTLTLFEDREMIEERLKTYAHLFDDKVMKQLKRRRYTGWGRLSRKLINGIRDKQSGKTILDFLKSDGFANRNFMQLIHDDSLTFKEDIQKAQVSGQGDSLHEHIANLAGSPAIKKGILQTVKVVDELVKVMGRHKPENIVIEMARENQTTQKGQKNSRERMKRIEEGIKELGSQILKEHPVENTQLQNEKLYLYYLQNGRDMYVDQELDINRLSDYDVDHIVPQSFLKDDSIDNKVLTRSDKARGKSDNVPSEEVVKKMKNYWRQLLNAKLITQRKFDNLTKAERGGLSELDKAGFIKRQLVETRQITKHVAQILDSRMNTKYDENDKLIREVKVITLKSKLVSDFRKDFQFYKVREINNYHHAHDAYLNAVVGTALIKKYPKLESEFVYGDYKVYDVRKMIAKSEQEIGKATAKYFFYSNIMNFFKTEITLANGEIRKRPLIETNGETGEIVWDKGRDFATVRKVLSMPQVNIVKKTEVQTGGFSKESILPKRNSDKLIARKKDWDPKKYGGFDSPTVAYSVLVVAKVEKGKSKKLKSVKELLGITIMERSSFEKNPIDFLEAKGYKEVKKDLIIKLPKYSLFELENGRKRMLASAGELQKGNELALPSKYVNFLYLASHYEKLKGSPEDNEQKQLFVEQHKHYLDEIIEQISEFSKRVILADANLDKVLSAYNKHRDKPIREQAENIIHLFTLTNLGAPAAFKYFDTTIDRKRYTSTKEVLDATLIHQSITGLYETRIDLSQLGGDGGGGSGGSGGLLGRDLLTKLKAQIQFSTEGPQVTWEDRPAMCLVLNLEEEYRLHEKPVPPSIDPSWLQLFPMVWAEKAGMGLANQVPPVVVELKSDASPVAVRQYPMSKEAREGIRPHIQRFLDLGILVPCQSPWNTPLLPVKKPGTNDYRPVQDLREVNKRVQDIHPTVPNPYNLLSSLPPSHTWYSVLDLKDAFFCLKLHPNSQPLFAFEWRDPEKGNTGQLTWTRLPQGFKNSPTLFNEALHRDLASFRALNPQVVMLQYVDDLLVAAPTYRDCKEGTRRLLQELSKLGYRVSAKKAQLCREEVTYLGYLLKGGKRWLTPARKATVMKIPTPTTPRQVREFLGKAGFCRLFIPGFASLAAPLYPLTRPKVPFTWTEAHQEAFGRIKEALLSAPALALPDLTKPFALYVDEKEGVARGVLTQTLGPWRRPVAYLSKKLDPVASGWPTCLKAIAAVALLLKDADKLTLGQNVLVIAPHNLESIVRQPPDRWMTNARMTHYQSLLLNERVSFAPPAILNPATLLPVESDDTPIHICSEILAEETGTRPDLRDQPLPGVPAWYTDGSSFIMDGRRQAGAAIVDNKRTVWASNLPEGTSAQKAELIALTQALRLAEGKSINIYTDSRYAFATAHVHGAIYKQRGWLTSAGKDIKNKEEILALLEAIHLPKRVAIIHCPGHQRGTDPVATGNRKADEAAKQAAQSTRILTETTKNAGKRTADGSEFEKRTADGSEFESPKKKAKVE

SEQ ID NO: 1751 - protein, 2216 aa, synthetic construct
  source 1..2216: note = Description of Artificial Sequence: Synthetic polypeptide
MPAAKRVKLDGGDKKYSIGLDIGTNSVGWAVITDEYKVPSKKFKVLGNTDRHSIKKNLIGALLFDSGETAEATRLKRTARRRYTRRKNRICYLQEIFSNEMAKVDDSFFHRLEESFLVEEDKKHERHPIFGNIVDEVAYHEKYPTIYHLRKKLVDSTDKADLRLIYLALAHMIKFRGHFLIEGDLNPDNSDVDKLFIQLVQTYNQLFEENPINASGVDAKAILSARLSKSRRLENLIAQLPGEKKNGLFGNLIALSLGLTPNFKSNFDLAEDAKLQLSKDTYDDDLDNLLAQIGDQYADLFLAAKNLSDAILLSDILRVNTEITKAPLSASMIKRYDEHHQDLTLLKALVRQQLPEKYKEIFFDQSKNGYAGYIDGGASQEEFYKFIKPILEKMDGTEELLVKLNREDLLRKQRTFDNGSIPHQIHLGELHAILRRQEDFYPFLKDNREKIEKILTFRIPYYVGPLARGNSRFAWMTRKSEETITPWNFEEVVDKGASAQSFIERMTNFDKNLPNEKVLPKHSLLYEYFTVYNELTKVKYVTEGMRKPAFLSGEQKKAIVDLLFKTNRKVTVKQLKEDYFKKIECFDSVEISGVEDRFNASLGTYHDLLKIIKDKDFLDNEENEDILEDIVLTLTLFEDREMIEERLKTYAHLFDDKVMKQLKRRRYTGWGRLSRKLINGIRDKQSGKTILDFLKSDGFANRNFMQLIHDDSLTFKEDIQKAQVSGQGDSLHEHIANLAGSPAIKKGILQTVKVVDELVKVMGRHKPENIVIEMARENQTTQKGQKNSRERMKRIEEGIKELGSQILKEHPVENTQLQNEKLYLYYLQNGRDMYVDQELDINRLSDYDVDHIVPQSFLKDDSIDNKVLTRSDKARGKSDNVPSEEVVKKMKNYWRQLLNAKLITQRKFDNLTKAERGGLSELDKAGFIKRQLVETRQITKHVAQILDSRMNTKYDENDKLIREVKVITLKSKLVSDFRKDFQFYKVREINNYHHAHDAYLNAVVGTALIKKYPKLESEFVYGDYKVYDVRKMIAKSEQEIGKATAKYFFYSNIMNFFKTEITLANGEIRKRPLIETNGETGEIVWDKGRDFATVRKVLSMPQVNIVKKTEVQTGGFSKESILPKRNSDKLIARKKDWDPKKYGGFDSPTVAYSVLVVAKVEKGKSKKLKSVKELLGITIMERSSFEKNPIDFLEAKGYKEVKKDLIIKLPKYSLFELENGRKRMLASAGELQKGNELALPSKYVNFLYLASHYEKLKGSPEDNEQKQLFVEQHKHYLDEIIEQISEFSKRVILADANLDKVLSAYNKHRDKPIREQAENIIHLFTLTNLGAPAAFKYFDTTIDRKRYTSTKEVLDATLIHQSITGLYETRIDLSQLGGDGGGGGGGSGSSGGTLGDQGSRGSDPLPEPRVTLTVEGIPTEFLVNTGAEHSVLTKPMGKMGSKRTVVAGATGSKVYPWTTKRLLKIGQKQVTHSFLVIPECPAPLLGRDLLTKLKAQIQFSTEGPQVTWEDRPAMCLVLNLEEEYRLHEKPVPPSIDPSWLQLFPMVWAEKAGMGLANQVPPVVVELKSDASPVAVRQYPMSKEAREGIRPHIQRFLDLGILVPCQSPWNTPLLPVKKPGTNDYRPVQDLREVNKRVQDIHPTVPNPYNLLSSLPPSHTWYSVLDLKDAFFCLKLHPNSQPLFAFEWRDPEKGNTGQLTWTRLPQGFKNSPTLFNEALHRDLASFRALNPQVVMLQYVDDLLVAAPTYRDCKEGTRRLLQELSKLGYRVSAKKAQLCREEVTYLGYLLKGGKRWLTPARKATVMKIPTPTTPRQVREFLGTAGFCRLWIPGFASLAAPLYPLTRPKVPFTWTEAHQEAFGRIKEALLSAPALALPDLTKPFALYVDEKEGVARGVLTQTLGPWRRPVAYLSKKLDPVASGWPTCLKAIAAVALLLKDADKLTLGQNVLVIAPHNLESIVRQPPDRWMTNARMTHYQSLLLNERVSFAPPAILNPATLLPVESDDTPIHICSEILAEETGTRPDLRDQPLPGVPAWYTDGSSFIMDGRRQAGAAIVDNKRTVWASNLPEGTSAQKAELIALTQALRLAEGKSINIYTDSRYAFATAHVHGAIYKQRGWLTSAGKDIKNKEEILALLEAIHLPKRVAIIHCPGHQRGTDPVATGNRKADEAAKQAAQSTRILTETTKNAGKRTADGSEFEKRTADGSEFESPKKKAKVE

SEQ ID NO: 1752 - protein, 2237 aa, synthetic construct
  source 1..2237: note = Description of Artificial Sequence: Synthetic polypeptide
MPAAKRVKLDGGDKKYSIGLDIGTNSVGWAVITDEYKVPSKKFKVLGNTDRHSIKKNLIGALLFDSGETAEATRLKRTARRRYTRRKNRICYLQEIFSNEMAKVDDSFFHRLEESFLVEEDKKHERHPIFGNIVDEVAYHEKYPTIYHLRKKLVDSTDKADLRLIYLALAHMIKFRGHFLIEGDLNPDNSDVDKLFIQLVQTYNQLFEENPINASGVDAKAILSARLSKSRRLENLIAQLPGEKKNGLFGNLIALSLGLTPNFKSNFDLAEDAKLQLSKDTYDDDLDNLLAQIGDQYADLFLAAKNLSDAILLSDILRVNTEITKAPLSASMIKRYDEHHQDLTLLKALVRQQLPEKYKEIFFDQSKNGYAGYIDGGASQEEFYKFIKPILEKMDGTEELLVKLNREDLLRKQRTFDNGSIPHQIHLGELHAILRRQEDFYPFLKDNREKIEKILTFRIPYYVGPLARGNSRFAWMTRKSEETITPWNFEEVVDKGASAQSFIERMTNFDKNLPNEKVLPKHSLLYEYFTVYNELTKVKYVTEGMRKPAFLSGEQKKAIVDLLFKTNRKVTVKQLKEDYFKKIECFDSVEISGVEDRFNASLGTYHDLLKIIKDKDFLDNEENEDILEDIVLTLTLFEDREMIEERLKTYAHLFDDKVMKQLKRRRYTGWGRLSRKLINGIRDKQSGKTILDFLKSDGFANRNFMQLIHDDSLTFKEDIQKAQVSGQGDSLHEHIANLAGSPAIKKGILQTVKVVDELVKVMGRHKPENIVIEMARENQTTQKGQKNSRERMKRIEEGIKELGSQILKEHPVENTQLQNEKLYLYYLQNGRDMYVDQELDINRLSDYDVDHIVPQSFLKDDSIDNKVLTRSDKARGKSDNVPSEEVVKKMKNYWRQLLNAKLITQRKFDNLTKAERGGLSELDKAGFIKRQLVETRQITKHVAQILDSRMNTKYDENDKLIREVKVITLKSKLVSDFRKDFQFYKVREINNYHHAHDAYLNAVVGTALIKKYPKLESEFVYGDYKVYDVRKMIAKSEQEIGKATAKYFFYSNIMNFFKTEITLANGEIRKRPLIETNGETGEIVWDKGRDFATVRKVLSMPQVNIVKKTEVQTGGFSKESILPKRNSDKLIARKKDWDPKKYGGFDSPTVAYSVLVVAKVEKGKSKKLKSVKELLGITIMERSSFEKNPIDFLEAKGYKEVKKDLIIKLPKYSLFELENGRKRMLASAGELQKGNELALPSKYVNFLYLASHYEKLKGSPEDNEQKQLFVEQHKHYLDEIIEQISEFSKRVILADANLDKVLSAYNKHRDKPIREQAENIIHLFTLTNLGAPAAFKYFDTTIDRKRYTSTKEVLDATLIHQSITGLYETRIDLSQLGGDGGGGGGSGGGGSGGGGSGGGGSGGGGSGGGGSGGTLGDQGSRGSDPLPEPRVTLTVEGIPTEFLVNTGAEHSVLTKPMGKMGSKRTVVAGATGSKVYPWTTKRLLKIGQKQVTHSFLVIPECPAPLLGRDLLTKLKAQIQFSTEGPQVTWEDRPAMCLVLNLEEEYRLHEKPVPPSIDPSWLQLFPMVWAEKAGMGLANQVPPVVVELKSDASPVAVRQYPMSKEAREGIRPHIQRFLDLGILVPCQSPWNTPLLPVKKPGTNDYRPVQDLREVNKRVQDIHPTVPNPYNLLSSLPPSHTWYSVLDLKDAFFCLKLHPNSQPLFAFEWRDPEKGNTGQLTWTRLPQGFKNSPTLFNEALHRDLASFRALNPQVVMLQYVDDLLVAAPTYRDCKEGTRRLLQELSKLGYRVSAKKAQLCREEVTYLGYLLKGGKRWLTPARKATVMKIPTPTTPRQVREFLGTAGFCRLWIPGFASLAAPLYPLTRPKVPFTWTEAHQEAFGRIKEALLSAPALALPDLTKPFALYVDEKEGVARGVLTQTLGPWRRPVAYLSKKLDPVASGWPTCLKAIAAVALLLKDADKLTLGQNVLVIAPHNLESIVRQPPDRWMTNARMTHYQSLLLNERVSFAPPAILNPATLLPVESDDTPIHICSEILAEETGTRPDLRDQPLPGVPAWYTDGSSFIMDGRRQAGAAIVDNKRTVWASNLPEGTSAQKAELIALTQALRLAEGKSINIYTDSRYAFATAHVHGAIYKQRGWLTSAGKDIKNKEEILALLEAIHLPKRVAIIHCPGHQRGTDPVATGNRKADEAAKQAAQSTRILTETTKNAGKRTADGSEFEKRTADGSEFESPKKKAKVE

SEQ ID NO: 1753 - protein, 2218 aa, synthetic construct
  source 1..2218: note = Description of Artificial Sequence: Synthetic polypeptide
MPAAKRVKLDGGDKKYSIGLDIGTNSVGWAVITDEYKVPSKKFKVLGNTDRHSIKKNLIGALLFDSGETAEATRLKRTARRRYTRRKNRICYLQEIFSNEMAKVDDSFFHRLEESFLVEEDKKHERHPIFGNIVDEVAYHEKYPTIYHLRKKLVDSTDKADLRLIYLALAHMIKFRGHFLIEGDLNPDNSDVDKLFIQLVQTYNQLFEENPINASGVDAKAILSARLSKSRRLENLIAQLPGEKKNGLFGNLIALSLGLTPNFKSNFDLAEDAKLQLSKDTYDDDLDNLLAQIGDQYADLFLAAKNLSDAILLSDILRVNTEITKAPLSASMIKRYDEHHQDLTLLKALVRQQLPEKYKEIFFDQSKNGYAGYIDGGASQEEFYKFIKPILEKMDGTEELLVKLNREDLLRKQRTFDNGSIPHQIHLGELHAILRRQEDFYPFLKDNREKIEKILTFRIPYYVGPLARGNSRFAWMTRKSEETITPWNFEEVVDKGASAQSFIERMTNFDKNLPNEKVLPKHSLLYEYFTVYNELTKVKYVTEGMRKPAFLSGEQKKAIVDLLFKTNRKVTVKQLKEDYFKKIECFDSVEISGVEDRFNASLGTYHDLLKIIKDKDFLDNEENEDILEDIVLTLTLFEDREMIEERLKTYAHLFDDKVMKQLKRRRYTGWGRLSRKLINGIRDKQSGKTILDFLKSDGFANRNFMQLIHDDSLTFKEDIQKAQVSGQGDSLHEHIANLAGSPAIKKGILQTVKVVDELVKVMGRHKPENIVIEMARENQTTQKGQKNSRERMKRIEEGIKELGSQILKEHPVENTQLQNEKLYLYYLQNGRDMYVDQELDINRLSDYDVDHIVPQSFLKDDSIDNKVLTRSDKARGKSDNVPSEEVVKKMKNYWRQLLNAKLITQRKFDNLTKAERGGLSELDKAGFIKRQLVETRQITKHVAQILDSRMNTKYDENDKLIREVKVITLKSKLVSDFRKDFQFYKVREINNYHHAHDAYLNAVVGTALIKKYPKLESEFVYGDYKVYDVRKMIAKSEQEIGKATAKYFFYSNIMNFFKTEITLANGEIRKRPLIETNGETGEIVWDKGRDFATVRKVLSMPQVNIVKKTEVQTGGFSKESILPKRNSDKLIARKKDWDPKKYGGFDSPTVAYSVLVVAKVEKGKSKKLKSVKELLGITIMERSSFEKNPIDFLEAKGYKEVKKDLIIKLPKYSLFELENGRKRMLASAGELQKGNELALPSKYVNFLYLASHYEKLKGSPEDNEQKQLFVEQHKHYLDEIIEQISEFSKRVILADANLDKVLSAYNKHRDKPIREQAENIIHLFTLTNLGAPAAFKYFDTTIDRKRYTSTKEVLDATLIHQSITGLYETRIDLSQLGGDGGEAAAKGGGPAPGGTLGDQGSRGSDPLPEPRVTLTVEGIPTEFLVNTGAEHSVLTKPMGKMGSKRTVVAGATGSKVYPWTTKRLLKIGQKQVTHSFLVIPECPAPLLGRDLLTKLKAQIQFSTEGPQVTWEDRPAMCLVLNLEEEYRLHEKPVPPSIDPSWLQLFPMVWAEKAGMGLANQVPPVVVELKSDASPVAVRQYPMSKEAREGIRPHIQRFLDLGILVPCQSPWNTPLLPVKKPGTNDYRPVQDLREVNKRVQDIHPTVPNPYNLLSSLPPSHTWYSVLDLKDAFFCLKLHPNSQPLFAFEWRDPEKGNTGQLTWTRLPQGFKNSPTLFNEALHRDLASFRALNPQVVMLQYVDDLLVAAPTYRDCKEGTRRLLQELSKLGYRVSAKKAQLCREEVTYLGYLLKGGKRWLTPARKATVMKIPTPTTPRQVREFLGTAGFCRLWIPGFASLAAPLYPLTRPKVPFTWTEAHQEAFGRIKEALLSAPALALPDLTKPFALYVDEKEGVARGVLTQTLGPWRRPVAYLSKKLDPVASGWPTCLKAIAAVALLLKDADKLTLGQNVLVIAPHNLESIVRQPPDRWMTNARMTHYQSLLLNERVSFAPPAILNPATLLPVESDDTPIHICSEILAEETGTRPDLRDQPLPGVPAWYTDGSSFIMDGRRQAGAAIVDNKRTVWASNLPEGTSAQKAELIALTQALRLAEGKSINIYTDSRYAFATAHVHGAIYKQRGWLTSAGKDIKNKEEILALLEAIHLPKRVAIIHCPGHQRGTDPVATGNRKADEAAKQAAQSTRILTETTKNAGKRTADGSEFEKRTADGSEFESPKKKAKVE

SEQ ID NO: 1754 - protein, 2218 aa, synthetic construct
  source 1..2218: note = Description of Artificial Sequence: Synthetic polypeptide
MPAAKRVKLDGGDKKYSIGLDIGTNSVGWAVITDEYKVPSKKFKVLGNTDRHSIKKNLIGALLFDSGETAEATRLKRTARRRYTRRKNRICYLQEIFSNEMAKVDDSFFHRLEESFLVEEDKKHERHPIFGNIVDEVAYHEKYPTIYHLRKKLVDSTDKADLRLIYLALAHMIKFRGHFLIEGDLNPDNSDVDKLFIQLVQTYNQLFEENPINASGVDAKAILSARLSKSRRLENLIAQLPGEKKNGLFGNLIALSLGLTPNFKSNFDLAEDAKLQLSKDTYDDDLDNLLAQIGDQYADLFLAAKNLSDAILLSDILRVNTEITKAPLSASMIKRYDEHHQDLTLLKALVRQQLPEKYKEIFFDQSKNGYAGYIDGGASQEEFYKFIKPILEKMDGTEELLVKLNREDLLRKQRTFDNGSIPHQIHLGELHAILRRQEDFYPFLKDNREKIEKILTFRIPYYVGPLARGNSRFAWMTRKSEETITPWNFEEVVDKGASAQSFIERMTNFDKNLPNEKVLPKHSLLYEYFTVYNELTKVKYVTEGMRKPAFLSGEQKKAIVDLLFKTNRKVTVKQLKEDYFKKIECFDSVEISGVEDRFNASLGTYHDLLKIIKDKDFLDNEENEDILEDIVLTLTLFEDREMIEERLKTYAHLFDDKVMKQLKRRRYTGWGRLSRKLINGIRDKQSGKTILDFLKSDGFANRNFMQLIHDDSLTFKEDIQKAQVSGQGDSLHEHIANLAGSPAIKKGILQTVKVVDELVKVMGRHKPENIVIEMARENQTTQKGQKNSRERMKRIEEGIKELGSQILKEHPVENTQLQNEKLYLYYLQNGRDMYVDQELDINRLSDYDVDHIVPQSFLKDDSIDNKVLTRSDKARGKSDNVPSEEVVKKMKNYWRQLLNAKLITQRKFDNLTKAERGGLSELDKAGFIKRQLVETRQITKHVAQILDSRMNTKYDENDKLIREVKVITLKSKLVSDFRKDFQFYKVREINNYHHAHDAYLNAVVGTALIKKYPKLESEFVYGDYKVYDVRKMIAKSEQEIGKATAKYFFYSNIMNFFKTEITLANGEIRKRPLIETNGETGEIVWDKGRDFATVRKVLSMPQVNIVKKTEVQTGGFSKESILPKRNSDKLIARKKDWDPKKYGGFDSPTVAYSVLVVAKVEKGKSKKLKSVKELLGITIMERSSFEKNPIDFLEAKGYKEVKKDLIIKLPKYSLFELENGRKRMLASAGELQKGNELALPSKYVNFLYLASHYEKLKGSPEDNEQKQLFVEQHKHYLDEIIEQISEFSKRVILADANLDKVLSAYNKHRDKPIREQAENIIHLFTLTNLGAPAAFKYFDTTIDRKRYTSTKEVLDATLIHQSITGLYETRIDLSQLGGDGGPAPGGSEAAAKGGTLGDQGSRGSDPLPEPRVTLTVEGIPTEFLVNTGAEHSVLTKPMGKMGSKRTVVAGATGSKVYPWTTKRLLKIGQKQVTHSFLVIPECPAPLLGRDLLTKLKAQIQFSTEGPQVTWEDRPAMCLVLNLEEEYRLHEKPVPPSIDPSWLQLFPMVWAEKAGMGLANQVPPVVVELKSDASPVAVRQYPMSKEAREGIRPHIQRFLDLGILVPCQSPWNTPLLPVKKPGTNDYRPVQDLREVNKRVQDIHPTVPNPYNLLSSLPPSHTWYSVLDLKDAFFCLKLHPNSQPLFAFEWRDPEKGNTGQLTWTRLPQGFKNSPTLFNEALHRDLASFRALNPQVVMLQYVDDLLVAAPTYRDCKEGTRRLLQELSKLGYRVSAKKAQLCREEVTYLGYLLKGGKRWLTPARKATVMKIPTPTTPRQVREFLGTAGFCRLWIPGFASLAAPLYPLTRPKVPFTWTEAHQEAFGRIKEALLSAPALALPDLTKPFALYVDEKEGVARGVLTQTLGPWRRPVAYLSKKLDPVASGWPTCLKAIAAVALLLKDADKLTLGQNVLVIAPHNLESIVRQPPDRWMTNARMTHYQSLLLNERVSFAPPAILNPATLLPVESDDTPIHICSEILAEETGTRPDLRDQPLPGVPAWYTDGSSFIMDGRRQAGAAIVDNKRTVWASNLPEGTSAQKAELIALTQALRLAEGKSINIYTDSRYAFATAHVHGAIYKQRGWLTSAGKDIKNKEEILALLEAIHLPKRVAIIHCPGHQRGTDPVATGNRKADEAAKQAAQSTRILTETTKNAGKRTADGSEFEKRTADGSEFESPKKKAKVE

SEQ ID NO: 1755 - protein, 2219 aa, synthetic construct
  source 1..2219: note = Description of Artificial Sequence: Synthetic polypeptide
MPAAKRVKLDGGDKKYSIGLDIGTNSVGWAVITDEYKVPSKKFKVLGNTDRHSIKKNLIGALLFDSGETAEATRLKRTARRRYTRRKNRICYLQEIFSNEMAKVDDSFFHRLEESFLVEEDKKHERHPIFGNIVDEVAYHEKYPTIYHLRKKLVDSTDKADLRLIYLALAHMIKFRGHFLIEGDLNPDNSDVDKLFIQLVQTYNQLFEENPINASGVDAKAILSARLSKSRRLENLIAQLPGEKKNGLFGNLIALSLGLTPNFKSNFDLAEDAKLQLSKDTYDDDLDNLLAQIGDQYADLFLAAKNLSDAILLSDILRVNTEITKAPLSASMIKRYDEHHQDLTLLKALVRQQLPEKYKEIFFDQSKNGYAGYIDGGASQEEFYKFIKPILEKMDGTEELLVKLNREDLLRKQRTFDNGSIPHQIHLGELHAILRRQEDFYPFLKDNREKIEKILTFRIPYYVGPLARGNSRFAWMTRKSEETITPWNFEEVVDKGASAQSFIERMTNFDKNLPNEKVLPKHSLLYEYFTVYNELTKVKYVTEGMRKPAFLSGEQKKAIVDLLFKTNRKVTVKQLKEDYFKKIECFDSVEISGVEDRFNASLGTYHDLLKIIKDKDFLDNEENEDILEDIVLTLTLFEDREMIEERLKTYAHLFDDKVMKQLKRRRYTGWGRLSRKLINGIRDKQSGKTILDFLKSDGFANRNFMQLIHDDSLTFKEDIQKAQVSGQGDSLHEHIANLAGSPAIKKGILQTVKVVDELVKVMGRHKPENIVIEMARENQTTQKGQKNSRERMKRIEEGIKELGSQILKEHPVENTQLQNEKLYLYYLQNGRDMYVDQELDINRLSDYDVDHIVPQSFLKDDSIDNKVLTRSDKARGKSDNVPSEEVVKKMKNYWRQLLNAKLITQRKFDNLTKAERGGLSELDKAGFIKRQLVETRQITKHVAQILDSRMNTKYDENDKLIREVKVITLKSKLVSDFRKDFQFYKVREINNYHHAHDAYLNAVVGTALIKKYPKLESEFVYGDYKVYDVRKMIAKSEQEIGKATAKYFFYSNIMNFFKTEITLANGEIRKRPLIETNGETGEIVWDKGRDFATVRKVLSMPQVNIVKKTEVQTGGFSKESILPKRNSDKLIARKKDWDPKKYGGFDSPTVAYSVLVVAKVEKGKSKKLKSVKELLGITIMERSSFEKNPIDFLEAKGYKEVKKDLIIKLPKYSLFELENGRKRMLASAGELQKGNELALPSKYVNFLYLASHYEKLKGSPEDNEQKQLFVEQHKHYLDEIIEQISEFSKRVILADANLDKVLSAYNKHRDKPIREQAENIIHLFTLTNLGAPAAFKYFDTTIDRKRYTSTKEVLDATLIHQSITGLYETRIDLSQLGGDGGGGSGGSGGSGGSGGTLGDQGSRGSDPLPEPRVTLTVEGIPTEFLVNTGAEHSVLTKPMGKMGSKRTVVAGATGSKVYPWTTKRLLKIGQKQVTHSFLVIPECPAPLLGRDLLTKLKAQIQFSTEGPQVTWEDRPAMCLVLNLEEEYRLHEKPVPPSIDPSWLQLFPMVWAEKAGMGLANQVPPVVVELKSDASPVAVRQYPMSKEAREGIRPHIQRFLDLGILVPCQSPWNTPLLPVKKPGTNDYRPVQDLREVNKRVQDIHPTVPNPYNLLSSLPPSHTWYSVLDLKDAFFCLKLHPNSQPLFAFEWRDPEKGNTGQLTWTRLPQGFKNSPTLFNEALHRDLASFRALNPQVVMLQYVDDLLVAAPTYRDCKEGTRRLLQELSKLGYRVSAKKAQLCREEVTYLGYLLKGGKRWLTPARKATVMKIPTPTTPRQVREFLGTAGFCRLWIPGFASLAAPLYPLTRPKVPFTWTEAHQEAFGRIKEALLSAPALALPDLTKPFALYVDEKEGVARGVLTQTLGPWRRPVAYLSKKLDPVASGWPTCLKAIAAVALLLKDADKLTLGQNVLVIAPHNLESIVRQPPDRWMTNARMTHYQSLLLNERVSFAPPAILNPATLLPVESDDTPIHICSEILAEETGTRPDLRDQPLPGVPAWYTDGSSFIMDGRRQAGAAIVDNKRTVWASNLPEGTSAQKAELIALTQALRLAEGKSINIYTDSRYAFATAHVHGAIYKQRGWLTSAGKDIKNKEEILALLEAIHLPKRVAIIHCPGHQRGTDPVATGNRKADEAAKQAAQSTRILTETTKNAGKRTADGSEFEKRTADGSEFESPKKKAKVE

SEQ ID NO: 1756 - protein, 2218 aa, synthetic construct
  source 1..2218: note = Description of Artificial Sequence: Synthetic polypeptide
MPAAKRVKLDGGDKKYSIGLDIGTNSVGWAVITDEYKVPSKKFKVLGNTDRHSIKKNLIGALLFDSGETAEATRLKRTARRRYTRRKNRICYLQEIFSNEMAKVDDSFFHRLEESFLVEEDKKHERHPIFGNIVDEVAYHEKYPTIYHLRKKLVDSTDKADLRLIYLALAHMIKFRGHFLIEGDLNPDNSDVDKLFIQLVQTYNQLFEENPINASGVDAKAILSARLSKSRRLENLIAQLPGEKKNGLFGNLIALSLGLTPNFKSNFDLAEDAKLQLSKDTYDDDLDNLLAQIGDQYADLFLAAKNLSDAILLSDILRVNTEITKAPLSASMIKRYDEHHQDLTLLKALVRQQLPEKYKEIFFDQSKNGYAGYIDGGASQEEFYKFIKPILEKMDGTEELLVKLNREDLLRKQRTFDNGSIPHQIHLGELHAILRRQEDFYPFLKDNREKIEKILTFRIPYYVGPLARGNSRFAWMTRKSEETITPWNFEEVVDKGASAQSFIERMTNFDKNLPNEKVLPKHSLLYEYFTVYNELTKVKYVTEGMRKPAFLSGEQKKAIVDLLFKTNRKVTVKQLKEDYFKKIECFDSVEISGVEDRFNASLGTYHDLLKIIKDKDFLDNEENEDILEDIVLTLTLFEDREMIEERLKTYAHLFDDKVMKQLKRRRYTGWGRLSRKLINGIRDKQSGKTILDFLKSDGFANRNFMQLIHDDSLTFKEDIQKAQVSGQGDSLHEHIANLAGSPAIKKGILQTVKVVDELVKVMGRHKPENIVIEMARENQTTQKGQKNSRERMKRIEEGIKELGSQILKEHPVENTQLQNEKLYLYYLQNGRDMYVDQELDINRLSDYDVDHIVPQSFLKDDSIDNKVLTRSDKARGKSDNVPSEEVVKKMKNYWRQLLNAKLITQRKFDNLTKAERGGLSELDKAGFIKRQLVETRQITKHVAQILDSRMNTKYDENDKLIREVKVITLKSKLVSDFRKDFQFYKVREINNYHHAHDAYLNAVVGTALIKKYPKLESEFVYGDYKVYDVRKMIAKSEQEIGKATAKYFFYSNIMNFFKTEITLANGEIRKRPLIETNGETGEIVWDKGRDFATVRKVLSMPQVNIVKKTEVQTGGFSKESILPKRNSDKLIARKKDWDPKKYGGFDSPTVAYSVLVVAKVEKGKSKKLKSVKELLGITIMERSSFEKNPIDFLEAKGYKEVKKDLIIKLPKYSLFELENGRKRMLASAGELQKGNELALPSKYVNFLYLASHYEKLKGSPEDNEQKQLFVEQHKHYLDEIIEQISEFSKRVILADANLDKVLSAYNKHRDKPIREQAENIIHLFTLTNLGAPAAFKYFDTTIDRKRYTSTKEVLDATLIHQSITGLYETRIDLSQLGGDGGEAAAKGSSGGGGGTLGDQGSRGSDPLPEPRVTLTVEGIPTEFLVNTGAEHSVLTKPMGKMGSKRTVVAGATGSKVYPWTTKRLLKIGQKQVTHSFLVIPECPAPLLGRDLLTKLKAQIQFSTEGPQVTWEDRPAMCLVLNLEEEYRLHEKPVPPSIDPSWLQLFPMVWAEKAGMGLANQVPPVVVELKSDASPVAVRQYPMSKEAREGIRPHIQRFLDLGILVPCQSPWNTPLLPVKKPGTNDYRPVQDLREVNKRVQDIHPTVPNPYNLLSSLPPSHTWYSVLDLKDAFFCLKLHPNSQPLFAFEWRDPEKGNTGQLTWTRLPQGFKNSPTLFNEALHRDLASFRALNPQVVMLQYVDDLLVAAPTYRDCKEGTRRLLQELSKLGYRVSAKKAQLCREEVTYLGYLLKGGKRWLTPARKATVMKIPTPTTPRQVREFLGTAGFCRLWIPGFASLAAPLYPLTRPKVPFTWTEAHQEAFGRIKEALLSAPALALPDLTKPFALYVDEKEGVARGVLTQTLGPWRRPVAYLSKKLDPVASGWPTCLKAIAAVALLLKDADKLTLGQNVLVIAPHNLESIVRQPPDRWMTNARMTHYQSLLLNERVSFAPPAILNPATLLPVESDDTPIHICSEILAEETGTRPDLRDQPLPGVPAWYTDGSSFIMDGRRQAGAAIVDNKRTVWASNLPEGTSAQKAELIALTQALRLAEGKSINIYTDSRYAFATAHVHGAIYKQRGWLTSAGKDIKNKEEILALLEAIHLPKRVAIIHCPGHQRGTDPVATGNRKADEAAKQAAQSTRILTETTKNAGKRTADGSEFEKRTADGSEFESPKKKAKVE

SEQ ID NO: 1757 - protein, 2216 aa, synthetic construct
  source 1..2216: note = Description of Artificial Sequence: Synthetic polypeptide
MPAAKRVKLDGGDKKYSIGLDIGTNSVGWAVITDEYKVPSKKFKVLGNTDRHSIKKNLIGALLFDSGETAEATRLKRTARRRYTRRKNRICYLQEIFSNEMAKVDDSFFHRLEESFLVEEDKKHERHPIFGNIVDEVAYHEKYPTIYHLRKKLVDSTDKADLRLIYLALAHMIKFRGHFLIEGDLNPDNSDVDKLFIQLVQTYNQLFEENPINASGVDAKAILSARLSKSRRLENLIAQLPGEKKNGLFGNLIALSLGLTPNFKSNFDLAEDAKLQLSKDTYDDDLDNLLAQIGDQYADLFLAAKNLSDAILLSDILRVNTEITKAPLSASMIKRYDEHHQDLTLLKALVRQQLPEKYKEIFFDQSKNGYAGYIDGGASQEEFYKFIKPILEKMDGTEELLVKLNREDLLRKQRTFDNGSIPHQIHLGELHAILRRQEDFYPFLKDNREKIEKILTFRIPYYVGPLARGNSRFAWMTRKSEETITPWNFEEVVDKGASAQSFIERMTNFDKNLPNEKVLPKHSLLYEYFTVYNELTKVKYVTEGMRKPAFLSGEQKKAIVDLLFKTNRKVTVKQLKEDYFKKIECFDSVEISGVEDRFNASLGTYHDLLKIIKDKDFLDNEENEDILEDIVLTLTLFEDREMIEERLKTYAHLFDDKVMKQLKRRRYTGWGRLSRKLINGIRDKQSGKTILDFLKSDGFANRNFMQLIHDDSLTFKEDIQKAQVSGQGDSLHEHIANLAGSPAIKKGILQTVKVVDELVKVMGRHKPENIVIEMARENQTTQKGQKNSRERMKRIEEGIKELGSQILKEHPVENTQLQNEKLYLYYLQNGRDMYVDQELDINRLSDYDVDHIVPQSFLKDDSIDNKVLTRSDKARGKSDNVPSEEVVKKMKNYWRQLLNAKLITQRKFDNLTKAERGGLSELDKAGFIKRQLVETRQITKHVAQILDSRMNTKYDENDKLIREVKVITLKSKLVSDFRKDFQFYKVREINNYHHAHDAYLNAVVGTALIKKYPKLESEFVYGDYKVYDVRKMIAKSEQEIGKATAKYFFYSNIMNFFKTEITLANGEIRKRPLIETNGETGEIVWDKGRDFATVRKVLSMPQVNIVKKTEVQTGGFSKESILPKRNSDKLIARKKDWDPKKYGGFDSPTVAYSVLVVAKVEKGKSKKLKSVKELLGITIMERSSFEKNPIDFLEAKGYKEVKKDLIIKLPKYSLFELENGRKRMLASAGELQKGNELALPSKYVNFLYLASHYEKLKGSPEDNEQKQLFVEQHKHYLDEIIEQISEFSKRVILADANLDKVLSAYNKHRDKPIREQAENIIHLFTLTNLGAPAAFKYFDTTIDRKRYTSTKEVLDATLIHQSITGLYETRIDLSQLGGDGGGGSPAPGSSGGTLGDQGSRGSDPLPEPRVTLTVEGIPTEFLVNTGAEHSVLTKPMGKMGSKRTVVAGATGSKVYPWTTKRLLKIGQKQVTHSFLVIPECPAPLLGRDLLTKLKAQIQFSTEGPQVTWEDRPAMCLVLNLEEEYRLHEKPVPPSIDPSWLQLFPMVWAEKAGMGLANQVPPVVVELKSDASPVAVRQYPMSKEAREGIRPHIQRFLDLGILVPCQSPWNTPLLPVKKPGTNDYRPVQDLREVNKRVQDIHPTVPNPYNLLSSLPPSHTWYSVLDLKDAFFCLKLHPNSQPLFAFEWRDPEKGNTGQLTWTRLPQGFKNSPTLFNEALHRDLASFRALNPQVVMLQYVDDLLVAAPTYRDCKEGTRRLLQELSKLGYRVSAKKAQLCREEVTYLGYLLKGGKRWLTPARKATVMKIPTPTTPRQVREFLGTAGFCRLWIPGFASLAAPLYPLTRPKVPFTWTEAHQEAFGRIKEALLSAPALALPDLTKPFALYVDEKEGVARGVLTQTLGPWRRPVAYLSKKLDPVASGWPTCLKAIAAVALLLKDADKLTLGQNVLVIAPHNLESIVRQPPDRWMTNARMTHYQSLLLNERVSFAPPAILNPATLLPVESDDTPIHICSEILAEETGTRPDLRDQPLPGVPAWYTDGSSFIMDGRRQAGAAIVDNKRTVWASNLPEGTSAQKAELIALTQALRLAEGKSINIYTDSRYAFATAHVHGAIYKQRGWLTSAGKDIKNKEEILALLEAIHLPKRVAIIHCPGHQRGTDPVATGNRKADEAAKQAAQSTRILTETTKNAGKRTADGSEFEKRTADGSEFESPKKKAKVE

SEQ ID NO: 1758 - protein, 2222 aa, synthetic construct
  source 1..2222: note = Description of Artificial Sequence: Synthetic polypeptide
MPAAKRVKLDGGDKKYSIGLDIGTNSVGWAVITDEYKVPSKKFKVLGNTDRHSIKKNLIGALLFDSGETAEATRLKRTARRRYTRRKNRICYLQEIFSNEMAKVDDSFFHRLEESFLVEEDKKHERHPIFGNIVDEVAYHEKYPTIYHLRKKLVDSTDKADLRLIYLALAHMIKFRGHFLIEGDLNPDNSDVDKLFIQLVQTYNQLFEENPINASGVDAKAILSARLSKSRRLENLIAQLPGEKKNGLFGNLIALSLGLTPNFKSNFDLAEDAKLQLSKDTYDDDLDNLLAQIGDQYADLFLAAKNLSDAILLSDILRVNTEITKAPLSASMIKRYDEHHQDLTLLKALVRQQLPEKYKEIFFDQSKNGYAGYIDGGASQEEFYKFIKPILEKMDGTEELLVKLNREDLLRKQRTFDNGSIPHQIHLGELHAILRRQEDFYPFLKDNREKIEKILTFRIPYYVGPLARGNSRFAWMTRKSEETITPWNFEEVVDKGASAQSFIERMTNFDKNLPNEKVLPKHSLLYEYFTVYNELTKVKYVTEGMRKPAFLSGEQKKAIVDLLFKTNRKVTVKQLKEDYFKKIECFDSVEISGVEDRFNASLGTYHDLLKIIKDKDFLDNEENEDILEDIVLTLTLFEDREMIEERLKTYAHLFDDKVMKQLKRRRYTGWGRLSRKLINGIRDKQSGKTILDFLKSDGFANRNFMQLIHDDSLTFKEDIQKAQVSGQGDSLHEHIANLAGSPAIKKGILQTVKVVDELVKVMGRHKPENIVIEMARENQTTQKGQKNSRERMKRIEEGIKELGSQILKEHPVENTQLQNEKLYLYYLQNGRDMYVDQELDINRLSDYDVDHIVPQSFLKDDSIDNKVLTRSDKARGKSDNVPSEEVVKKMKNYWRQLLNAKLITQRKFDNLTKAERGGLSELDKAGFIKRQLVETRQITKHVAQILDSRMNTKYDENDKLIREVKVITLKSKLVSDFRKDFQFYKVREINNYHHAHDAYLNAVVGTALIKKYPKLESEFVYGDYKVYDVRKMIAKSEQEIGKATAKYFFYSNIMNFFKTEITLANGEIRKRPLIETNGETGEIVWDKGRDFATVRKVLSMPQVNIVKKTEVQTGGFSKESILPKRNSDKLIARKKDWDPKKYGGFDSPTVAYSVLVVAKVEKGKSKKLKSVKELLGITIMERSSFEKNPIDFLEAKGYKEVKKDLIIKLPKYSLFELENGRKRMLASAGELQKGNELALPSKYVNFLYLASHYEKLKGSPEDNEQKQLFVEQHKHYLDEIIEQISEFSKRVILADANLDKVLSAYNKHRDKPIREQAENIIHLFTLTNLGAPAAFKYFDTTIDRKRYTSTKEVLDATLIHQSITGLYETRIDLSQLGGDGGGGGGSGGGGSGGGGSGGTLGDQGSRGSDPLPEPRVTLTVEGIPTEFLVNTGAEHSVLTKPMGKMGSKRTVVAGATGSKVYPWTTKRLLKIGQKQVTHSFLVIPECPAPLLGRDLLTKLKAQIQFSTEGPQVTWEDRPAMCLVLNLEEEYRLHEKPVPPSIDPSWLQLFPMVWAEKAGMGLANQVPPVVVELKSDASPVAVRQYPMSKEAREGIRPHIQRFLDLGILVPCQSPWNTPLLPVKKPGTNDYRPVQDLREVNKRVQDIHPTVPNPYNLLSSLPPSHTWYSVLDLKDAFFCLKLHPNSQPLFAFEWRDPEKGNTGQLTWTRLPQGFKNSPTLFNEALHRDLASFRALNPQVVMLQYVDDLLVAAPTYRDCKEGTRRLLQELSKLGYRVSAKKAQLCREEVTYLGYLLKGGKRWLTPARKATVMKIPTPTTPRQVREFLGTAGFCRLWIPGFASLAAPLYPLTRPKVPFTWTEAHQEAFGRIKEALLSAPALALPDLTKPFALYVDEKEGVARGVLTQTLGPWRRPVAYLSKKLDPVASGWPTCLKAIAAVALLLKDADKLTLGQNVLVIAPHNLESIVRQPPDRWMTNARMTHYQSLLLNERVSFAPPAILNPATLLPVESDDTPIHICSEILAEETGTRPDLRDQPLPGVPAWYTDGSSFIMDGRRQAGAAIVDNKRTVWASNLPEGTSAQKAELIALTQALRLAEGKSINIYTDSRYAFATAHVHGAIYKQRGWLTSAGKDIKNKEEILALLEAIHLPKRVAIIHCPGHQRGTDPVATGNRKADEAAKQAAQSTRILTETTKNAGKRTADGSEFEKRTADGSEFESPKKKAKVE

SEQ ID NO: 1759 - protein, 2218 aa, synthetic construct
  source 1..2218: note = Description of Artificial Sequence: Synthetic polypeptide
MPAAKRVKLDGGDKKYSIGLDIGTNSVGWAVITDEYKVPSKKFKVLGNTDRHSIKKNLIGALLFDSGETAEATRLKRTARRRYTRRKNRICYLQEIFSNEMAKVDDSFFHRLEESFLVEEDKKHERHPIFGNIVDEVAYHEKYPTIYHLRKKLVDSTDKADLRLIYLALAHMIKFRGHFLIEGDLNPDNSDVDKLFIQLVQTYNQLFEENPINASGVDAKAILSARLSKSRRLENLIAQLPGEKKNGLFGNLIALSLGLTPNFKSNFDLAEDAKLQLSKDTYDDDLDNLLAQIGDQYADLFLAAKNLSDAILLSDILRVNTEITKAPLSASMIKRYDEHHQDLTLLKALVRQQLPEKYKEIFFDQSKNGYAGYIDGGASQEEFYKFIKPILEKMDGTEELLVKLNREDLLRKQRTFDNGSIPHQIHLGELHAILRRQEDFYPFLKDNREKIEKILTFRIPYYVGPLARGNSRFAWMTRKSEETITPWNFEEVVDKGASAQSFIERMTNFDKNLPNEKVLPKHSLLYEYFTVYNELTKVKYVTEGMRKPAFLSGEQKKAIVDLLFKTNRKVTVKQLKEDYFKKIECFDSVEISGVEDRFNASLGTYHDLLKIIKDKDFLDNEENEDILEDIVLTLTLFEDREMIEERLKTYAHLFDDKVMKQLKRRRYTGWGRLSRKLINGIRDKQSGKTILDFLKSDGFANRNFMQLIHDDSLTFKEDIQKAQVSGQGDSLHEHIANLAGSPAIKKGILQTVKVVDELVKVMGRHKPENIVIEMARENQTTQKGQKNSRERMKRIEEGIKELGSQILKEHPVENTQLQNEKLYLYYLQNGRDMYVDQELDINRLSDYDVDHIVPQSFLKDDSIDNKVLTRSDKARGKSDNVPSEEVVKKMKNYWRQLLNAKLITQRKFDNLTKAERGGLSELDKAGFIKRQLVETRQITKHVAQILDSRMNTKYDENDKLIREVKVITLKSKLVSDFRKDFQFYKVREINNYHHAHDAYLNAVVGTALIKKYPKLESEFVYGDYKVYDVRKMIAKSEQEIGKATAKYFFYSNIMNFFKTEITLANGEIRKRPLIETNGETGEIVWDKGRDFATVRKVLSMPQVNIVKKTEVQTGGFSKESILPKRNSDKLIARKKDWDPKKYGGFDSPTVAYSVLVVAKVEKGKSKKLKSVKELLGITIMERSSFEKNPIDFLEAKGYKEVKKDLIIKLPKYSLFELENGRKRMLASAGELQKGNELALPSKYVNFLYLASHYEKLKGSPEDNEQKQLFVEQHKHYLDEIIEQISEFSKRVILADANLDKVLSAYNKHRDKPIREQAENIIHLFTLTNLGAPAAFKYFDTTIDRKRYTSTKEVLDATLIHQSITGLYETRIDLSQLGGDGGGSSGGGEAAAKGGTLGDQGSRGSDPLPEPRVTLTVEGIPTEFLVNTGAEHSVLTKPMGKMGSKRTVVAGATGSKVYPWTTKRLLKIGQKQVTHSFLVIPECPAPLLGRDLLTKLKAQIQFSTEGPQVTWEDRPAMCLVLNLEEEYRLHEKPVPPSIDPSWLQLFPMVWAEKAGMGLANQVPPVVVELKSDASPVAVRQYPMSKEAREGIRPHIQRFLDLGILVPCQSPWNTPLLPVKKPGTNDYRPVQDLREVNKRVQDIHPTVPNPYNLLSSLPPSHTWYSVLDLKDAFFCLKLHPNSQPLFAFEWRDPEKGNTGQLTWTRLPQGFKNSPTLFNEALHRDLASFRALNPQVVMLQYVDDLLVAAPTYRDCKEGTRRLLQELSKLGYRVSAKKAQLCREEVTYLGYLLKGGKRWLTPARKATVMKIPTPTTPRQVREFLGTAGFCRLWIPGFASLAAPLYPLTRPKVPFTWTEAHQEAFGRIKEALLSAPALALPDLTKPFALYVDEKEGVARGVLTQTLGPWRRPVAYLSKKLDPVASGWPTCLKAIAAVALLLKDADKLTLGQNVLVIAPHNLESIVRQPPDRWMTNARMTHYQSLLLNERVSFAPPAILNPATLLPVESDDTPIHICSEILAEETGTRPDLRDQPLPGVPAWYTDGSSFIMDGRRQAGAAIVDNKRTVWASNLPEGTSAQKAELIALTQALRLAEGKSINIYTDSRYAFATAHVHGAIYKQRGWLTSAGKDIKNKEEILALLEAIHLPKRVAIIHCPGHQRGTDPVATGNRKADEAAKQAAQSTRILTETTKNAGKRTADGSEFEKRTADGSEFESPKKKAKVE

SEQ ID NO: 1760 - protein, 2215 aa, synthetic construct
  source 1..2215: note = Description of Artificial Sequence: Synthetic polypeptide
MPAAKRVKLDGGDKKYSIGLDIGTNSVGWAVITDEYKVPSKKFKVLGNTDRHSIKKNLIGALLFDSGETAEATRLKRTARRRYTRRKNRICYLQEIFSNEMAKVDDSFFHRLEESFLVEEDKKHERHPIFGNIVDEVAYHEKYPTIYHLRKKLVDSTDKADLRLIYLALAHMIKFRGHFLIEGDLNPDNSDVDKLFIQLVQTYNQLFEENPINASGVDAKAILSARLSKSRRLENLIAQLPGEKKNGLFGNLIALSLGLTPNFKSNFDLAEDAKLQLSKDTYDDDLDNLLAQIGDQYADLFLAAKNLSDAILLSDILRVNTEITKAPLSASMIKRYDEHHQDLTLLKALVRQQLPEKYKEIFFDQSKNGYAGYIDGGASQEEFYKFIKPILEKMDGTEELLVKLNREDLLRKQRTFDNGSIPHQIHLGELHAILRRQEDFYPFLKDNREKIEKILTFRIPYYVGPLARGNSRFAWMTRKSEETITPWNFEEVVDKGASAQSFIERMTNFDKNLPNEKVLPKHSLLYEYFTVYNELTKVKYVTEGMRKPAFLSGEQKKAIVDLLFKTNRKVTVKQLKEDYFKKIECFDSVEISGVEDRFNASLGTYHDLLKIIKDKDFLDNEENEDILEDIVLTLTLFEDREMIEERLKTYAHLFDDKVMKQLKRRRYTGWGRLSRKLINGIRDKQSGKTILDFLKSDGFANRNFMQLIHDDSLTFKEDIQKAQVSGQGDSLHEHIANLAGSPAIKKGILQTVKVVDELVKVMGRHKPENIVIEMARENQTTQKGQKNSRERMKRIEEGIKELGSQILKEHPVENTQLQNEKLYLYYLQNGRDMYVDQELDINRLSDYDVDHIVPQSFLKDDSIDNKVLTRSDKARGKSDNVPSEEVVKKMKNYWRQLLNAKLITQRKFDNLTKAERGGLSELDKAGFIKRQLVETRQITKHVAQILDSRMNTKYDENDKLIREVKVITLKSKLVSDFRKDFQFYKVREINNYHHAHDAYLNAVVGTALIKKYPKLESEFVYGDYKVYDVRKMIAKSEQEIGKATAKYFFYSNIMNFFKTEITLANGEIRKRPLIETNGETGEIVWDKGRDFATVRKVLSMPQVNIVKKTEVQTGGFSKESILPKRNSDKLIARKKDWDPKKYGGFDSPTVAYSVLVVAKVEKGKSKKLKSVKELLGITIMERSSFEKNPIDFLEAKGYKEVKKDLIIKLPKYSLFELENGRKRMLASAGELQKGNELALPSKYVNFLYLASHYEKLKGSPEDNEQKQLFVEQHKHYLDEIIEQISEFSKRVILADANLDKVLSAYNKHRDKPIREQAENIIHLFTLTNLGAPAAFKYFDTTIDRKRYTSTKEVLDATLIHQSITGLYETRIDLSQLGGDGGEAAAKGGGGGTLGDQGSRGSDPLPEPRVTLTVEGIPTEFLVNTGAEHSVLTKPMGKMGSKRTVVAGATGSKVYPWTTKRLLKIGQKQVTHSFLVIPECPAPLLGRDLLTKLKAQIQFSTEGPQVTWEDRPAMCLVLNLEEEYRLHEKPVPPSIDPSWLQLFPMVWAEKAGMGLANQVPPVVVELKSDASPVAVRQYPMSKEAREGIRPHIQRFLDLGILVPCQSPWNTPLLPVKKPGTNDYRPVQDLREVNKRVQDIHPTVPNPYNLLSSLPPSHTWYSVLDLKDAFFCLKLHPNSQPLFAFEWRDPEKGNTGQLTWTRLPQGFKNSPTLFNEALHRDLASFRALNPQVVMLQYVDDLLVAAPTYRDCKEGTRRLLQELSKLGYRVSAKKAQLCREEVTYLGYLLKGGKRWLTPARKATVMKIPTPTTPRQVREFLGTAGFCRLWIPGFASLAAPLYPLTRPKVPFTWTEAHQEAFGRIKEALLSAPALALPDLTKPFALYVDEKEGVARGVLTQTLGPWRRPVAYLSKKLDPVASGWPTCLKAIAAVALLLKDADKLTLGQNVLVIAPHNLESIVRQPPDRWMTNARMTHYQSLLLNERVSFAPPAILNPATLLPVESDDTPIHICSEILAEETGTRPDLRDQPLPGVPAWYTDGSSFIMDGRRQAGAAIVDNKRTVWASNLPEGTSAQKAELIALTQALRLAEGKSINIYTDSRYAFATAHVHGAIYKQRGWLTSAGKDIKNKEEILALLEAIHLPKRVAIIHCPGHQRGTDPVATGNRKADEAAKQAAQSTRILTETTKNAGKRTADGSEFEKRTADGSEFESPKKKAKVE

SEQ ID NO: 1761 - protein, 2213 aa, synthetic construct
  source 1..2213: note = Description of Artificial Sequence: Synthetic polypeptide
MPAAKRVKLDGGDKKYSIGLDIGTNSVGWAVITDEYKVPSKKFKVLGNTDRHSIKKNLIGALLFDSGETAEATRLKRTARRRYTRRKNRICYLQEIFSNEMAKVDDSFFHRLEESFLVEEDKKHERHPIFGNIVDEVAYHEKYPTIYHLRKKLVDSTDKADLRLIYLALAHMIKFRGHFLIEGDLNPDNSDVDKLFIQLVQTYNQLFEENPINASGVDAKAILSARLSKSRRLENLIAQLPGEKKNGLFGNLIALSLGLTPNFKSNFDLAEDAKLQLSKDTYDDDLDNLLAQIGDQYADLFLAAKNLSDAILLSDILRVNTEITKAPLSASMIKRYDEHHQDLTLLKALVRQQLPEKYKEIFFDQSKNGYAGYIDGGASQEEFYKFIKPILEKMDGTEELLVKLNREDLLRKQRTFDNGSIPHQIHLGELHAILRRQEDFYPFLKDNREKIEKILTFRIPYYVGPLARGNSRFAWMTRKSEETITPWNFEEVVDKGASAQSFIERMTNFDKNLPNEKVLPKHSLLYEYFTVYNELTKVKYVTEGMRKPAFLSGEQKKAIVDLLFKTNRKVTVKQLKEDYFKKIECFDSVEISGVEDRFNASLGTYHDLLKIIKDKDFLDNEENEDILEDIVLTLTLFEDREMIEERLKTYAHLFDDKVMKQLKRRRYTGWGRLSRKLINGIRDKQSGKTILDFLKSDGFANRNFMQLIHDDSLTFKEDIQKAQVSGQGDSLHEHIANLAGSPAIKKGILQTVKVVDELVKVMGRHKPENIVIEMARENQTTQKGQKNSRERMKRIEEGIKELGSQILKEHPVENTQLQNEKLYLYYLQNGRDMYVDQELDINRLSDYDVDHIVPQSFLKDDSIDNKVLTRSDKARGKSDNVPSEEVVKKMKNYWRQLLNAKLITQRKFDNLTKAERGGLSELDKAGFIKRQLVETRQITKHVAQILDSRMNTKYDENDKLIREVKVITLKSKLVSDFRKDFQFYKVREINNYHHAHDAYLNAVVGTALIKKYPKLESEFVYGDYKVYDVRKMIAKSEQEIGKATAKYFFYSNIMNFFKTEITLANGEIRKRPLIETNGETGEIVWDKGRDFATVRKVLSMPQVNIVKKTEVQTGGFSKESILPKRNSDKLIARKKDWDPKKYGGFDSPTVAYSVLVVAKVEKGKSKKLKSVKELLGITIMERSSFEKNPIDFLEAKGYKEVKKDLIIKLPKYSLFELENGRKRMLASAGELQKGNELALPSKYVNFLYLASHYEKLKGSPEDNEQKQLFVEQHKHYLDEIIEQISEFSKRVILADANLDKVLSAYNKHRDKPIREQAENIIHLFTLTNLGAPAAFKYFDTTIDRKRYTSTKEVLDATLIHQSITGLYETRIDLSQLGGDGGGGSGGGGGTLGDQGSRGSDPLPEPRVTLTVEGIPTEFLVNTGAEHSVLTKPMGKMGSKRTVVAGATGSKVYPWTTKRLLKIGQKQVTHSFLVIPECPAPLLGRDLLTKLKAQIQFSTEGPQVTWEDRPAMCLVLNLEEEYRLHEKPVPPSIDPSWLQLFPMVWAEKAGMGLANQVPPVVVELKSDASPVAVRQYPMSKEAREGIRPHIQRFLDLGILVPCQSPWNTPLLPVKKPGTNDYRPVQDLREVNKRVQDIHPTVPNPYNLLSSLPPSHTWYSVLDLKDAFFCLKLHPNSQPLFAFEWRDPEKGNTGQLTWTRLPQGFKNSPTLFNEALHRDLASFRALNPQVVMLQYVDDLLVAAPTYRDCKEGTRRLLQELSKLGYRVSAKKAQLCREEVTYLGYLLKGGKRWLTPARKATVMKIPTPTTPRQVREFLGTAGFCRLWIPGFASLAAPLYPLTRPKVPFTWTEAHQEAFGRIKEALLSAPALALPDLTKPFALYVDEKEGVARGVLTQTLGPWRRPVAYLSKKLDPVASGWPTCLKAIAAVALLLKDADKLTLGQNVLVIAPHNLESIVRQPPDRWMTNARMTHYQSLLLNERVSFAPPAILNPATLLPVESDDTPIHICSEILAEETGTRPDLRDQPLPGVPAWYTDGSSFIMDGRRQAGAAIVDNKRTVWASNLPEGTSAQKAELIALTQALRLAEGKSINIYTDSRYAFATAHVHGAIYKQRGWLTSAGKDIKNKEEILALLEAIHLPKRVAIIHCPGHQRGTDPVATGNRKADEAAKQAAQSTRILTETTKNAGKRTADGSEFEKRTADGSEFESPKKKAKVE

SEQ ID NO: 1762 - protein, 2218 aa, synthetic construct
  source 1..2218: note = Description of Artificial Sequence: Synthetic polypeptide
MPAAKRVKLDGGDKKYSIGLDIGTNSVGWAVITDEYKVPSKKFKVLGNTDRHSIKKNLIGALLFDSGETAEATRLKRTARRRYTRRKNRICYLQEIFSNEMAKVDDSFFHRLEESFLVEEDKKHERHPIFGNIVDEVAYHEKYPTIYHLRKKLVDSTDKADLRLIYLALAHMIKFRGHFLIEGDLNPDNSDVDKLFIQLVQTYNQLFEENPINASGVDAKAILSARLSKSRRLENLIAQLPGEKKNGLFGNLIALSLGLTPNFKSNFDLAEDAKLQLSKDTYDDDLDNLLAQIGDQYADLFLAAKNLSDAILLSDILRVNTEITKAPLSASMIKRYDEHHQDLTLLKALVRQQLPEKYKEIFFDQSKNGYAGYIDGGASQEEFYKFIKPILEKMDGTEELLVKLNREDLLRKQRTFDNGSIPHQIHLGELHAILRRQEDFYPFLKDNREKIEKILTFRIPYYVGPLARGNSRFAWMTRKSEETITPWNFEEVVDKGASAQSFIERMTNFDKNLPNEKVLPKHSLLYEYFTVYNELTKVKYVTEGMRKPAFLSGEQKKAIVDLLFKTNRKVTVKQLKEDYFKKIECFDSVEISGVEDRFNASLGTYHDLLKIIKDKDFLDNEENEDILEDIVLTLTLFEDREMIEERLKTYAHLFDDKVMKQLKRRRYTGWGRLSRKLINGIRDKQSGKTILDFLKSDGFANRNFMQLIHDDSLTFKEDIQKAQVSGQGDSLHEHIANLAGSPAIKKGILQTVKVVDELVKVMGRHKPENIVIEMARENQTTQKGQKNSRERMKRIEEGIKELGSQILKEHPVENTQLQNEKLYLYYLQNGRDMYVDQELDINRLSDYDVDHIVPQSFLKDDSIDNKVLTRSDKARGKSDNVPSEEVVKKMKNYWRQLLNAKLITQRKFDNLTKAERGGLSELDKAGFIKRQLVETRQITKHVAQILDSRMNTKYDENDKLIREVKVITLKSKLVSDFRKDFQFYKVREINNYHHAHDAYLNAVVGTALIKKYPKLESEFVYGDYKVYDVRKMIAKSEQEIGKATAKYFFYSNIMNFFKTEITLANGEIRKRPLIETNGETGEIVWDKGRDFATVRKVLSMPQVNIVKKTEVQTGGFSKESILPKRNSDKLIARKKDWDPKKYGGFDSPTVAYSVLVVAKVEKGKSKKLKSVKELLGITIMERSSFEKNPIDFLEAKGYKEVKKDLIIKLPKYSLFELENGRKRMLASAGELQKGNELALPSKYVNFLYLASHYEKLKGSPEDNEQKQLFVEQHKHYLDEIIEQISEFSKRVILADANLDKVLSAYNKHRDKPIREQAENIIHLFTLTNLGAPAAFKYFDTTIDRKRYTSTKEVLDATLIHQSITGLYETRIDLSQLGGDGGPAPEAAAKGSSGGTLGDQGSRGSDPLPEPRVTLTVEGIPTEFLVNTGAEHSVLTKPMGKMGSKRTVVAGATGSKVYPWTTKRLLKIGQKQVTHSFLVIPECPAPLLGRDLLTKLKAQIQFSTEGPQVTWEDRPAMCLVLNLEEEYRLHEKPVPPSIDPSWLQLFPMVWAEKAGMGLANQVPPVVVELKSDASPVAVRQYPMSKEAREGIRPHIQRFLDLGILVPCQSPWNTPLLPVKKPGTNDYRPVQDLREVNKRVQDIHPTVPNPYNLLSSLPPSHTWYSVLDLKDAFFCLKLHPNSQPLFAFEWRDPEKGNTGQLTWTRLPQGFKNSPTLFNEALHRDLASFRALNPQVVMLQYVDDLLVAAPTYRDCKEGTRRLLQELSKLGYRVSAKKAQLCREEVTYLGYLLKGGKRWLTPARKATVMKIPTPTTPRQVREFLGTAGFCRLWIPGFASLAAPLYPLTRPKVPFTWTEAHQEAFGRIKEALLSAPALALPDLTKPFALYVDEKEGVARGVLTQTLGPWRRPVAYLSKKLDPVASGWPTCLKAIAAVALLLKDADKLTLGQNVLVIAPHNLESIVRQPPDRWMTNARMTHYQSLLLNERVSFAPPAILNPATLLPVESDDTPIHICSEILAEETGTRPDLRDQPLPGVPAWYTDGSSFIMDGRRQAGAAIVDNKRTVWASNLPEGTSAQKAELIALTQALRLAEGKSINIYTDSRYAFATAHVHGAIYKQRGWLTSAGKDIKNKEEILALLEAIHLPKRVAIIHCPGHQRGTDPVATGNRKADEAAKQAAQSTRILTETTKNAGKRTADGSEFEKRTADGSEFESPKKKAKVE

SEQ ID NO: 1763 - protein, 2215 aa, synthetic construct
  source 1..2215: note = Description of Artificial Sequence: Synthetic polypeptide
MPAAKRVKLDGGDKKYSIGLDIGTNSVGWAVITDEYKVPSKKFKVLGNTDRHSIKKNLIGALLFDSGETAEATRLKRTARRRYTRRKNRICYLQEIFSNEMAKVDDSFFHRLEESFLVEEDKKHERHPIFGNIVDEVAYHEKYPTIYHLRKKLVDSTDKADLRLIYLALAHMIKFRGHFLIEGDLNPDNSDVDKLFIQLVQTYNQLFEENPINASGVDAKAILSARLSKSRRLENLIAQLPGEKKNGLFGNLIALSLGLTPNFKSNFDLAEDAKLQLSKDTYDDDLDNLLAQIGDQYADLFLAAKNLSDAILLSDILRVNTEITKAPLSASMIKRYDEHHQDLTLLKALVRQQLPEKYKEIFFDQSKNGYAGYIDGGASQEEFYKFIKPILEKMDGTEELLVKLNREDLLRKQRTFDNGSIPHQIHLGELHAILRRQEDFYPFLKDNREKIEKILTFRIPYYVGPLARGNSRFAWMTRKSEETITPWNFEEVVDKGASAQSFIERMTNFDKNLPNEKVLPKHSLLYEYFTVYNELTKVKYVTEGMRKPAFLSGEQKKAIVDLLFKTNRKVTVKQLKEDYFKKIECFDSVEISGVEDRFNASLGTYHDLLKIIKDKDFLDNEENEDILEDIVLTLTLFEDREMIEERLKTYAHLFDDKVMKQLKRRRYTGWGRLSRKLINGIRDKQSGKTILDFLKSDGFANRNFMQLIHDDSLTFKEDIQKAQVSGQGDSLHEHIANLAGSPAIKKGILQTVKVVDELVKVMGRHKPENIVIEMARENQTTQKGQKNSRERMKRIEEGIKELGSQILKEHPVENTQLQNEKLYLYYLQNGRDMYVDQELDINRLSDYDVDHIVPQSFLKDDSIDNKVLTRSDKARGKSDNVPSEEVVKKMKNYWRQLLNAKLITQRKFDNLTKAERGGLSELDKAGFIKRQLVETRQITKHVAQILDSRMNTKYDENDKLIREVKVITLKSKLVSDFRKDFQFYKVREINNYHHAHDAYLNAVVGTALIKKYPKLESEFVYGDYKVYDVRKMIAKSEQEIGKATAKYFFYSNIMNFFKTEITLANGEIRKRPLIETNGETGEIVWDKGRDFATVRKVLSMPQVNIVKKTEVQTGGFSKESILPKRNSDKLIARKKDWDPKKYGGFDSPTVAYSVLVVAKVEKGKSKKLKSVKELLGITIMERSSFEKNPIDFLEAKGYKEVKKDLIIKLPKYSLFELENGRKRMLASAGELQKGNELALPSKYVNFLYLASHYEKLKGSPEDNEQKQLFVEQHKHYLDEIIEQISEFSKRVILADANLDKVLSAYNKHRDKPIREQAENIIHLFTLTNLGAPAAFKYFDTTIDRKRYTSTKEVLDATLIHQSITGLYETRIDLSQLGGDGGEAAAKGGSGGTLGDQGSRGSDPLPEPRVTLTVEGIPTEFLVNTGAEHSVLTKPMGKMGSKRTVVAGATGSKVYPWTTKRLLKIGQKQVTHSFLVIPECPAPLLGRDLLTKLKAQIQFSTEGPQVTWEDRPAMCLVLNLEEEYRLHEKPVPPSIDPSWLQLFPMVWAEKAGMGLANQVPPVVVELKSDASPVAVRQYPMSKEAREGIRPHIQRFLDLGILVPCQSPWNTPLLPVKKPGTNDYRPVQDLREVNKRVQDIHPTVPNPYNLLSSLPPSHTWYSVLDLKDAFFCLKLHPNSQPLFAFEWRDPEKGNTGQLTWTRLPQGFKNSPTLFNEALHRDLASFRALNPQVVMLQYVDDLLVAAPTYRDCKEGTRRLLQELSKLGYRVSAKKAQLCREEVTYLGYLLKGGKRWLTPARKATVMKIPTPTTPRQVREFLGTAGFCRLWIPGFASLAAPLYPLTRPKVPFTWTEAHQEAFGRIKEALLSAPALALPDLTKPFALYVDEKEGVARGVLTQTLGPWRRPVAYLSKKLDPVASGWPTCLKAIAAVALLLKDADKLTLGQNVLVIAPHNLESIVRQPPDRWMTNARMTHYQSLLLNERVSFAPPAILNPATLLPVESDDTPIHICSEILAEETGTRPDLRDQPLPGVPAWYTDGSSFIMDGRRQAGAAIVDNKRTVWASNLPEGTSAQKAELIALTQALRLAEGKSINIYTDSRYAFATAHVHGAIYKQRGWLTSAGKDIKNKEEILALLEAIHLPKRVAIIHCPGHQRGTDPVATGNRKADEAAKQAAQSTRILTETTKNAGKRTADGSEFEKRTADGSEFESPKKKAKVE

SEQ ID NO: 1764 - protein, 2216 aa, synthetic construct
  source 1..2216: note = Description of Artificial Sequence: Synthetic polypeptide
MPAAKRVKLDGGDKKYSIGLDIGTNSVGWAVITDEYKVPSKKFKVLGNTDRHSIKKNLIGALLFDSGETAEATRLKRTARRRYTRRKNRICYLQEIFSNEMAKVDDSFFHRLEESFLVEEDKKHERHPIFGNIVDEVAYHEKYPTIYHLRKKLVDSTDKADLRLIYLALAHMIKFRGHFLIEGDLNPDNSDVDKLFIQLVQTYNQLFEENPINASGVDAKAILSARLSKSRRLENLIAQLPGEKKNGLFGNLIALSLGLTPNFKSNFDLAEDAKLQLSKDTYDDDLDNLLAQIGDQYADLFLAAKNLSDAILLSDILRVNTEITKAPLSASMIKRYDEHHQDLTLLKALVRQQLPEKYKEIFFDQSKNGYAGYIDGGASQEEFYKFIKPILEKMDGTEELLVKLNREDLLRKQRTFDNGSIPHQIHLGELHAILRRQEDFYPFLKDNREKIEKILTFRIPYYVGPLARGNSRFAWMTRKSEETITPWNFEEVVDKGASAQSFIERMTNFDKNLPNEKVLPKHSLLYEYFTVYNELTKVKYVTEGMRKPAFLSGEQKKAIVDLLFKTNRKVTVKQLKEDYFKKIECFDSVEISGVEDRFNASLGTYHDLLKIIKDKDFLDNEENEDILEDIVLTLTLFEDREMIEERLKTYAHLFDDKVMKQLKRRRYTGWGRLSRKLINGIRDKQSGKTILDFLKSDGFANRNFMQLIHDDSLTFKEDIQKAQVSGQGDSLHEHIANLAGSPAIKKGILQTVKVVDELVKVMGRHKPENIVIEMARENQTTQKGQKNSRERMKRIEEGIKELGSQILKEHPVENTQLQNEKLYLYYLQNGRDMYVDQELDINRLSDYDVDHIVPQSFLKDDSIDNKVLTRSDKARGKSDNVPSEEVVKKMKNYWRQLLNAKLITQRKFDNLTKAERGGLSELDKAGFIKRQLVETRQITKHVAQILDSRMNTKYDENDKLIREVKVITLKSKLVSDFRKDFQFYKVREINNYHHAHDAYLNAVVGTALIKKYPKLESEFVYGDYKVYDVRKMIAKSEQEIGKATAKYFFYSNIMNFFKTEITLANGEIRKRPLIETNGETGEIVWDKGRDFATVRKVLSMPQVNIVKKTEVQTGGFSKESILPKRNSDKLIARKKDWDPKKYGGFDSPTVAYSVLVVAKVEKGKSKKLKSVKELLGITIMERSSFEKNPIDFLEAKGYKEVKKDLIIKLPKYSLFELENGRKRMLASAGELQKGNELALPSKYVNFLYLASHYEKLKGSPEDNEQKQLFVEQHKHYLDEIIEQISEFSKRVILADANLDKVLSAYNKHRDKPIREQAENIIHLFTLTNLGAPAAFKYFDTTIDRKRYTSTKEVLDATLIHQSITGLYETRIDLSQLGGDGGGGGGSSGGSGGTLGDQGSRGSDPLPEPRVTLTVEGIPTEFLVNTGAEHSVLTKPMGKMGSKRTVVAGATGSKVYPWTTKRLLKIGQKQVTHSFLVIPECPAPLLGRDLLTKLKAQIQFSTEGPQVTWEDRPAMCLVLNLEEEYRLHEKPVPPSIDPSWLQLFPMVWAEKAGMGLANQVPPVVVELKSDASPVAVRQYPMSKEAREGIRPHIQRFLDLGILVPCQSPWNTPLLPVKKPGTNDYRPVQDLREVNKRVQDIHPTVPNPYNLLSSLPPSHTWYSVLDLKDAFFCLKLHPNSQPLFAFEWRDPEKGNTGQLTWTRLPQGFKNSPTLFNEALHRDLASFRALNPQVVMLQYVDDLLVAAPTYRDCKEGTRRLLQELSKLGYRVSAKKAQLCREEVTYLGYLLKGGKRWLTPARKATVMKIPTPTTPRQVREFLGTAGFCRLWIPGFASLAAPLYPLTRPKVPFTWTEAHQEAFGRIKEALLSAPALALPDLTKPFALYVDEKEGVARGVLTQTLGPWRRPVAYLSKKLDPVASGWPTCLKAIAAVALLLKDADKLTLGQNVLVIAPHNLESIVRQPPDRWMTNARMTHYQSLLLNERVSFAPPAILNPATLLPVESDDTPIHICSEILAEETGTRPDLRDQPLPGVPAWYTDGSSFIMDGRRQAGAAIVDNKRTVWASNLPEGTSAQKAELIALTQALRLAEGKSINIYTDSRYAFATAHVHGAIYKQRGWLTSAGKDIKNKEEILALLEAIHLPKRVAIIHCPGHQRGTDPVATGNRKADEAAKQAAQSTRILTETTKNAGKRTADGSEFEKRTADGSEFESPKKKAKVE

SEQ ID NO: 1765 - protein, 2216 aa, synthetic construct
  source 1..2216: note = Description of Artificial Sequence: Synthetic polypeptide
MPAAKRVKLDGGDKKYSIGLDIGTNSVGWAVITDEYKVPSKKFKVLGNTDRHSIKKNLIGALLFDSGETAEATRLKRTARRRYTRRKNRICYLQEIFSNEMAKVDDSFFHRLEESFLVEEDKKHERHPIFGNIVDEVAYHEKYPTIYHLRKKLVDSTDKADLRLIYLALAHMIKFRGHFLIEGDLNPDNSDVDKLFIQLVQTYNQLFEENPINASGVDAKAILSARLSKSRRLENLIAQLPGEKKNGLFGNLIALSLGLTPNFKSNFDLAEDAKLQLSKDTYDDDLDNLLAQIGDQYADLFLAAKNLSDAILLSDILRVNTEITKAPLSASMIKRYDEHHQDLTLLKALVRQQLPEKYKEIFFDQSKNGYAGYIDGGASQEEFYKFIKPILEKMDGTEELLVKLNREDLLRKQRTFDNGSIPHQIHLGELHAILRRQEDFYPFLKDNREKIEKILTFRIPYYVGPLARGNSRFAWMTRKSEETITPWNFEEVVDKGASAQSFIERMTNFDKNLPNEKVLPKHSLLYEYFTVYNELTKVKYVTEGMRKPAFLSGEQKKAIVDLLFKTNRKVTVKQLKEDYFKKIECFDSVEISGVEDRFNASLGTYHDLLKIIKDKDFLDNEENEDILEDIVLTLTLFEDREMIEERLKTYAHLFDDKVMKQLKRRRYTGWGRLSRKLINGIRDKQSGKTILDFLKSDGFANRNFMQLIHDDSLTFKEDIQKAQVSGQGDSLHEHIANLAGSPAIKKGILQTVKVVDELVKVMGRHKPENIVIEMARENQTTQKGQKNSRERMKRIEEGIKELGSQILKEHPVENTQLQNEKLYLYYLQNGRDMYVDQELDINRLSDYDVDHIVPQSFLKDDSIDNKVLTRSDKARGKSDNVPSEEVVKKMKNYWRQLLNAKLITQRKFDNLTKAERGGLSELDKAGFIKRQLVETRQITKHVAQILDSRMNTKYDENDKLIREVKVITLKSKLVSDFRKDFQFYKVREINNYHHAHDAYLNAVVGTALIKKYPKLESEFVYGDYKVYDVRKMIAKSEQEIGKATAKYFFYSNIMNFFKTEITLANGEIRKRPLIETNGETGEIVWDKGRDFATVRKVLSMPQVNIVKKTEVQTGGFSKESILPKRNSDKLIARKKDWDPKKYGGFDSPTVAYSVLVVAKVEKGKSKKLKSVKELLGITIMERSSFEKNPIDFLEAKGYKEVKKDLIIKLPKYSLFELENGRKRMLASAGELQKGNELALPSKYVNFLYLASHYEKLKGSPEDNEQKQLFVEQHKHYLDEIIEQISEFSKRVILADANLDKVLSAYNKHRDKPIREQAENIIHLFTLTNLGAPAAFKYFDTTIDRKRYTSTKEVLDATLIHQSITGLYETRIDLSQLGGDGGPAPGSSGGSGGTLGDQGSRGSDPLPEPRVTLTVEGIPTEFLVNTGAEHSVLTKPMGKMGSKRTVVAGATGSKVYPWTTKRLLKIGQKQVTHSFLVIPECPAPLLGRDLLTKLKAQIQFSTEGPQVTWEDRPAMCLVLNLEEEYRLHEKPVPPSIDPSWLQLFPMVWAEKAGMGLANQVPPVVVELKSDASPVAVRQYPMSKEAREGIRPHIQRFLDLGILVPCQSPWNTPLLPVKKPGTNDYRPVQDLREVNKRVQDIHPTVPNPYNLLSSLPPSHTWYSVLDLKDAFFCLKLHPNSQPLFAFEWRDPEKGNTGQLTWTRLPQGFKNSPTLFNEALHRDLASFRALNPQVVMLQYVDDLLVAAPTYRDCKEGTRRLLQELSKLGYRVSAKKAQLCREEVTYLGYLLKGGKRWLTPARKATVMKIPTPTTPRQVREFLGTAGFCRLWIPGFASLAAPLYPLTRPKVPFTWTEAHQEAFGRIKEALLSAPALALPDLTKPFALYVDEKEGVARGVLTQTLGPWRRPVAYLSKKLDPVASGWPTCLKAIAAVALLLKDADKLTLGQNVLVIAPHNLESIVRQPPDRWMTNARMTHYQSLLLNERVSFAPPAILNPATLLPVESDDTPIHICSEILAEETGTRPDLRDQPLPGVPAWYTDGSSFIMDGRRQAGAAIVDNKRTVWASNLPEGTSAQKAELIALTQALRLAEGKSINIYTDSRYAFATAHVHGAIYKQRGWLTSAGKDIKNKEEILALLEAIHLPKRVAIIHCPGHQRGTDPVATGNRKADEAAKQAAQSTRILTETTKNAGKRTADGSEFEKRTADGSEFESPKKKAKVE

SEQ ID NO: 1766 - protein, 2216 aa, synthetic construct
  source 1..2216: note = Description of Artificial Sequence: Synthetic polypeptide
MPAAKRVKLDGGDKKYSIGLDIGTNSVGWAVITDEYKVPSKKFKVLGNTDRHSIKKNLIGALLFDSGETAEATRLKRTARRRYTRRKNRICYLQEIFSNEMAKVDDSFFHRLEESFLVEEDKKHERHPIFGNIVDEVAYHEKYPTIYHLRKKLVDSTDKADLRLIYLALAHMIKFRGHFLIEGDLNPDNSDVDKLFIQLVQTYNQLFEENPINASGVDAKAILSARLSKSRRLENLIAQLPGEKKNGLFGNLIALSLGLTPNFKSNFDLAEDAKLQLSKDTYDDDLDNLLAQIGDQYADLFLAAKNLSDAILLSDILRVNTEITKAPLSASMIKRYDEHHQDLTLLKALVRQQLPEKYKEIFFDQSKNGYAGYIDGGASQEEFYKFIKPILEKMDGTEELLVKLNREDLLRKQRTFDNGSIPHQIHLGELHAILRRQEDFYPFLKDNREKIEKILTFRIPYYVGPLARGNSRFAWMTRKSEETITPWNFEEVVDKGASAQSFIERMTNFDKNLPNEKVLPKHSLLYEYFTVYNELTKVKYVTEGMRKPAFLSGEQKKAIVDLLFKTNRKVTVKQLKEDYFKKIECFDSVEISGVEDRFNASLGTYHDLLKIIKDKDFLDNEENEDILEDIVLTLTLFEDREMIEERLKTYAHLFDDKVMKQLKRRRYTGWGRLSRKLINGIRDKQSGKTILDFLKSDGFANRNFMQLIHDDSLTFKEDIQKAQVSGQGDSLHEHIANLAGSPAIKKGILQTVKVVDELVKVMGRHKPENIVIEMARENQTTQKGQKNSRERMKRIEEGIKELGSQILKEHPVENTQLQNEKLYLYYLQNGRDMYVDQELDINRLSDYDVDHIVPQSFLKDDSIDNKVLTRSDKARGKSDNVPSEEVVKKMKNYWRQLLNAKLITQRKFDNLTKAERGGLSELDKAGFIKRQLVETRQITKHVAQILDSRMNTKYDENDKLIREVKVITLKSKLVSDFRKDFQFYKVREINNYHHAHDAYLNAVVGTALIKKYPKLESEFVYGDYKVYDVRKMIAKSEQEIGKATAKYFFYSNIMNFFKTEITLANGEIRKRPLIETNGETGEIVWDKGRDFATVRKVLSMPQVNIVKKTEVQTGGFSKESILPKRNSDKLIARKKDWDPKKYGGFDSPTVAYSVLVVAKVEKGKSKKLKSVKELLGITIMERSSFEKNPIDFLEAKGYKEVKKDLIIKLPKYSLFELENGRKRMLASAGELQKGNELALPSKYVNFLYLASHYEKLKGSPEDNEQKQLFVEQHKHYLDEIIEQISEFSKRVILADANLDKVLSAYNKHRDKPIREQAENIIHLFTLTNLGAPAAFKYFDTTIDRKRYTSTKEVLDATLIHQSITGLYETRIDLSQLGGDGGGGSGGSGGSGGTLGDQGSRGSDPLPEPRVTLTVEGIPTEFLVNTGAEHSVLTKPMGKMGSKRTVVAGATGSKVYPWTTKRLLKIGQKQVTHSFLVIPECPAPLLGRDLLTKLKAQIQFSTEGPQVTWEDRPAMCLVLNLEEEYRLHEKPVPPSIDPSWLQLFPMVWAEKAGMGLANQVPPVVVELKSDASPVAVRQYPMSKEAREGIRPHIQRFLDLGILVPCQSPWNTPLLPVKKPGTNDYRPVQDLREVNKRVQDIHPTVPNPYNLLSSLPPSHTWYSVLDLKDAFFCLKLHPNSQPLFAFEWRDPEKGNTGQLTWTRLPQGFKNSPTLFNEALHRDLASFRALNPQVVMLQYVDDLLVAAPTYRDCKEGTRRLLQELSKLGYRVSAKKAQLCREEVTYLGYLLKGGKRWLTPARKATVMKIPTPTTPRQVREFLGTAGFCRLWIPGFASLAAPLYPLTRPKVPFTWTEAHQEAFGRIKEALLSAPALALPDLTKPFALYVDEKEGVARGVLTQTLGPWRRPVAYLSKKLDPVASGWPTCLKAIAAVALLLKDADKLTLGQNVLVIAPHNLESIVRQPPDRWMTNARMTHYQSLLLNERVSFAPPAILNPATLLPVESDDTPIHICSEILAEETGTRPDLRDQPLPGVPAWYTDGSSFIMDGRRQAGAAIVDNKRTVWASNLPEGTSAQKAELIALTQALRLAEGKSINIYTDSRYAFATAHVHGAIYKQRGWLTSAGKDIKNKEEILALLEAIHLPKRVAIIHCPGHQRGTDPVATGNRKADEAAKQAAQSTRILTETTKNAGKRTADGSEFEKRTADGSEFESPKKKAKVE

SEQ ID NO: 1767 - protein, 2222 aa, synthetic construct
  source 1..2222: note = Description of Artificial Sequence: Synthetic polypeptide
MPAAKRVKLDGGDKKYSIGLDIGTNSVGWAVITDEYKVPSKKFKVLGNTDRHSIKKNLIGALLFDSGETAEATRLKRTARRRYTRRKNRICYLQEIFSNEMAKVDDSFFHRLEESFLVEEDKKHERHPIFGNIVDEVAYHEKYPTIYHLRKKLVDSTDKADLRLIYLALAHMIKFRGHFLIEGDLNPDNSDVDKLFIQLVQTYNQLFEENPINASGVDAKAILSARLSKSRRLENLIAQLPGEKKNGLFGNLIALSLGLTPNFKSNFDLAEDAKLQLSKDTYDDDLDNLLAQIGDQYADLFLAAKNLSDAILLSDILRVNTEITKAPLSASMIKRYDEHHQDLTLLKALVRQQLPEKYKEIFFDQSKNGYAGYIDGGASQEEFYKFIKPILEKMDGTEELLVKLNREDLLRKQRTFDNGSIPHQIHLGELHAILRRQEDFYPFLKDNREKIEKILTFRIPYYVGPLARGNSRFAWMTRKSEETITPWNFEEVVDKGASAQSFIERMTNFDKNLPNEKVLPKHSLLYEYFTVYNELTKVKYVTEGMRKPAFLSGEQKKAIVDLLFKTNRKVTVKQLKEDYFKKIECFDSVEISGVEDRFNASLGTYHDLLKIIKDKDFLDNEENEDILEDIVLTLTLFEDREMIEERLKTYAHLFDDKVMKQLKRRRYTGWGRLSRKLINGIRDKQSGKTILDFLKSDGFANRNFMQLIHDDSLTFKEDIQKAQVSGQGDSLHEHIANLAGSPAIKKGILQTVKVVDELVKVMGRHKPENIVIEMARENQTTQKGQKNSRERMKRIEEGIKELGSQILKEHPVENTQLQNEKLYLYYLQNGRDMYVDQELDINRLSDYDVDHIVPQSFLKDDSIDNKVLTRSDKARGKSDNVPSEEVVKKMKNYWRQLLNAKLITQRKFDNLTKAERGGLSELDKAGFIKRQLVETRQITKHVAQILDSRMNTKYDENDKLIREVKVITLKSKLVSDFRKDFQFYKVREINNYHHAHDAYLNAVVGTALIKKYPKLESEFVYGDYKVYDVRKMIAKSEQEIGKATAKYFFYSNIMNFFKTEITLANGEIRKRPLIETNGETGEIVWDKGRDFATVRKVLSMPQVNIVKKTEVQTGGFSKESILPKRNSDKLIARKKDWDPKKYGGFDSPTVAYSVLVVAKVEKGKSKKLKSVKELLGITIMERSSFEKNPIDFLEAKGYKEVKKDLIIKLPKYSLFELENGRKRMLASAGELQKGNELALPSKYVNFLYLASHYEKLKGSPEDNEQKQLFVEQHKHYLDEIIEQISEFSKRVILADANLDKVLSAYNKHRDKPIREQAENIIHLFTLTNLGAPAAFKYFDTTIDRKRYTSTKEVLDATLIHQSITGLYETRIDLSQLGGDGGGGGGSEAAAKGGGGSGGTLGDQGSRGSDPLPEPRVTLTVEGIPTEFLVNTGAEHSVLTKPMGKMGSKRTVVAGATGSKVYPWTTKRLLKIGQKQVTHSFLVIPECPAPLLGRDLLTKLKAQIQFSTEGPQVTWEDRPAMCLVLNLEEEYRLHEKPVPPSIDPSWLQLFPMVWAEKAGMGLANQVPPVVVELKSDASPVAVRQYPMSKEAREGIRPHIQRFLDLGILVPCQSPWNTPLLPVKKPGTNDYRPVQDLREVNKRVQDIHPTVPNPYNLLSSLPPSHTWYSVLDLKDAFFCLKLHPNSQPLFAFEWRDPEKGNTGQLTWTRLPQGFKNSPTLFNEALHRDLASFRALNPQVVMLQYVDDLLVAAPTYRDCKEGTRRLLQELSKLGYRVSAKKAQLCREEVTYLGYLLKGGKRWLTPARKATVMKIPTPTTPRQVREFLGTAGFCRLWIPGFASLAAPLYPLTRPKVPFTWTEAHQEAFGRIKEALLSAPALALPDLTKPFALYVDEKEGVARGVLTQTLGPWRRPVAYLSKKLDPVASGWPTCLKAIAAVALLLKDADKLTLGQNVLVIAPHNLESIVRQPPDRWMTNARMTHYQSLLLNERVSFAPPAILNPATLLPVESDDTPIHICSEILAEETGTRPDLRDQPLPGVPAWYTDGSSFIMDGRRQAGAAIVDNKRTVWASNLPEGTSAQKAELIALTQALRLAEGKSINIYTDSRYAFATAHVHGAIYKQRGWLTSAGKDIKNKEEILALLEAIHLPKRVAIIHCPGHQRGTDPVATGNRKADEAAKQAAQSTRILTETTKNAGKRTADGSEFEKRTADGSEFESPKKKAKVE

SEQ ID NO: 1768 - protein, 2213 aa, synthetic construct
  source 1..2213: note = Description of Artificial Sequence: Synthetic polypeptide
MPAAKRVKLDGGDKKYSIGLDIGTNSVGWAVITDEYKVPSKKFKVLGNTDRHSIKKNLIGALLFDSGETAEATRLKRTARRRYTRRKNRICYLQEIFSNEMAKVDDSFFHRLEESFLVEEDKKHERHPIFGNIVDEVAYHEKYPTIYHLRKKLVDSTDKADLRLIYLALAHMIKFRGHFLIEGDLNPDNSDVDKLFIQLVQTYNQLFEENPINASGVDAKAILSARLSKSRRLENLIAQLPGEKKNGLFGNLIALSLGLTPNFKSNFDLAEDAKLQLSKDTYDDDLDNLLAQIGDQYADLFLAAKNLSDAILLSDILRVNTEITKAPLSASMIKRYDEHHQDLTLLKALVRQQLPEKYKEIFFDQSKNGYAGYIDGGASQEEFYKFIKPILEKMDGTEELLVKLNREDLLRKQRTFDNGSIPHQIHLGELHAILRRQEDFYPFLKDNREKIEKILTFRIPYYVGPLARGNSRFAWMTRKSEETITPWNFEEVVDKGASAQSFIERMTNFDKNLPNEKVLPKHSLLYEYFTVYNELTKVKYVTEGMRKPAFLSGEQKKAIVDLLFKTNRKVTVKQLKEDYFKKIECFDSVEISGVEDRFNASLGTYHDLLKIIKDKDFLDNEENEDILEDIVLTLTLFEDREMIEERLKTYAHLFDDKVMKQLKRRRYTGWGRLSRKLINGIRDKQSGKTILDFLKSDGFANRNFMQLIHDDSLTFKEDIQKAQVSGQGDSLHEHIANLAGSPAIKKGILQTVKVVDELVKVMGRHKPENIVIEMARENQTTQKGQKNSRERMKRIEEGIKELGSQILKEHPVENTQLQNEKLYLYYLQNGRDMYVDQELDINRLSDYDVDHIVPQSFLKDDSIDNKVLTRSDKARGKSDNVPSEEVVKKMKNYWRQLLNAKLITQRKFDNLTKAERGGLSELDKAGFIKRQLVETRQITKHVAQILDSRMNTKYDENDKLIREVKVITLKSKLVSDFRKDFQFYKVREINNYHHAHDAYLNAVVGTALIKKYPKLESEFVYGDYKVYDVRKMIAKSEQEIGKATAKYFFYSNIMNFFKTEITLANGEIRKRPLIETNGETGEIVWDKGRDFATVRKVLSMPQVNIVKKTEVQTGGFSKESILPKRNSDKLIARKKDWDPKKYGGFDSPTVAYSVLVVAKVEKGKSKKLKSVKELLGITIMERSSFEKNPIDFLEAKGYKEVKKDLIIKLPKYSLFELENGRKRMLASAGELQKGNELALPSKYVNFLYLASHYEKLKGSPEDNEQKQLFVEQHKHYLDEIIEQISEFSKRVILADANLDKVLSAYNKHRDKPIREQAENIIHLFTLTNLGAPAAFKYFDTTIDRKRYTSTKEVLDATLIHQSITGLYETRIDLSQLGGDGGGGSGSSGGTLGDQGSRGSDPLPEPRVTLTVEGIPTEFLVNTGAEHSVLTKPMGKMGSKRTVVAGATGSKVYPWTTKRLLKIGQKQVTHSFLVIPECPAPLLGRDLLTKLKAQIQFSTEGPQVTWEDRPAMCLVLNLEEEYRLHEKPVPPSIDPSWLQLFPMVWAEKAGMGLANQVPPVVVELKSDASPVAVRQYPMSKEAREGIRPHIQRFLDLGILVPCQSPWNTPLLPVKKPGTNDYRPVQDLREVNKRVQDIHPTVPNPYNLLSSLPPSHTWYSVLDLKDAFFCLKLHPNSQPLFAFEWRDPEKGNTGQLTWTRLPQGFKNSPTLFNEALHRDLASFRALNPQVVMLQYVDDLLVAAPTYRDCKEGTRRLLQELSKLGYRVSAKKAQLCREEVTYLGYLLKGGKRWLTPARKATVMKIPTPTTPRQVREFLGTAGFCRLWIPGFASLAAPLYPLTRPKVPFTWTEAHQEAFGRIKEALLSAPALALPDLTKPFALYVDEKEGVARGVLTQTLGPWRRPVAYLSKKLDPVASGWPTCLKAIAAVALLLKDADKLTLGQNVLVIAPHNLESIVRQPPDRWMTNARMTHYQSLLLNERVSFAPPAILNPATLLPVESDDTPIHICSEILAEETGTRPDLRDQPLPGVPAWYTDGSSFIMDGRRQAGAAIVDNKRTVWASNLPEGTSAQKAELIALTQALRLAEGKSINIYTDSRYAFATAHVHGAIYKQRGWLTSAGKDIKNKEEILALLEAIHLPKRVAIIHCPGHQRGTDPVATGNRKADEAAKQAAQSTRILTETTKNAGKRTADGSEFEKRTADGSEFESPKKKAKVE

SEQ ID NO: 1769 - protein, 2218 aa, synthetic construct
  source 1..2218: note = Description of Artificial Sequence: Synthetic polypeptide
MPAAKRVKLDGGDKKYSIGLDIGTNSVGWAVITDEYKVPSKKFKVLGNTDRHSIKKNLIGALLFDSGETAEATRLKRTARRRYTRRKNRICYLQEIFSNEMAKVDDSFFHRLEESFLVEEDKKHERHPIFGNIVDEVAYHEKYPTIYHLRKKLVDSTDKADLRLIYLALAHMIKFRGHFLIEGDLNPDNSDVDKLFIQLVQTYNQLFEENPINASGVDAKAILSARLSKSRRLENLIAQLPGEKKNGLFGNLIALSLGLTPNFKSNFDLAEDAKLQLSKDTYDDDLDNLLAQIGDQYADLFLAAKNLSDAILLSDILRVNTEITKAPLSASMIKRYDEHHQDLTLLKALVRQQLPEKYKEIFFDQSKNGYAGYIDGGASQEEFYKFIKPILEKMDGTEELLVKLNREDLLRKQRTFDNGSIPHQIHLGELHAILRRQEDFYPFLKDNREKIEKILTFRIPYYVGPLARGNSRFAWMTRKSEETITPWNFEEVVDKGASAQSFIERMTNFDKNLPNEKVLPKHSLLYEYFTVYNELTKVKYVTEGMRKPAFLSGEQKKAIVDLLFKTNRKVTVKQLKEDYFKKIECFDSVEISGVEDRFNASLGTYHDLLKIIKDKDFLDNEENEDILEDIVLTLTLFEDREMIEERLKTYAHLFDDKVMKQLKRRRYTGWGRLSRKLINGIRDKQSGKTILDFLKSDGFANRNFMQLIHDDSLTFKEDIQKAQVSGQGDSLHEHIANLAGSPAIKKGILQTVKVVDELVKVMGRHKPENIVIEMARENQTTQKGQKNSRERMKRIEEGIKELGSQILKEHPVENTQLQNEKLYLYYLQNGRDMYVDQELDINRLSDYDVDHIVPQSFLKDDSIDNKVLTRSDKARGKSDNVPSEEVVKKMKNYWRQLLNAKLITQRKFDNLTKAERGGLSELDKAGFIKRQLVETRQITKHVAQILDSRMNTKYDENDKLIREVKVITLKSKLVSDFRKDFQFYKVREINNYHHAHDAYLNAVVGTALIKKYPKLESEFVYGDYKVYDVRKMIAKSEQEIGKATAKYFFYSNIMNFFKTEITLANGEIRKRPLIETNGETGEIVWDKGRDFATVRKVLSMPQVNIVKKTEVQTGGFSKESILPKRNSDKLIARKKDWDPKKYGGFDSPTVAYSVLVVAKVEKGKSKKLKSVKELLGITIMERSSFEKNPIDFLEAKGYKEVKKDLIIKLPKYSLFELENGRKRMLASAGELQKGNELALPSKYVNFLYLASHYEKLKGSPEDNEQKQLFVEQHKHYLDEIIEQISEFSKRVILADANLDKVLSAYNKHRDKPIREQAENIIHLFTLTNLGAPAAFKYFDTTIDRKRYTSTKEVLDATLIHQSITGLYETRIDLSQLGGDGGGGSEAAAKGSSGGTLGDQGSRGSDPLPEPRVTLTVEGIPTEFLVNTGAEHSVLTKPMGKMGSKRTVVAGATGSKVYPWTTKRLLKIGQKQVTHSFLVIPECPAPLLGRDLLTKLKAQIQFSTEGPQVTWEDRPAMCLVLNLEEEYRLHEKPVPPSIDPSWLQLFPMVWAEKAGMGLANQVPPVVVELKSDASPVAVRQYPMSKEAREGIRPHIQRFLDLGILVPCQSPWNTPLLPVKKPGTNDYRPVQDLREVNKRVQDIHPTVPNPYNLLSSLPPSHTWYSVLDLKDAFFCLKLHPNSQPLFAFEWRDPEKGNTGQLTWTRLPQGFKNSPTLFNEALHRDLASFRALNPQVVMLQYVDDLLVAAPTYRDCKEGTRRLLQELSKLGYRVSAKKAQLCREEVTYLGYLLKGGKRWLTPARKATVMKIPTPTTPRQVREFLGKAGFCRLFIPGFASLAAPLYPLTRPKVPFTWTEAHQEAFGRIKEALLSAPALALPDLTKPFALYVDEKEGVARGVLTQTLGPWRRPVAYLSKKLDPVASGWPTCLKAIAAVALLLKDADKLTLGQNVLVIAPHNLESIVRQPPDRWMTNARMTHYQSLLLNERVSFAPPAILNPATLLPVESDDTPIHICSEILAEETGTRPDLRDQPLPGVPAWYTDGSSFIMDGRRQAGAAIVDNKRTVWASNLPEGTSAQKAELIALTQALRLAEGKSINIYTDSRYAFATAHVHGAIYKQRGWLTSAGKDIKNKEEILALLEAIHLPKRVAIIHCPGHQRGTDPVATGNRKADEAAKQAAQSTRILTETTKNAGKRTADGSEFEKRTADGSEFESPKKKAKVE
